United States Patent Application Publication US 2007/0054278 A1 - sequence listing, part 82

SEQ ID NO: 96550 - DNA, 20977 bp, Homo sapiens
aactgggaagctttggcaatagactttcaagtattgccttctcattgaagggagtgcaaagtctgactttctcttattgctctcatgacctggcagcagagaagcagcagcttcaattgcagttgagtgtaccctagtgacctaccttaactgttctcagcattcactttattgctggaaaacggaaaaaaaacagtctttttggaaagttagattaggaatatgggaaaggggaaagaggaatgcgtacagtcaagtcaagagtttgaatgtaactgtatgtttgccttttgccatagggtcaatacacctaagaaacaaggaggactgggacccatgaacattcctttggtatcagacccgaagcgcaccattgctcaggattatggggtcttaaaggctgatgaaggcatctcgttcaggtatgtcatcaggacaagtatccagttggctgaaagccttttatttggagagatctagagccctgatctgtagagactccttgtcatttcattcctttatgcaggggcctcctcactaaggccaggccagtaggagtgtggagaccagtccatttccttcaggcttcaagcctctgtattctaacaaagcacatctctaaacctgtattgcttttcctttcatctcttttcccaggggcctttttatcattgatgataagggtattcttcggcagatcactgtaaatgacctccctgttggccgctctgtggatgagactttgagactagttcaggccttccagttcactgacaaacatggggaaggtaagccatctgtctgataacaggacaacagagtggtggtatgaaggggtgggttgccccttcacacctgtgggtgtttctcgttaggtggaatgagagacttggaaaaagacacgtagacaaagtatagagaaagaaataagggggcccaggggaccagtgttcagcatacagaggatcccgccggcctctgagttcccttagtatttattgatcattcttgggtgtttctcggagagggggatgtggcagggtcataggataatagtggagagaaggtcagcagataaacacgtgaacaaaggtctctgcatcatgaacaaggtaaagaattaagtgctgtgctttagatgtgcatacacataaacatctcaatgccttaaagagcagtattgctgcccgcatgtcccacctccacccctgaggcggttttcccctgtctcagtagatggaacatacaattgggttttacactgagacattccattgcccagggactggctggagacagatgccttcctcttgtctcaactgcaaagaggcgttccttcctcttttactaatcctccttagcacagggtgtcaggctgggggaccccggtcaggtctttcccttcccacgaggccatatttcagactatcacatggggagaaaccttggacaatacctgggtttcctaggcagaggtccctgtggccttccgcagtgtttgtgtccccggatacttgagattagggagtggtgatgactcttaaaacgagcatgctgccttcaagcatttgttttaacaaagcatatcttgcacagcccttaatccatttaaccctgagttgacacagcacatgtttcagggagcacagggttggggataaggttacagattaacagcatctcaaggcagaagaatttttcttagtacagaacaaaatggagtctcctctgtctacttctttctacacagagacagtaacaatctgatctctcttttccccacagtggtagaatgggaaagatagtaggaacagaagctaccaaataagaaaatgggtatctctcttcataaattgaagcccctggattacagtgtgttgtgagggtgagggtaatggaaaagcttgggaaggagaatataaaggctttttattcaaagtatacatactcctctcttctgtcctgctcatttagaatcagtcactcccaaagatctaacttactgaatgtaggatgatctcacagatgtattagggcaaaacaaaatggttgggaatcacctctagagataaagcatgccattttttaaataactttattgagagaagaggttaatccatatagttcatatttttatttatttatttattttttgcaagatggagtcttgctctgttgcccaggctggagtgcagtggcgcagtcttggctcactgcaacctccgcctcccctgagccattgcgcccagcccagactagctttctaaggcctatttcagctctgatcttgtgatttaaaggaaatgaagttattagagtctggattagtggtgtatgtttgggaagacccaaaggtgctagcttggctagcaccaagtaatctttttacagggattagagtctgattatatagggatcagtgagcactgataaccaagaggtaccctttgcagaaggatgtgtgggcagttagcctggacagatgacacatggctcagctgacacctgctgagactgcccccttgtgggagatgaggttcagcattaagaaggaggcagcagtggcaaagtaggccctttaactggactttcctaggaacctacatataggttagtctcctgaacccaggctttcataactcagaagcttgcttcttcagactctgttggtctctgctgcttcccatcccactggaacatgtacagcctcttaaataggtaccatttaagagccaatgaatgccaaacactttttttttttgagacagagtcttgttttgtcgcccagactggagtgcagtggtgtgatctcagctcactgcagcctccacctcctgggttcaagtgattctcttgcctcagcctcctgagtagctaggactacaggggtccaccaccacgccccactatttttgtatagtcccagctactcgggaggctgaggcaggagaatggcatgaaccccggaggtggagcttgcagtgagctgagatcgcgccactgcactccagcctgggcgacaatgtgagactgtctcaaaaattagccaggtgtggtggtgggcgcctgtaatcctagctatttgggaggctgatgcaggagaatcgcttgaacccgggagaccgaggttgcagtgagacggaggtggagattgcgccaccgtactccagcctgggcaacagagggagactccatctcaaaaaaaaaaaaaaaaaaaaaaaaaaagaaaaataagagattagtccccttgcctcattttcttcaggctagcctgaggcacattcttaggcattgtcaggaaaaggttgaaggctgtgctttctgtataaatctatgaaaaatttcaaactctgccttttgcttaccaaggggtagatggcagttacttaatgaaacaagcgggggcttctgttaagttcttgatcctttataaggttcaggctatccagtttggtagagttagaagaatgctgagaaggcagactgagtttgctgtcttcagagctctgaagggctgtcagaaacagtttagtgttaagggtttacatagtcctatgtgtgtcgtttatttagcttttttttccccttaaggattagagagtgttggcaaattatttaaactttgcctttttttgtggaaaatttaaatttcaagtgctacatgaataaattaggcatgatagtatcttaaggctgtggtgatgattatatgtttgtaaaatggttagctcatactaaaagggtgaatgatctaagactgattgcaggggtaggtttcctggtatctgagtgttcaggtgcagaactggttttgtccataggagaatggtggtgcataccattgagaaggttattaattagtggtgcctttctcttgcagtgtgcccagctggctggaaacctggcagtgataccatcaagcctgatgtccaaaagagcaaagaatatttctccaagcagaagtgagcgctgggctgttttagtgccaggctgcggtgggcagccatgagaacaaaacctcttctgtattttttttttccattagtaaaacacaagacttcagattcagccgaattgtggtgtcttacaaggcaggcctttcctacagggggtggagagaccagcctttcttcctttggtaggaatggcctgagttggcgttgtgggcaggctactggtttgtatgatgtattagtagagcaacccattaatcttttgtagtttgtattaaacttgaactgagaccttgatgagtctttattttaggaagcatattattagcttttgattttaagaggaatttactccttgctttccctgttttggggaaaatgaggagagctgcctccaaatcagggaattatattgacacaggtagatatagggaatggaactgaatgaacccaaggtgttacattttgtttcactacacatgagggagaagaataagccctgctatagtgttggccagagcactgcgactgacgccacaggctgggttaccagttaaagtctcagtgtgactacttggacacctatttttgtttagacacactattcaaagggctgcatgggaaccagaagcttggcctcttctgataaatgcctggtacctgctatgtaaaagagctggaggtttctgttctttttgaactgacagaggaaagaggaagacaaggctggtggccttgggtagggctttcagtagttgcacagtactgggcaattcttagccttcccttggttctagccttgattagagatagtcttttttagtgtcattatgttgcccagagtggttctgaattccttgcctcaggtggtcctccgcctcagcctcccaaaatggtgggattacaggtgagcgccacagtgcctggccaaagctcgttttgatcctcattcatatgtcattgtcctcagagaggctgtcagctgggaaaagttattctcctgggcccttgaggccaaggtagattcagaactgaggatacttctgtgtatcatgtgataccattccagccacttgtcttcctcagctactcccacctgcccacccctctagaaccgactacacccatgagcagcagtacagaattcccagggcctttcgtaatggccaacatactgcttactatatatgccaggtatttttccaaagtgccttacacgtgtttattcagtccctacctgaggtaggtacttttttttttttttttgagacagtctcacactgtcacccaggctagagtgcagccatgcaatctcggctcactgcaatctctgcctccctggttcaaatgattctactgcctcagcctcctgagtagctgggactacaggcctgcgctaccatgcccggctaactttgcatttttagtagagacggggtttcactgtattggccaggctggtctcaaactcgacctcatgatccacctgcctcggcctcccagagtgctgggattacaggcgggagccaccacaccctgctggtaggtactctttagaggatatttgccccttaggccctgtaacaacatcttggggaactgcttagaaatgggaacagatagagtcttggctgggtgcggtggctcattcctgtaatcccaggactttgggaggccaagatgggtggatcacgaggtcaggagttaaagaccagcctggccaatatgatgaaaccccatctctactaaaaatacaaaaaattagccaggtgtagtggcaggcacctgtcatcccagctactcaggaggctgaggcagataattgcttgaacccaggaggcagaggttgcagtgagtagagactgtgccactgcactccagcctaggtgacagagtaagactctgtctaaaaaaaaaaaaaaaactcatttgaaggcagatgggaattctggttccctggcctttatcttggccaaacctaacttccttgagccttgttatcttcatggaagatctctactatattatcaaaaatagtaatcttgtactcaaaaccttttgctttgccaaagccaattaagtcctagcaagtaccaccataaatcagggtccacatgggagaaaatcaagggccaggggatgcaggtggtgagaccctggggctgagccagctccgggctctgctgggattcccaggcttcttgggggcgggtgtggtaaagggaaggtccggggagggagaactaggcttctctgagggctgagccaagcccaatagggccaatcgttgggcaggtggagtggagaagtaggccttctgctcttctgagtagcgctcctggggtgtcacagcatcccggtaagtccaatcacgccagtggaaattgaagccttcgagtagggcgatacggtcagctcttgtaggtacacagtcatgaggttttctgggtggcagatctggcacctctatccctggcagcagcactacccctcggatggcaaaccagcccccaaatcgggggtgtatgcacacacctgatatgcgctggggagagggtgaagaaaagcaaggtcatggaggtccccttggcaccaagtcaactgccatcattgcaagctaggcctgttcacttcccactcagtgtacactgactacataaacctctgtccttttcttggcaaaccctttcataaactattctgagcacagggaagggctgggcttcctagtctcaccactagtcttaacactgctgtgccccctgtatcctaagacagttctgcagactaagttttctgatctcacgagtacccagttagacaaccgcatgtgacaggactgcctcccatccagaacaaagctaatttgttctgggttgtgtcacatccatccagggaaggctgaggaatgtgggacctggtagggagaggcctttaccagtctatctcagcctctatttacattttccctctcacctggttcccccatgggtcagcctccacatcttgtcgttggtagtagtaagcagccccagctacatgggctgctgtctgggccaggatcttggggcgtcggttggggtgyacctcgtagtcagcaatgatttctatctgcagctctgggaggctctggaacagtggacaaaatagagggtactgtcagcatgaggggagttatgaccttgtccgagggagccctagtttgttttgtgtgtgtgaacatggtcctgtcctcagaagggaaaacatgaccttaacttgggaggctccagtgtggacatagttatagttatttccagaagggcacatgtttgaagggaaatacataacacctggtgtgaaggaaggcatggtcagctttggggagatccagtgggtatgtacatagttatgtgtatatgtgagtgtgtgttgggagaatattgttctgtcctcaaaaggacagcataaagcttgcaggtctaggacaaagcaatgcctggggaatgttggactcattcctattccacttggaggccaaggaaaacctggtctgaggttcatatagttgcccatcagtgtagggtgagtgagactaatttcacactgggggactgctagatgagggtggtggaacctgggtgtgtgagaaggcagaatgaggaaagatcacagaatgtcaagcctggctttagggtatcatttcacctttgaagtggctcctagccctaggtctagatcctgcattgagtgtggaggaactggaggcagctgtaggtttgggagctgggggaaaactgagccttcctcacctctctaacacggcccagatggtaggccacacactggtccactgggtcagtcagcattcggaggtggcagctctgcaagaagggcttgagggcccggtcaaacatggcaggcgtgctgagtaccaggaaggccagggtaggtcctggcagcggtaggtggaaggctggaggcaagagttcattgtaccatgccacctgaaacagaaagttcaggccaggctggagagggccagtctaggcctcagcctggcccacaccttaaccttcaggcctcacacttttgccccagcctccatctcactcattcagtgaattttcactgacgctatgtgatgcatttttataagcaactcaactgaatttgacagggaattcattattttttgagacagagtcttgctctgtcacccaggctggagtgcagtggcatgatcttggcccactgcaactttggcctcccagattcaagtgattctcatgcctcagcctcccgagcagctgggattacgatgtgcactaccacgcctggctagtttttgtatttttagtagagacagggtttcgccatgttggccaggctggtctccgaactcctggcctcagctaggacccacctgcctcggccttccaaagtgctgggattatataggcgtgagccaccgagcctggcccagggaattattttatttattgaaggactgactgacagcaaataatttcaggcctcatccaactacaaatgaaccaatgaaaatgaaaaaccccgccaggtgtggtgactcacagctataatcccagcactttgggaggccgaggcaggtggatcacctaaggtctggagtttgagaccagcctggccaacatggtgaaaccctgcctgtactagaaatacaaaaattagacaagcatggtggcactcgcctgtaatcgcagctactcaggaggctgaggcaggagaatcgcttgaacccggtaggcagaggttgcaatgagacaagatcgtgccactgcactccagcctgggcaacagagtgagacccccgcctcaaaaaataataataataataaaagaaaattaaaaacccaggaacgaggacccacagagcagagttcctaaatccacaactgactgaggtgcatgagggcataggaacagtcaaagtggctgtcaacgcacttgccctccaagtccaacaccttgaaggcattttaagacaaaaacaagatcggagatttctcaaagcagaatcaacatatgatgccatgacagttgttcagaaaaatattgttaatctggagaagcatgttgctgcagccaagcctgagagggagaaagccacctgaaccctcaatgccgttcatgccacagtccaactcatcctcaaatgacacaaaacgatgtggttccaccagtctcttcccaaccagcacttctttatccttttgatatgtcatcaggggaarctatcagtggcagcaagctatgtcttcactgaagatcaaggggttataatagattaaaattttactatatccagagcatctccatacagacagatcaaaagacgagatcatagttccaggctatataaccctaactctagagatgaatttggagagaacaggcagttttgttttttttttttttgagacggagtctcactctgttgcccaggttagagtgcagtggcgtgatctaggctcaccgcaacctccgcctcccgggttcaagtgattcccctgcctcagcctcctgagtagctgggactacaggcacgtgccaccacgcccggctaatttttgtatttttagtagagatgaggtttcaccatgttggccagggtggtctcgatctcctgacctcgtgatccacctgacttggcctcccaaagtgctgagattacaggcgtgagccaccgggcccagcccaggcagtttcttaaaatactgtttttaggctcggcgcggtggctcatgcctgcaatcccagcactttgggaggctgaggtaggaggactgcttggggccaagagttttagaccagcctgggtaacagagtgagaacctgtctttgtttttttattttattttattttattttttgagacggattctcactctgtcgccaggctggagtgcaatggcgcagcctcggcttattgcaatctccacctcccgggttcaagtgattttcctgtctcagcctcccaagttgctgggactacaggcgtgcatcactacgcccagctaatttttgtattttttagtagagacggagtttcaccatgttggccaggatggtctcgatctcttgacctcatgatccacctgcatcggcctcccaaagtgttgggattacaggcgtgagtcaccgcgccaggcgagaacctgtctttaaaaacaaaacggccctttttttttttttttttttwaatgtatacagtctcactgtcgcccaggggctagggtacagtggcatgatgttggctcactgcaacctctgcctcctgggtccaagtgattcttgtgcctcagtcccccaagtagcagggattaacaggcgtgtgctaccaggcctagctaattttttgtatttttagtagagatggggttttgccatgttggccaggctggtctcgaacacctggcctcaactgatctgcccaccttggcctcccaaagtgctaggattacaggcgtgagcttccgtgccaggccaaaaaaaccatttttatcagttaatgatgaactgatgctaccaaagaggctagaaacgtacttaacctctgacttgagcccatcaggggtttttctgcttcttttttttgagatagtcttgctttgtcacctaggctagagtgcagtgaggtgatcacagctcactgcagcctcaacctccctccctcaagcaatcatccctcctcagcttcccgagtggctgggaccacaggtgtgagccaccacacctggctggctaattaaaacaaaaaaataatttgttgtagagacagggtctccctatgttgcccaggatgggattttcctgcttttgacagactttcttgttaccacggtcaacaccatattagtctacaaacccctaacaggaatcttgtgtttggtttcttttttttgagatggaattttgctcttgttccccaggctggagtttgtggcgcgatcttggctcactgcaacctctgcctcctgggttcaagtgattctcctgcctcagcctcccgaggagctgggattacaggtgcctgccagcaaacctggctcattttctgtatttttagttgagatggggtttcatcatgttggcgaggctggtcttgaactcctgacctcagatgatccacccgcctccgcctccctaaagtgctgggattacaggcttgagtctccgtgcccggccagcaagcctgtgtttttgaggttgaccaatcagcaaagcaaatatgtgattaatgcaaactttattttcagttttaggacacacaatatttgcttttgtccacttggcctggacatccaagaaattggattcacctgtaacaccgtctacacccacattcacacactgaacatggagaagagatgtcacaagaagcccaaaccgaagacccataacataacctgcaatgaacttgctaaatcacgtagttgtggaggtttctgctgttcacacaaagtgctatgtatataccggcatcacttactggggatttctgactcatagtgcagaacacttgacacaggtctacacaggctacctggggttgtgcattaatgggacagagtgggatgaccattacttgtttgattgtagctggttttactgctgtaacagataagtgaagtctgtgtcggtgctcaactaataatgtgactgttgtggttaggtctgttccccctcatgtctattataggttcatgtattatatggcagggaacttagaatagagaggcagaaatctcagctactcaggaggctgaggcgggagaatcgcttgaacctgggagccagaggttgcagtgagccaagatggtgccattgcactccagccggggcaacagagtgagactccatctcaaaaaaaaaaaaaaaaaaaaaagcagagagttagagagttattattatttttgagatggagtttcgctcttcttcttgcccaggctagagtgcaatggcgcgatctcgactcaccacaacctccacctcctgggctcaagcgattctcctgcttcagcctcccgagtagccgggattacaggtgcacaccaccacgcccacctaattttgtatttttagtagagacgggatttcaccatgttagccaggctggtcttgaacccctgacctccagtaatttacccaccttggcctcccaaagtgctgggatataggtgagaaccaccacgcctggctgcagaaagttctaataggcagaaccactaagaacaatagaaatgactgtactatagctagtgcaatgacagggtcagataagggtcctctgaaattagaaaaggcttccttgtggccgggcatggtggctcatgcctgtaattccagcactttgggaggccaacgcaggcagatcacctgaggtcgggagttcaagaccagcctgaccaacatggagaaactgtctctactaaaaaaaatacaaaattagccgggtatgttggcacatgcctgtaatcctacctactctggaggctgaggcaggagaatcacttgaacccgggaggcagaggttgtggtgagctgagatcgcaccattgcactccagcctgggcaacaagagcgaaactccatctcaaaaaaaaaaaaaaagaaaagaaaaggcttccttggatgctaagtcttgaaggctagaaagtcaactggtcaactgtcaggttgatgtagggaggagaatctggtgtgcatttatttattatttatatttcaccaaaaaacacataaactcactggtgtgtattttaaaaagaggtcacagactgagtgcggtgactcatgcctgtaatcccagtgctttgggtggctggccgaagcaggaggatcacttgaggccaggagttcaagaccagccagggcaacaaagtgagaccctgagtgttggtgcatgcctggagtcagctacttgggagactaaagtgggaggatcacttgagcccaggagtttgaggctgcagtgagctatgattgcaccactgcactccggccgggaggacagagtgagactttgtctctaaataaataaagaataaaataaacaagtcacagcataagcaaacacactggcagaaaattcctgggtatatttgagaattgtctagtttggtggaagtgaagggtctgtagagggaatcagagggagagaaggctggagagatcaataggagtgagattttgattggctttgaataccaatttaaggaatatggatttaatttggtgacagtgaagagccactgaagatttaaggagtaaactagcatgatcatttttagatcacactggctgcagtgtggaggagggactggaggtaaaattacagcaaggaggttattacagtaatccaagtgagaaatggtggcctggaccacagcatagatgggtggaatacaagggaatggatttgggagattcagtagacagtcttataggtcttggtggctgattggatgtgggggtagggaggtgagaggtaggagcctagggtgactggcagggctgcagttggctttgttcagtacaaaagctcctaatacccaggtctactcaacttgccagataggcattctcactctcccacacacctgccatccactgaaacggtgtctcaaagagttaaaggtcgatctgcaacaaatagcttttgttttctcaaaaacccagtgtcataatattagcttccagcacatcaggcatcaagcccttttacttggtaacaccacaccactatctccacacctttactcaagctttttctgatatttgggatgtacataaccctccttccttccaatctatcttttcatatatagctcaattccattttttctggcaagaccagtctcaagctagacccaacctacttctccctctatatcctctcccaggactgctgtgagccactcagcagaaggaatgggaagtgggtagtctcttaagcatcaggcaaagggctcaagctgagctgatttagctttgtaacttaactgctcagtgcacagggcactgatgtggggaaatgtaaccgtgtaaatgggggtcggggtgcggtgctgagactgctgtgccaggcaagtgtacaaagtttcattacccagcccagcactgatgactggaaatatcatgaattatccttctgttggtagagggaacaaaccagccaattgtttgcctgttcatcaccaggaatgcccttccttcctcagctgacctaaatgatagctatgcaaaccttctaggctttgccctctcctaaatcctttaggaagttccaaggtgactttgcctcacaggtccctttcttcttgtaaattatataggtgacaatctgagccacacacgctacaggtcatatggtgtctcccgttaacgaatccggcattatatggtggtaaaaggttaaacatgcgacaacttttttttttttttttttttttgacacggagtttcgctctttgttgctcaggctggactgcaatggcgcaatctcggctcactgcaacctccgtctcatgggttcaagcaattgtcctgcctcagcctcccgagtagctgggattacaggcatgcaccaccacgcccggctaattttatatttttagtagagatggggtttcaccatgttggccaggctggtctcgaactcctcacctcaggtgatccgcccgcctcggcctcccaaagtgctgggattacaggcgtgagccaccatgcccggcctcgaccactacctttttaacccaagcccccactgaaactctgtccctgttgtcacatggacactgggctgcaggaacccaggaggatcagaggctcccgaggcctcacgccagttgcaacgaagccaatcatatatttcgccctagaacagcaggagggataaactaacctggaaggggtaaacctcgaagccaaaaggacatagcgtgtcctcgatcttctgcttcagctctgcgactttcggctccatagcgcacgttacacgctgagcttgctggggaatgaagtctcaaggacaattgggccgttacgttttgagtcagcttcgactccatttcccaggtaggaaatgggtccagtagcgggaccatattgcctatgcgcgatgcatcttgggatgcgtagttcgtttcctccttggagacagccacacgaaatcaggaagactcagtttcccggcaagctacacggtgggggtgtgcatgtacgtgtctcttctagagaaaggtagttccaccgcctccatcgccggttgtgttcgcaagaggcgacctcagtttcccaggtggcgctgcggcagccagtccaaagtcggactttcaaaaccaacccgaagttttgaacccggcggcggcagttgtcactggcacaggtttggcgtggtggcgccagtgtactacttctggggaggtctcaaccaggttctggcaccttcaatccccacctgatatctgcgtatcatcacggtatcccgcttttcccccagttccccaagagcgtccttcctttccctagtcacaggatcgcagttttggtctgatagtgcatccacctaccccagtgttgcatccccacttccctctttccatctaacgtggtggcctttcctggggataccttgggtatcccccgctaggagagcaagcacaagacaccagggagccagacccctgccgctcccctgccacaggatatgaatacgagcctcagctggtttgagcagctggatgtgcttctcaacgctactgatggaaatgtggtccggaataaggtgaggggttggtggaggtccccagtttgcgtggggaggctaagggactctcagagttcattggcctgtgcatctgtttcttttgtagcagtggctgtatcctcttggggtctccacagagctcattggcctgtgcatctgtttcttctgtagcagtggctgtatcttcttggggtctccaccgcaggtaagtaatgtctctttctacttccaagccctttctctttctgtgccttcctccagtgcccgtatcatccattattccttccaaattccaactctgtcctttcctgaactctgtttccccacacagaccctgcacttaacccttccttatttcctcagccggggacctggctgggacctggatttcctctcatcacttgcctctgcagtcaggagtccaagctcaacagccttgggctttagagactcccatagttccacaaaggctgagctgccctgagtcctagagcccatcctctctctggggtgaggttgctattctctgatcctaatttcaatgtcaggctcaggtgaggcttggaatccttggtgtgtatatgtgatgtttgtgtaagatgaggatactaggggtcgggaaaagctgttatacagtagttcatgtgcttttttctgcctggggaggtgacaggcactaaggcaggcagtgcagggcctgctagaagagcgagagcagcagaagtaccagatcagtgtcctggaaggtatctggccagttattttcttcatatacacagcttcatatgtatgcacacaattttgccacacacctgttgtgtgtgcacatgtgtcttgttttgcaagtagagtatctagggtcttgtgaaactcttagagaggatgatccctaacttgtcccactacagcatcactaaggttgctgcagggggccccaaaggggagtgcttttctcctggagcaatgcctggaggagctgagaaaggaactgcagggccttcagagccaggtgtgggagcaaacccaagcccaagcccaagcccagatgcaaacaggaccaggagaatgcagtactaccaatggccttcctcaggagctgcagactgagtaagggatagtcaagaccttgccttctttttttttttttttttttttgggtttgtttttcttttattgatcattcttgggtgtttctcacagagggggatttggcagggtcataggacaatagtggagggaaggtcagcagataaacaagtgaacaaaggtctctggttttcctaggcagaggaccctgcggccttcggcagtgtttgtgtccctgggtacttgagattagggagtggtgatgactcttaatgagcatactgccttcaagcatctgtttaacaaagcacatcttgcaccgcccttaatccatttaactctgagtggacacagcacatgtttcagagagcacagggttgggggtaaggtcacagatcaacaggatcccaaggcagaagaatttttcttagtacagaacaaaatgaaaagtctcccatgtctacttctttctacacagacacggcaaccatccgatttctcaatcttttccccacctttcccccctttctattccacaaagccgccattgtcatcctggcccgttctcaatgagctgttgggcacacctcccagacggggtggtggccgggcagaggggctcctcacttcccagtaggggtggccgggcagaggcacccctcacctcccggatggggtggctggccgggcggggggctgaccccccccacctccctcccagacggggaggctggcctggcggggggctgacccccccacttccctcccggactgggcggctggccgggcggggggctgacccccccacctccctcccggacggggcggctggccgggcagaggggctcctcacttcccagtaggggcggccgggcagaggcgcccctcacctcccggacggggcggctggccgggcggggggctgacccccccacctccctcccggacggggcggctggctgggcagaggggctcctcacttcccagtaggggcggccgggcagaggcgcccctcacctcccggatggggcggctggccgggcggggggctgacacccccacctccctccctgacggggcggctggcctggcggggggctgaccccctccacctccctcccggacggggtggctgccgggcggagacgctcctcacttcccagacgtggtggctgccgggcggagaggctcctcacttctcatacggggcggctgccgggcggagggtctcctcacttctcagacggggcggccgggcagagacgctcctcacctcccagacggggtggtggccgggcagaggcgctcgtcacttcccagatgggatggcggccgggcagagacgctcctcactttccagactgggcagccaggcagaggggctccccacatcccagacgatgggcggccgggcagagacgctcctcacttcctagatgtgatggcggccgggaagaggcgctcctcacttcccagatgggatggcggccgggcagagatgctcctcactttccagactgggcagccaggcagaggggctcctcacatcccagacgatgggcggccaggcagagacgctcctcacttcccagacggggtggcggccgggcagaggctgcagtctcggcactttgggaggccaaggcaggcggctgggaggtggaggttgtagcgagccgagatcacgccactgcactccagcctgggcgccattgagcactgagtgcggccttgccttcttgaggcctttgaacttttggcatttgtagtgggacaagttggggatcatcctctctaagagtttcacaagaccctagatactctacttgccttcttactctggatttgttgattgactttagaatagcactgctgtcactcctgcagtgctgtgggaggagtcagagattatgcagaaggaattgaagttgctgcagtaccagttgagtaagtaaaaggtggttgggggcgaatatgcgtttccttgtccccttttctggaaagtcatcttcttcttttatttatttttatttatttttattctttttgagatggagtcttgctctgttgcccagcctcgctctgttgcctgttgccaaggctgtgttgcaatggcgcaatcttggctcactgcaacctctgcctcccgagtccaagcgattctcctgcctcagcctcctgagtagctgggattacaggtgcccgccaccatgcccagccactttttttcatatttttagtatttttagtagaaatggggtttcaccatgttggccgagctggtctcgaactcctgacctcagatgatccgcctgccttggcctcccaaagtgctgggattacaggtgtgagccactgcgcctggcctggaaagtcttcttgctctcccattaagtggccatggctccaactgcctgagctactgagaagtgtggccaagtattttgttgcactctttgtctctcatggtgtgagtttaatctcttcagtcagcttggaagcgtcccaatggctgagccagaatgtttctgtctcagtttttggcagcaggctggtcacaggcagggagggagaaggaaagaagttggggaacagcccccttacattctctctcatctgcaggccagcaccaggagctgctgctgaaacagctggctgagggacgacaggctcaggttggcagttggaaggtaggactaggttcagacttgtctctgcatatttctctatggaggacctttcctttctctgtctatcctgttctgcagggaggccaggataccctctcctgcccctgtcttcattcctctcttccctgtgctgactctctctctctccagagctcttctttctaacctttctgctcccggccatgagaaactatccttgccgacatgagggttccaagtgtgctgaagaggacagtcatggggagggagagagggagaggtttggttccacccgagcccatgatctggcagatgttagagcagttgcaaagtggccaggaaggcaagggtcataccctggaggctaccaggacagaggaccaagatgcctggagggagcacaacctccttaggtcagggggtatgggtgctgtgccattggagggaaattgtctcacaggtcgggcactggggaccaaagttcagctatcctagatttgacttgggcttttggggtagtatgagtatctgggttgtatcccataaaggcattctttacctgatagagagtcagtgaggtacctttgtatgtttggatgttacagagggaggagagattggcagggcgcggtggctcacgcctataatcccagcactttgggaggccgaggtgggcggatcacctgaggtcaggagttcaagaccagcctggctaacatggtgaaaccccatctctacaaaaattagccgggcatgatggcgggtgcctgtaatcccagctactcgagaggctgaggtgggagaatcacttgaacccaggaggtggaggttgcagtaaactgagatcatgccgttgcactccagcttgggtgacagagtgagactccatctcaaaaaaaaaaaaaaaagagggaggagaccagagtcctagcctgaggaaggaggacagttctgtgttggaagggcccccttgatacatcattatcttctctgtttctggttctgttcccctttccaggatctccattcatgttgtccaatctaagctgcctctgcccactaccttcaccatgtctgtttcttcatccagctcttaattcagtcttctggacagtaacagtagctgggaacttttatggaagccaggtaaggataaggacaaggattcccgttttgggggaggctaaatctgaatggtgcctgaatgccagctgcctaattatttaacactaggtagaatggagtctctgcctttctgtgaactcactgacctctgttgctgtttatcctgtcagtcctctatgtccctctctattagaaaggcctagggcctagttctatgcatatcacaatgcttgctgatgacttgttttctcttcccttttctttcctcttagatccccagaggagcaccctttctaacctggagcccagcatctttcagctccatgcccagagtcttaagcaagaggacctat

SEQ ID NO: 96551 - DNA, 151850 bp, Homo sapiens
gtcctgtcacttcccttgccaacggttggggtttttatggaacagcacttgcattttagcctttggtttttaaagcaccaactcactcctctgactcatacttcctaggtgcaccttctgtggaatgcaaagatcaatatgtcctgtgactgctgaggaggggctcgcagtccagtggggcaggagacccagggagcaactgtgacccgactgtgacagagaagctggtgtgaggcagacagggagcaagaggatgtgcagagctaactctgtgaggggatcagggagggcttcttggaggtggtggcaggagctgaggcacacaggatgaggaatcacttatccggagcagcaggagaagagctggctttatctgggtggaaaaataaaaactttggtttaaatacagatgtaattttgaggcccaaaacaactagaataacagaaagacaaccagttctcaggataatgggcaaaaaaagggcttcagcttcccacattcaacatcatttttattagagttattttaacttatctttaccgctaatggcccgcagccacccactttcgaggcagcttcccggcaacaccagctctctgatctaattttacccacaagaaatttgagtttggaagaacatgtgcagaagcttcatttggtagaaggaggctagagggaaccggcaccctgggcccctggagagcacacacagcagaggggcagatgtcggggaggatttgacagttgcaaaactgcctatggaaggccaagcatctgagggacagcctctagactaccacccatgctgtggttccccagctctggggaggatgacatgagtctttggaatgtgtattttatttttgtcctgcctgggtttatagccctaaaatgaggtctctgccttcagagcagaaaggaccagatagtctgattgaccaggggaggagccctagctactttcccctgggatgccactctgtaagtcatgcaagggcacctccaaggaagcctctctgggtgtcccttgtgataagccccatgtgtcaatgtgtctgtgcagagggaagtgttcacagctataccaagggtgcacaggggaaggcaccgcaaggtttctttatgactcaggcctacagagtgggtgggagaggagagagtacagattccaatatgaatcagccatccctcctagcctggcaggccgccagcctttgcaactcccttctgatgccagactatctcccagcctgtgctccactgatgcctggaggactgctcctcagtcatccactgtcaacacaaattgatctataggttcagtgcaatctcagtcaaaatctcagcaaaatcagaatctcctgctctgcaaaagacagtaagcgaatgagaaggcaaatcacagattgtgagaaactatttgcaaaaaacatgtctgataaaggacagctatccaaactaaatggagaactcttaaacttcaacaatacaaaaacaagcaacccaactgaaaaataggcaaaagatctgaatagacacctcaccaaagaaaatacacaggtggtgatacactttggatgtgtttctacccaaatctcatgttgaaatgtaatccccaacgttggatgtagggcctggtgggaggtgatgggatcctgggggtgaatttctcatgatggtttagcagcatcctcttggtactgtcctcgccacagtgagtgagttctcaggagctctggttgtttaaaagtgtgtagcaccttcccctttttctctcttgctcctgctctagccgtgggatgtgcctgtgccccctttgccttccaccatgattctaagtttcctgaggcctccccagaacaaactgtttcttaacatataattcagcaatcatgtgccttgatatttacccaaatgagttgaaaactatatgcatacaaaaacatatacatagatgtttattgcagctttattcgtaattgccaaaaattggaagcaaccaagatgtccttcaataggtgaatggataaacatttttatatagtatcttgatgccatttaggctatgatttcattttgagaccaatcattcagagctgttgcttttttaattttcccaaattttattgagagaagccaagcagatgccaacatcatgcttcctgtacagcctgtacaaccatgagccaatttaacctcttttctttataaattacccagtctcaggtatttctttacaacaatgtgagactggactaatacagatggcaagtaagcacatgtaaagatgctcgacatcacatgtcatcaggaaaatgcaaattaaaagaacaatgaggtacctctacacacctattagaatggccaaaatgcagaacactgatgatagcaagttctggtaaggatgaggagcaacaggaactctccttcattactggtgggaatgcaaaatggtacagctactttgaaagacagtttgacagttttgtacaaaactaaacgtactctttcttaccgtatgattcagcaatcgtgcgccttgatgttttcccaaatgagttaaaaacttatatccatacaaaaatataccatagatgtttattgcagctttatccctaattgccaaaacttggaagcaaacaagatgtctttcaatgggtgaatggataaatgtttctctatagtatcatggtgccagttaagttttggtatcattttgagaccagtcattcagagttgtgtgttttttgtttgtttgtttgtttgttttgttttagatggagtcttgctctgtcaccaggctgcagtgcagtggcatgatctcagctcactgcagcctccacctcccaggttcaagtgattctcctgcctcagcctcccaagtagctgggactacaggtgcgtgccaccatgcccgattaattttttgtattttagtagacatggggtttcactatgttggccaggatggtctcgatctcctgacctcgtgatccacctgcctcaggctcccaaagtgctgggattacaggcgtgagccagagttgattttttaaattaatttttccaaattatattaagactataaacttttggatcgaaaaagttcaatgaacccctaacagaataaacataaagttcaaaagcacacaaaaccaatcactatattatttaggaatagatacatatatagtaaaaacaacaaatagccaaggcaagattaacaaatttcaggatagagagtgcctctggggagaagacgggacactcgaaggctttaactatattagtaaattctttttctcaactgatctaaggagtaaataagtatttttattactattctttaaattgaatatataggaaatatttttgcaggatcatagatatcacaataaatagaaaatgaattaatgattcatccattcttcttctgtgttacttataataacaaaagccagaaacctgggggtcacccttgaccacaccctcaccaaccaaatccagtgaattatcatcactttccacttctccctacttccagtatcacacctggctcaagccaccttgactctcgcctgaaacattgatatatctttctctcccttacactcttgctctaatccaatctccatacagcagccaaacacattaaaccttatcagtctatctcatcatcccctttgctatcagaagcaatggagtgacatgtaaattgcccaaggccacacagccagcaaatggcagaggcaggattcaaaatctactagtgttactggagagttcacatgtcttattcacccactatcctaccttgggtgatactgggaaaggctcagccactgcttagcatggggtaacgtctggataaaggacaatttatttttcctccaatcatcacttcacctcctttatattcctgactcctaattttccttaactctgacttgaaaccatactttccaagtaatggcttcctaacctccttgcccgactacagcaagtccctgctatttgtccttccagcactttgtctatttctagtaacatccctcctccactagattgtgacttccacgaaggcaggagtctgctttgtcccccattgcagtgcacatcatacacccttactcactctggttctctccatgtccatttctcagtgaaagtgataggtcaccaacaagacctctcgccttgcatttcaacgtcatgcaagctgatctggggaccctacctgcagggctgtgtgtgagccctggtgggatggggaactgagaccagccctggcacatggaacctaagatggcctgttccatgcaagagacctggtgcctgagtgggaatgaaagagagtttaggtacccaagatttcaatctctggggccagcgaatgaatcataaatgagccccttctgcccagtaaaaaaaatcgtatctagtccacttactcagcttgggtggggagcacctggatattcaccccaggcatgttggggccacaagtgatacagatcaaggtaaccaagcagggatggagttggggtaggggtgggagggcaggggcaggcacagccaagattgtgggacttccccagaggcccagagaagcttgagccggcagaggtctgtctcctctccttggcagcatttagaatttttgtccacaatctttctgctctgcaacagaggcagggtgccttcatgcatctctgaatacttagtgtccagcacagggcatgaccaagggtatacgtccaagaaatgggaggtgcagcccacccccatgagtccttcaggtctgactcaggaacctccttgagaagtctttcttccctgacattctctagctgtatccatgctcctcaccgtgggaccccgcagccttggtgctcttggtattgtcattatccggacaccagccagaagctgttggttttgtttgtttgtttgttttaaggaatggaatattttaagtgtagatattttgagctttttatgagccaaaagctttttacagctttgcaaactagaaattaaaaagccactgaagcatcctacatgttataatttctaagaaggtgaatatttgttcactacaacccacataaacaaaaagctctttgaattctccctctttttgttttttaagagtaaagcattcttgagaccaaaaagtgagaaaaccactgtgaattatccttagctgtgataggtctatttcttgctatgacctcgtaaggaaccagttacagacttccaagtactgtaccatgtaagtccctggctgggcctaaatttttggccttcctagctcaggaaggtagcttttggtgacctgaaggattttcaccaaagttagctttttaaatttcttggctctgtatctatttttcttgttattttctcttttttcccctcctctattctttttttatttttctctttattctttcttttttcattttcctttattcttttccttttcttttttctttttctttattctctctctctctctcgacagaatcttgctctgtcacccaggctggagtgcagtggcaccatcatggctcactacagcctcaacctcctgggctcaaagggatcctcctgcctcagcctcccaagtagctgaggctacaggcatgcaccaccacacctggctatttttttttttgcagagacaggatctcactatgttgcccaggctggtcttgaattcctagactcaagtaatccttctgcttcaggctcccaaagtactgggattacaggtataagccaccattcctggcctcatttttaatttttttttctttttcttaattcctttttgtttttctcattgttttctttttcatttctttccacattcttctttatttaatcagtattattagttaatattggtaattagtattgttagcagtaagtccaaaagactggtaggccctttatagcatctctgccaaggaggagactcatattggcagctacatgctcctcaagaccattgccaagggaacctttgccaaggtgaagttggcctggtacatcccgactggcacacaggtggctgcaaaggtcatttacaagtgtggaactccagcctccagagactatctcatgaagacatcatgaaggtattgtatcattccaacattgtgaaattatttgagttgatcgagaccaaggaagcactttacctagtcgtggagcaggctagtgagagagaggtatttgagtacctagtggctcatggcagcctgaagaagaagaaaacctgaagcaatttccaccagatagtgtgggctgtgctatgtgatagtattgctgccagaagtgtagtattgcccatagggacctgaaggcagaatagttgcttttggatgctgacgtgaacatcgagactgcaggcttgggcttctttggcaacaagctgggtaccttctgtggtagtgcccctcatgccayccagaactcttccagggccaaagtaaggtggccccagggtagaggtgtacagcctggaggcttcctgtatatctagtgatcacatcccagcsctttgatggacagaaccctaaggagctgcgggagtagtgagagctgagaggaacatttggtatttgtttctacctgtccatggagtgcgaaaacctgttcaagtgaatcctcatgctcaatccagcaagagaggccctcctatggggagaaactaaagctttgcgtygagtcattctctgactacaaagacctgggcaggcagaactgatggtgtccatgggtcgtayrtgggaagggatccaggactagttgcaggacaatgaagtgttggccacctatcttctcccaggctacaagagatccaagctggaggcttggatcatacccctgaaactaatgcctgcaactgatcccgctaccaagctgccctccttccccatccacaaggtacagtgtatcatccctgccaacccaaaacagcagagatgcagtgagcctgccattcctacctttacttcatactctgagaatagtcgaaggaacaacacagaaatcagaggcctgaggaggacctggagtcagggcagaagccagcagcacagctaacgtgcctgctagtcccctacctggcctggagagaggaccactccccctgcacagccccccagtgaggccctgtggcctcccccttcacccacaccccagcaacagtggtggagccccaggtggaaccaacttcccccagggcgtctcctatagagaaaactaagtgcacactgggcaccttggacaggtgcaggatcagtagaatttgcccaaggtatgacccagcctttccctatggaaacagccagygctggcaggggaccacggggaggttcttcaacttcctctgcaggcacctgtgtttcaggttagccagaaagaaccagcctgaggctgaaagcagagtgcagatagcgaaacctcaggtggtggrcagcagggcaaggttgagcacaggaaagaatgtgggaggtcaagctagctcctggcacttgccatgaggcaaggaagtcctgagctccagggagcccaaggagatggggcaggaaatgggccatgctggaggcaaacagctgtgggtaggagtgagcagaaaacacacactgctgtgcatggcccgcctggctgagaggatctcatgcagtggaggacgcaggtgtgcaagctgccaggcttcgctcagtgggatcagatcaggagaaaatcccatacctccctggccttcaaaagcattgtccttaatataagtgctgacttgaaaggttggccaggggccacctggggaataaggagggcagcccatctgccccagctggggaaactgcagagactggactgcttctccaggggctcttcttccttcctgtgctcctctctgtcttgtcttctgtgtttattaggaagaggagatggttctatagaaataaacaaacacgatcaacacacacacaaatatatatgccaatttactatatttaaatacaatagttaaaaaaaccctgctctatgactgcagctgtcacaagacaatcatctacaactttccgaagggtgggccctgaacccttcaaaacactcttgtgacccacctgaaaaatgataagaaaaacaatatcctcaatggaaaccaaagcctgaaagagcatcccgagagtgggacaactgtcagtggctgtaaagaggcttccctggagctatgacaatggctcttgctgctgggaaacaaggcctgagggccacacctgtgtgatgaataccgctctgagacagccaccccactatgtataatcctaaaacaatctcagtgtatcctctctcrtgtcctgtgggtggctgggctcagctaggtggttgctctgctccttgtggtctctgctgggctcactccaggagggtacatcaggctggggactgggctgggttgcaaggtcccagatgattctctcacactctgaggccctggtgctgattgagggctggggtgcctcagtttttcttcctgtggcctctcagttcacaaaaggagagtcaatacttccctatagcatggcagctgagttccgggaggtaatattccagragaaatgaacgactgcttatcaaccctytgcttgcctcactctcacaaatcacatgactaagcctggagtgaatgtagggagggatcacacagggaggagagtgcagggaggctggacccmctgggcaactgtgtatagtctatcacacactgttatgcagcaaggcactggactcctttagagaagtggatgaaaatgctcctggtggtgggattcctggctgagtgtctgtacacaggcacagaagagaaagcagaattcatgttatgtatagaagatgaaggtttgtycattgcccctctccatggtgtctgtccatggtgtctgtctggccatcctctgccacaactcccagtgaggcaggatctgatgtagaatgygcaagtgggctgccaatgcctggagtttcctgagtttgggaacacagggagcctactctgataaagagggacaaatccactgttaaggtcacactaaaggagacgttgccttgtcacactgatataattcaggacagcatccagcttggccactgcacacaagttggtgccaagtcaatagcctgactgaagctcattgattggggmatyggggcttgctttgccaggactgaggtcttgtgtgttggggcaacatttccctattcagctttcaaatctcatcttgaccctcacttcccgggaagtcccctagcagaaattacttgtaattcacatccatattctcttcctctcccttatttcaacaggcactagtcttactgatttcatgtctgcagtcctgctgcaccatcagctccgggaatagaagagtcaggagtgtgctcctcactgtamctccagtgcctagcactatgggcggtaaaattgaaaacacaaatgctctcccttcttgtcatctgccacctctccctttccctaaatcgccatttactttaaaactgctaactaagaagcaaaaggccaatgaccttggtcctctctgaccaggccccaggtgagaactatgtcctaaggggcagtggccacaggatgtggtatttggctggaatgatgtaacctctgccctttgacatcgtcatgtaactgggttgtcagctagagccctaaataataaaatgcaaataaaaccctcatttcttgtaaaatgggaccccagccaacttcccaatctcaatgaggattcttgtaagtcagatatttccctgggtctcctcacattctgattttccgcttccactgaatcctggctctttctccctcccatctttcatattttaaatgcccccttctccctatccttaatctacccagagagtcagctcctttactgtatttctcctaaacctcactcatccaaggccattacataacttattaaagaccagtgtgtccgtgtttgtgtgtgtgcgtgtgtgtgtgtgtgcgcacatgtaagggtttctttagagaatagcacagctgataaaatagactattggacactatcagtcttaaaatgtctctgggacccccttgcctgggccccaagtccaaaatggaatatgttcactggccttctcttctggtagctgtctgctcaatttctgggacttcttcacttgccttcaacctccttgtctccatgctggctcacttactccctactccctaaaaatcatgtttttctgtttaaggctaaagagcatgcatttttatttattttttcttaaagtgttccatctttattgaggtatatttgaaggatacaaaatcrcatatatttaaagtgtgcaattctatcagtgttgacatacacgcagccataaaactgtcacttctaaacaatatttccaccatcacctaaagttatcttgtgcccttttaatccattcttccctcaatcccatccctaggcaaccagtgatacgctttctctatacagattagcttgtattggttggatgcggtggctcacacttacaatccagcactttgagaggccaaggtggaaggattgtttgaatccaggagttcgagaccagcctgagcaacatagtgagacctcatctctacaaaaaaaaaaaaaaaaacaaaattagctgggcatgggggtgcatgtctgtggtcccagctactcaggaggccragtgggatgatctcttgatcctgggagattgaggctgcaatgagctgagactgcaccactgcacccctgcctgggcaacagaacaagactctgtctcagaaaaaaaaaaaaagattagctcatattttctagtgttttacataaatggaatcatacggtatgttctttttttgcctagcttctttcactcagtatgattttgagattcttctctgttattgtgtgtatcaatagtgtgtctttactgcagagtggtattccattgtatagaagtcccacagtttgtctgtcattcatatactagtggatttgggttgtttttgggttttggctctatataaagctcctgtgaacacttgcattcaagtctttgggtttcatgctttctttcctctttgatagatacctatagtgggatggttgggttgtattgtaggtgtatgtttaactttttaagaagctgtcaaactgatttccaagttggtcgtgccatcttacactctctccaactatgtaggagagtttcagttgctctgagtcctcaccagcattcaatatggccggtcattttaaagtcagccacctacmttgttttatgtttttgtgtttagagtttttaaaaaaatgtactcaagtttagccaactcttggcttcattataccaaagtttacaggaataaaaccagattatttctgttgctccagtgatattaatagtgtctactcttaacccccaaagtgtcctggtttggatgctaaagtatatgttttatctgcttccagcccgagtggccatgctcccaggctgtccttccacagccacacagcccatcaaggcattctgctcaacgaagacttttccttcctctgaaagagactttcctgctaaacaacttttttccttactacaatctgattgcagtaagcaagkatggcataacataaccatccaaataagttgaaaacttttgcccacacaaaaacctgcacactgattcatatttgccaacacttggaagcaaccaagatgtccttcaacagatgaatagataaacaaaacgtggcacatccagacaatggaatatgatacagcaggaaaaagaaatgagctccggacattctggaaaggtaaaactacagagatcataaaaagatcatctctttgaagtctgggtatttggtaaaaacaaatcagtggttaacaggggcttggatgggggagggagggatgrataggtggtgcacagaggatttttagggtagtgaaatgattctgtttgagagtggaatggtggatacatggcattatgcatttgtcaagatccatgggactgtatatcacagagcgaatcctaatgtgaactatggactttagttaataaaagtgttcctgtattggtgcgtccgttttagcaggtacaccccactgatgccacatgttcctagtgctgagaagagaccctgctcagggtatgctctgacttttttcctcagcatggtcaggcttcccttacccctttctgccacccacctgcccatctgctgctgaggtggctggtggcccctttgttactcacataactgtttgtggggccttcacgtgtttttacagaagcccagtgacaccccaaactgaggggacctaacagctttccatgggcctgtggcctggggcaattctaccttcctatctgaaaatgtggtggtcagaccactgctatttaagggtcctctgttctgaaccctcagtaaccccatggttggggatccccctgtcttgcacaatgagaggattgggaggatgattgtcttcccatcagttatttccacttcagtgttgtgcagccttcttgcttaaatggcttgcttaattcagttcccagaataaacctttgtttacatcctgaattacgtgacctattaataacaaaaatagccaccttaatgaaaagtactttgctgacctcatatcatctctgaatatcatgtgttattagtcacattttatggattggaaaactgaagctcagagaggttaagctacttgcccatggtcacacagcaaatattggcagagccagctttcaaatctaggtttttctgatcccaagggctttctacactccactcccagtgtaaacactaggaggatcacgtttagttgcttttaaagggttatattttttttaatgaggaggctggtctttaggagtttcagtagaaagaaatgagcttaaaagttaataaaatcatcaatgcttggatacattagaaaagagcgtgaagtcagtggggtggagggagaggaattcatatttgctaggggacttctctgaatcttgaagcaattttaaatacagttcttcagaaactgctactaatcattagagtaactagcagttactgatcatataccatgtttgagactgcagtcatcccactgaatagacattattttgcaaattctcacaacctcatgaagtcagtactattgggagcccatttaacagataagccaactgaggttggttaagtccttgtccatatgcccctgtatatgagggagcaggtgtgttcagggaatgccagcgcttccttctgttttaatctgtttggccatctgattgttttatgtatttattttctttctatcctgctggatgtttktttcataagggttgtagttatctgtctggttcacccctacaatcctagctacttgacaaactatgcatasagactccagaactagtttttgaataagtgaatgagaagcatggtatcacttccatttaaggttctgggcccatcttgtgtaatagaaaatgaagagcctcatagggatacaggggatactgggataggattttcacaggaggttgaggtgttttcagaactttagtggctagtttgaaatgagttttgaggcgctgaggggaagcttcagctccttcttctcttgtcttctcactgccctctggcccagttcttttccaggttcctccagtgcaggtcaggatggagaccctatcccataacaagggcagagccctgtagaaaatttcacccatcatttaccttcttagaactgccctgttctcactgcacatggacagagagaggacttagagctcatttacatgcttgttgttggttttttaaaaagtgaaataaaaatgctcytctgccaggactgtgatgtcacccagggctgtgattagctggaaacaggtgagtagataaaatcaatgttaaaaattattcaccattcaatgttcagaaaattccggaatgtggcwgtccgcttgattgaggaggagttcagaattcatccagggtcaccagcaatcagttctaatataactaacattttcaaaatgttaatatctcacttactgtgatgctaaggacagtaagtgtgtgctgcatttacttatccacttcgttttatcatttgtatgtaaaatatgtttgcctttacctcacccaccagcccctaggttttttgaggtataattggcaaataaaattgcatatattcaaggtgtacaacttgatattttgatatatgtatacattgcaaaatgattactgcaatcaagctaattaatatatgctttacctcacatagtcagcattttcctccttccttctttccttccttccccscttccttctttcctttttttggtaagagtctctcttgacgtctccagctactattgtactggggcctatctttctcttaagctctaatatttgccttatatatctggatgctccagtgttgggtgcatatatatttaaaattgttatatcctcttgcagaattgactacgtaagaacacttgagatctacacttttggcagatttcaagtatgcaatacagcattgttaactatagttacattactayacattggacatctgtttgcttttatatgtgtgaattatttggttttactgaaaatatrttaacattgcacaagaggttgcatacggttgtccattacattggcggccccagtgagtcatgatccccctccccacatctccaggtattcaggcccttgtgtaggcccctccttgagtctgggctggatgtgtttcttgctttaayggtagaatgtggygggagtgaacrcygtgtctgttctgggatgaggatgtagagtcatggcatcctctgctcctatgctttgggagtcctgggccactgtgtaggaagtccagctactctactggagagattacgtagagtagcctcaaggagagggagaggccctgagacatggtgagagactgaagcacaactgtcgcattccatgttgaatccagacttaagtcaacccattggctcaatatactcacatgagtgaccaccagcaagctagcagagtctggattggatctgttacttgctcaacmacagagctgagcctggtacagattgtagaatcatgataaaataaaatcattgttactttaatctactgcattttgggatggcttcttatgcagaaattgatgaccaaaacattatataaaagcagagattctcaactctggtgatctaaaagtaccatcacccagggttctaacscttcagagattctgatttgattggtcttgggtgagacatcatatataaagttttttaaagttttattttaaagatgaatacacaggatgaatggaggaacaaatggtggtatgtacatacaatggaatattattcaggcataaaaaggaatgaagtacttacatgtgctacaatgtggatgaaccatcaaaacctccaaaagaagccagtcacaaaaggtcacatatgattccatttacacaaaatacccagaataggcaaatccataaagacagacagcagaytgatggttgccagggactggggtaggggacatggggagtgactgcttaatgagtatgaagttttctttcaggttgatgaaaatgttttgaaactaggtagaggttgtggttgcacaacattgtgaatgtactaaatgccattgaattgttcactttaaaatggacatgaaaaaggttaattttgtgtaaatttcacctcaataaaaaagaagaatcagaagagggagacaaaagaggaggttaaagtgaggcaatgtgggaaggacttggcctgatattgctggctttgaaaatgaaggaagatgttataagccaaggaatgtaatggcctctaggagctgggaaagacaaggaaagggattctcccctagagcttccatacaggaatgcaaccctgccaacaccttgcttttagcccagagagacctgtgttgaacttctaacccacgttctgacttttaactataacataaaaacttgtgtagttttaagccactaaaaaaatacacaatcattttaactttatttttaaattttattttggggcataacagtttgrtaaggtttaacatatgtttagattcatgtaaccaccaccacaataggatacagacagttcatcatacacaaattctctcattcttccctttgtggtcacacatctcccacccctaatccctggcaaccactgattgtttgcccattactttcattcttcctttgccagaacatctttgctttgttctgcatcttaggaggaaaagtatttctttagtattgattttggaacatgtctgttggtgatgaattcttccagatttcattcattgagaatgtctttatttcatcttcgttcctgaaggatgttttcactggatattgaattccrgattgacagttttttctctttcagcactttaaaaatgttattccatttcctctggcctacttttttttcctgaggaatccacagttatttaagtcaatgtttccctttatataaagtatcatttttctctggctgctttcaagatgttttgccctagtttttagcagtttaattacgatgcatctgggcacggtttcctttgggttttgtttgtttctttgcatcctattcttccccttctccctctggaactctaacactatgaatattagactttttcgtattgtctcacatgcctccaatactctgttcattaatttttaattttttccttttgttcagattggataatttctattcaatcttcaattcactgactttctctattttgctattgatcttatccaggsaatattttatttcggtcattgtaattttcagttccaaaaagtttctcttttgtccttctttgtatcttctatagtctttattgagacttttttgtttcaagagaattttcccttacttcttggaatatgtttataatagtcgcctttgcatctttaataatttcaacatttgtgtcatcttgcaggtggcatctgttgattgttcttttccctataagttgaagtttttcttgtctttcatatgtcaagtagttttggattgtgtcctgaacattttgaatattacattatgaggatccatgtcttgtttaaatcctaaagcgaattttgaattttgttttgttttgtttttgcaagcaatcagtctaattaggctccagactcgagttctcctgtggactgtggttctaatatcagttcagttttcaaagcctktgcagtgctatgggaatctgttgtgtgtatgttgcccagtggccatttggtggcctggatcatagtctcatgcacagttcagttctcacaccatgtgcagcttagaagtaagcctcggagttaatatggaactgctctcttgagcagtctcctttctgagattattctggcatttttggcccactgaagccccattttttttgtcctctggttagaaasctaggtctttagttttcctaccttgctgcatacatctcatggctatacttgagtctgtcccaccaggcagtgtatgaacagagagagagaaaagggaatggtattttgtcccaccctcttgggaccacagcttctctagtggagggaagactcgcttccctcagagctttaagtatttcggtgctctccaggctgctgttgccattgytgttactgctgccactatgggattacctgggggttgggtgggcaagagtgaaaaaagatttaaaaaccagggactttctccacttcttataactcttaggtgtccccacaaccaccttggaccagaaagtgaggattctttttagagccctgcttgcttttggtgtgcacatccaggccagactaatgagtccaggccagatgatacaagaggggataaaagatgagagattcatggtggttttggtggtacttcatattctgatctctttccccaattcacctgctcctgtttacttgtcatggtccttagatagctgttcaatgtagtctgtccagggttcatttttgcattttgtgggagaaacagggtagggtgtgcttactccaccttgcccagaacaaaaactccaatatatatgtcttaatccaacactataaatggttaaaaaactttgccttcagcaacaggcataatgaccaatgctaattgccaggattgcctccaatagctgtgttctttctgctggatagagactcctgggccaccttaagggttagctgaggcaggcactactatgatgggtcactcctgaggccaagctacttgaagcagctcctgtcttctcaggtgctggttcctgccttcatcttcctattcctcccacccaacagagtccaggagctaagtaaggtagcctgaaccatgacagaagcatcagtgaggaattggagcctggaatgtctgactgagaagtttggtcatgacttaataagtaaaggaagctcctgaagattctcaagtagcaacatcatgtaatcattatcattaaaataataactaacatttattaagccatgcactatcttatatgtttttatatacattattatatatatataattacattaaattttctgatatggtttggatttgtgtccccacccaaatctaatatcaaactaatcctcaatgttggaggaaggacctggtgggaattgactggatcatgggggcaaacttcccccttgctattctcatgatagtgagtgagttctcatgagagctggttgtttataagtgtgtagcacttcacactttgctctctgtctccttcctgccaccttatgaagatgtgcctgcttccccttcactttccaccatgattgtaagttttctgaggccttcccatccatagttcccatacagcctgtgggactgtgagtcaattaaactcttttcttcagaaatcactcttttcatacataaatcttatgtcgttccttatagcaatgtgagaacaggctaatacatcttccaaacaggttgcaggatagatactatttttcatttgcagatgaggaaactagttttacctggaagtgacaggttactaacatcaaaggatcaggaaagtgccatcctaacttatgttgaggaggtgaagaactggatgagcccagacacatataagcttgtgaccttgggcattaatcccctcttctgcaaaaaggggatagcaatggtgtccaccctgctctgtagataggataagattatgaatgtagcatgcttagcacagtgactggcacaaaggaggcactcataaatcaccatttttatttgtttcccttcttcrgtgtagctgaaccagcacatagagttctacttgaatctccaaggactggcaggtgtcctggaccagactccatttttagtgataattggatgcttattatcacctagagatctggcttgacagttattttgcactttaccaagaaaaaacaagtagctatgccttggtggcagtcagatggccaacacattaaaatgagtttgcataacccactactttacctatggtcaagtgtttaaaatgtcatctcatctatttaatcaattccattaagatgtttttctctcaatttctgtggaagatgcagggaaaaaaggtaatatgtatttgtctctagcattttcacttgatgtgtgaggtcacagttaaaagcagctaccacatatttggtcaagagttcagggacaatctgggcagcagggagcagtaatgtctccatttaagatgcaggagccaatgactaggtcagtaattttccactggcttcaatgagagccctgacagggaaaggggtaagaggaaaggaagaggagaytgtgggaggaaaccgagctgggcaactgcattgcggagacacaaggactgccagccaattgtcttcgacttgcctatgccaaatgttctggaaatggactaaagtgggagaaatatcacagcaaggtgggactgggtggcgtgtaggggaagcagggaatcagcaggggctgtgacatcagaggaatcctgttcttaacagctgttcgctactggccagttgtttaacctctttgactgagccttgatttctttaccaagtgggcaaaaaaatactcatctcgtatgattgtggggaaagcagatgagataatgtgtgtggcacagccatggggactggggcccagggcatgctcaatagtgctactttcccctttccaacccggatgtcagaggggaccayctgccctccaagatctagagaagaggatctcaaatccccaccccatcagtgcccaattttagattttggtgaagccccaggaataatatttcttgcttccactccactatgctttcctcaattaggtttttgatctagcccagatgttgacctcagcttcagacacacacacagactcaacactcacactcttacacgctyacacacacacatgctcacacacacccactaataaacatatacacaccactcacacacactcatacatgcacaatctcacacacatacacacaacacacacactcccacacacgtacatactctcacatacacaactatatacatgacctacgttcactgaaataatattgttcagcacattgtgtatacagcattctaggaaacatcttttaaaaattgtattaaactcacgtttctgtcattatcctgttataaacccttcgattcacagatgataaactcttaacaacacagggcatcggtaatgatctgagcatcctcttttgaacatttgtctacgaacacttcactacacacataggccctcacacacacaatccctccctcacacagcccttgcattcaagacccctgtgtgtgttccagctgtgctgaaactctggggctatggagatttatgctataaaggacaggggtacaaactgagtacagtctggttttttgaagtcttggacatgtccacttgggctgtccttcctgccacatttcccctgcccgctgttatccctttccccgcttccttctctcttccctcactctgcctttctggcccccattagggcacttttttctaacgtaaggtggtctagcatttctttgttgtcttcttccagctcaagcccacaggctcttgttttctgcttccaaaggcttatggaggtgttctcctaaacacacatggttcctgtcccaaggacttccggagcagctggagaaatgcaatatgcttgttttgctctgttgccttctccctgtgcagtgttccatggccagggtggcggtggcagtggtgttaatacctggagagcattccacgcttttctccattgctgctaacttcccagggtccccatctgcacaaaatacgccctggatcaatacagactaactgatggcataaacacagctgatggcatcaatcactttatgatgcaaattagatacacattctttctagaacagaggcacccatcaccaccgccatcagaggtcattgggtgttactastaacttgggtgacactaaacrgatctgggatacaatcctagctaattcgttgcgcactgtctgacattgggtgaatcgcttcaccaatctgtgcctcaatttcttgacctttaaaatgggggtgatgatacttgtccccagagcgaaatgtactgcaaagtgaatgaagctaaagcttaggtagccctcacttctaaagacctgcttttgtatctaatttcatgttggtaagttggtgttccttttcctttctaaagaaattattttatttttttcctcttatttcagtctatttgtattagctcatatgtgttccttttcaaaaaaggctccccaaattgtatacaattctggacccawaamacctggcttctgtgtgggttrggaggaggaaatgagacgatgtctgtaaatgctcagccaagactgttctgagtgctccaggcatggaagccattgcagygagagcaccaggacgtctgaacccatcctgctggcaccttcttctccatgtcccccctaaatgggcctgccaactggggcgaacttctgcaggacacagtcactcaggccttggagcctccrtccagcttcttgcaggcacagatgcatgcctcctcttgacgcatgcagcttggaagctctccctagacacagccagcttgacagaggccacatcgttcaaacctcgtgccagttcccctccagctgacatggtggtgccaaatgggaggaaccccatattagtctgttctcacattactataaagaaatacctygcctgtaatcccagcactttgggaggctgaggcaggcggatcatgaggtcaggagatcgagaccatcctggttaacayggtgaaaccccatctctactaaaaatgcaaaaaattaaccaggtgtggtggcgggtgcctgtagtcccagctactagggaggctgaggcaggagaatggtgtgagtctgggaggcggagcttgcagtgagccgagatggcaccactgcactccaccctgggcgacaaagcgagacactgtcttaaaaaacaaaataaaaagaaagaaagaaagaaagaaataccggagacagggtaatttataaagaaaagtttactaggctcatgattctgcaggctgtacaggaagcatggcagcctctgcttctggagaggcctcaggaaacttacaaccgtggcagaaggtgaaggagccagatgtctcacatggctagagcaggaggaagagagagagrggggaagtgctacatatttttaaacaaccagatcttgtgagaactctatcacaagaacagcatcaaatggatggtactaaaccagcagtccccgacgtttttggcaccagggactagttttgtggaagacaattttttcacggactggtgggtgggcggggaatgatttccggatgaaacaattccacttcagatcatcaggcattagattctcaacctagatccctcrcatgcacagttcacaataggcttcaagctcctgtgagaatctaacaccaccactgatctaacagaaggtggaactcaggcagtaatgctctctcatttgctactcatctcctgctgtgtggccaggttcctaacacagtaagtacccatccatggcctaggggttgggaacccctgtactaaaccattcatgaaggatccacccccatgatacaatcccctcccaccaggccccatctacaacactgggattacaattacacatgagatttgggtggtgayacagatccaaaccatatcaaagcccctctctctacccctcagcaaagactttgttatggccacttgggacctggactactgcagtgtgttcccatgctccattttctgcacctcaggtccacaaaactrgcatatggattcatcaccatcctttcttcagagcacactgaaatcattggtccccgtctggcctgctgttacctgattaggctttttgcttcattctttaatgtaataaggactgcaagaccatcacccagaacaagagctaggaccttgatagaacctacagctaactccaccgtccccacttaacctgcaccttcaaatgtttgtatttaattcagaaaagactccagttctcccagtaacccacagctgctgtgtacaccagcccccaccccatgtcttctttcccccttggtgacatatcttcaaaagaagtccagagcaatcatattagccacttgatagcacatttggtaagggcttgggtagaggatcaagttgaaatcaatgatttaaattaggtttttgagtttatgtttgttttcacattcaacaaacccctcgtgctttcttcctatctattaggccttgcaggttcatcgagatgtccttgaggttctgagggaaatgatccacaatctcatgagttctccctcccagttaagcgggaggctgccccgggcagtaaccctgggctgccttgcaggattctgggaggctgggttggggtgggggctggtcgggcaggaacctgcatgtgcaactgtgctgataagtcatatctgaagccagaaccagaaggaaaacaaggtcacctatgtaaaggggtgggtggagcaggagacaaagycatgagaaccagggctgcccgcccggagctgggagcaaagcagaggatgagggtgcagtccaggggagctgaactggggggagcttcatccgagtgcctttccaggctggggagcccctgcacctcaccactcttggacatctctgccctccccagacttcgcccctgcactggcctctcagcactggctctctttaaagttgcctgggcagctttatgagaatgtccgtgtctgcctccaccccmacggcttcaggtttgcttggtcccggttgaagcccaggcactgtgtgtttgtgtacgtcctccaggtgattccaggacaggcttcgtgtcgaaacacaagaaatagcacagaatctattatttcttctccacaggcccttttccaagttgtactcagcgtggaaatttttgtcaacataaatctaaggacaagaaatttcttcctagagatacaacacaagtgagacagatgggatggttggggtggggaagcatcacagagcatggggctggttcagggctctgggctgccaactttacagagttctcatctcagcatctacatctgcacagactcatgcagtagcctrtaacaaccaggagagctaaggctcctgaatacgggacctggaagttatgacctttgagcaattgtagccagaaagaagccttgtctgctattggatttggagccccagcagagggggtgagccatctaggacagactggaggacgacaaggaagtgtggccacagacaatcaayagaatgaaagaagacactgtcaacgggaagggatgaaacattcctcacagccccacctggctaaggtttcaccagccattagcgtggggggcctggaagtgaatatgggaggcatattatgtttatttgtcctttgtacattcacgtgcaagttgatgatttgatgagcggtatatagtttattctgtagtgtgggattggccacaggagtataatttaattagggctgctctgcatactgatttgcttartttgaagcccattcctcccctgggcagggaagtctctaagcctctgatgggtaaatgggaaattagggcatctgtggatgacatagaatgtagattagccaggcgcaatgatgcacacctgtagtcccagctacttgggagactaaggcagaaggatcacttgagcccaggagttcaaggtcagcctgggcaacatagtgaaaccctctataaaaaaaaaaaaaacaaagaatgtagacctcatgaacaataaatgcctacccagggcttcaactgggcatttctccagagccaatatgctgtcgggcatgccagacatgtcactgtcattgtggcttctgcatggctatgtgtgaacaggagaagtggatttcaaactatgaatcattttcaggatcaagtctgggatgccagtaatttcatttctgggcccatttacccacagcagagcaggacagctttttgtggagcaggagatccatgctccatccatagaggaatgtcttggagacagctgacagtctgcgtttgggaatgctgacagcgctggcacaaaggaatgcccatttgtatatgcattcaagcaaagaagagtagaagatactcggtaaaagctccagggatactaggaagaggatgaggtttatgtaaaataggaaccctcagctaaacaaatattggtaataacaaaaaggtgggtggtgggggaagaaatagaatatttttggttacagctgcattttcatttaacagtttatgaaatatggttcagaaaagggaataggacatgattaaaaggcaagctggtcaatagaaaaatagtggggagattataaaagaacttttaaaattaatgtattagtttttctgctgtaacaaattactacaagcttagtggcttaaaacaagtgtaagttaacttatcttacacttttggaggtcagaagttcaaaatggttcttaaaatcaaggtgtcagtcaggctgtgtattagtttgttcttgcattgctataaacaaacagccgagactggataatttctaatgaaaagaggtttaattggctcatggttctgcaggytgtacaggaagcattgcaccagcatctgcttctggggaggcctcaggaaacttacaatcatggcaggaggtaaaggaggagcaggcatctcacatggtgaaagtgggagctggcggggggtgggtggtgccatactttacaacaaccagatcttgagaaaattcactcactatcctgaggatagcaccaaaccatgagggatcagccccaatgacccaaacaccttccaccaggccccacctccaacactggggataacaattmaacatgagattttggtgggggcaaatgtccaaattatatcataccaccgctggcctccgccaaatctcatgtccttctcacattgcaaaatataatcatgccttcccaacagtccctcaaagtcttaaatcattccagtattaactcagaagtcccaagtccaagtcccaaatctcatctgaagatgagtcccttccacctatgagcctgtaaaatcaaacaagttatttacttccaatatataatgggggtacaggtgttggataaacattcccattccaaaagggagaaactggccaaaagaaagggattacaggccccgtgaaagtttgaaacccagtagggcagtcattaaaccttacatttgaaatccagtggggcagtcattaaaccttaaagctccaaaataatccttgactccatgccccacattcagggaacactggtgcaaggggtgggcttccaaggccttgggcagctagctcctgtggttttgcagggttcagtgcctcaggcttctctcatgggttggagcatgcctgaggcttttccaggcacagagtgcaatcttctggtgtatctaccattctggggtctggaggatggtgacccccttctcacagctctactagtcagtggcccaatagggactctgtatgtggggccttagtagaagttctctatgagggctccacccctgtaayaggcttctgcctgggcacccagattttctcatacactcccatctaggtggaggatgccaagtctctttcactcttgcactctgcacacccacaggcttaatgccatgtgggagcagccaaggtttatagcttgcaccctctgaaatggtagcctgagctgtacctgggccgcattgagccatggctggaaggggagcagctgggatgtgggaaacagtgcaccaaggctgggcagggcagyrgggctctgggcctgacccagaaaccattattccctcctaagcctcagagcctgtgaagggaagggctgcctcagmgatctctggaatgcctttgaggcctttttcatgttgtcttatcagcacctggctcttttttagatatccaaatcttgctagcragtggttgctcaacagcctgcttgaattcctattctgatcatgctttttctttctctgccacatgtccaggttgcaaatttttcaaacttttacactctgctttttaattacactctctttttaattatgaattccaaattcaagtcatttctttgcgcctgaatctgggcatctgttaaaagcagacaggccacaccctgaatgctttgctactgagaaatttcttccaccagataccctaaatcatcactttcaagttcaaactgtcacagatacccaaggcatgaacactttgcagccaagctctttgccaaggcataacacacatgacctttgcttaagtttctgataagttcctcatttccatgtaagacctcaccagcctgtccttcactgtccatatcgctatcagcattttggtcacaaccatttaaccagtctcttaagaagcttcaaactttccctcatcttcctgtcttctgagccctccaaactccaacaacctctgcctgttacccaattccaaagccacttccacgttttcaggtatctttatagcaatgccccactcctcagtagcaattttctgtattaatctgttcttgtattgctataaagaaacacctaagactgggtaatttataaagaaaagagatttaattggctcatggttctacaggaagtacaggaagcattgcaccagcatctgcttctggggaggcctcagggagcttccaatcatggcagaaggcaaagggggaacaggcaggagtggaagtgagagagacagtggggagagagaaggtgccacactttacaacaaccagatctcgagagaactcactcactattgtgaggaaagcactgagctgtgagggatcggccccatgacccaaacrcctcccaccaggccccacctttgacatggaggaatacacttcaacatgagatttggatggggacaaatatccaaaccatatcaggctgcatggttctggaggctctaggggagaatccttttccttccttttccaggtttcagaggctgctcacattacttggcttatggccccttcctccatcttcaaagccagcagggtagcatctcccaataattatctctcgctccttccatcatcaaatctcctacttcctctgcctccctcttacaaggactcttgtgattacatcaracacatttagataattcaggataatcgtcacttcatctcaagatccttagttttgctgggtgcagtggctcacacttgtaatcccagcactttgggagtctgaggcaggaggattgcttgagcccaggagttcaagaccagcctgggcaacatagtgagacccagtcaacaataacaaaaaattaataattaaaaaaaggccagatgtggtagctcacgcctataatcccaacactttgggaggctaaggctgcagaagtacttgagcccaggagttcaagacctcaagaccagcctaggcaacattgtgagactttgtctctacaaaaaaataaaaataaaataaaataaaataaaattagctgggtgtggtggctcacacctgcagtcccagctactcaggtggctggggcaggggaattgcttgagtctgggaggtagagagagctaatcatcatggctcactagccatgatggctccactgcactccagcctggatgacagagtaagaccctgtatcaaaaaaagaatccttaattatatctgcaaaattccttttgccatttaaggcaacatatttacaaattctaggaacatctggatgaaggagggcataatttttgctaccacggcattgtaaatgattgtctttttttaaagacctaattttggaataattttagatttacagagtccagagatttgtaagtcttttaaaaacatttttttcatctctgattccagctttacaaatgctttcacattaaaaattatttgaaaaccatttgtgaaagtaccttgagttctttggaagaaaggtgctgtttagtgcaagttgttcgtgatascactgacctccttcagaggaaaaccatgcagtttgtcgctaaaagccaccagcctcttctttcccaggaaacatcctggagttgattccttaggaggcactcctaagcctcatgaccatcactgccccatgcaggcaggtgaagttacttctctccacctattgggaaacacattctactccagaaagtccttctctgtgtcacttcatccccactttcctcagttgttgccttgggcactgccaggcaattgccacttgtaactggccaagcaggtgacacctgggaacctgagtcacctgtgccccaggcctgtgagccagccatctttagggatgcttccaggaggcttagggaacactgagctctctttagccagctcctgtctaagaacctccctcttccttttgctactggttctggctctgaaatcagagctagccctattagtgatttgaggctacttgttggcataatgccttccaaacccaggtgtgcactggaatcatctattgtgctttgtcaaaaatacacatcccatgaaatgaatctgggttgtctaattgcacagaaaagcaaggaattagtcaaagaccaatggggatatgtcaaaaggacacaagaaccagcttgaaagctaagtctgggatgacttgagcatgaaaatgaatagtgatagtaatggattataaagcattgaataaaataagaatgtataaagtcatactgacataactacataaacaagtaaataaacaagcaaatgttcttgctaaataaaagtccacattggagactcacctcttaaaataggtctggaatgagatatgttgaggcagtattttaggaagtgaatgtttctatttttcttttcttctttctttcctttttttttttttttttttttttgaggcaatgtgtcattctatcacccaggcaggagtgcagtggcacaatcatggctcactgcagccttgacctcccaggctcaagaaatcctcctgcctcagcctcctgagtagctgggactacactactgtgtctggctaatttttaaattttttttttgtagacacagggtmtcaccatgttgcccaggcttgtcttgaactcttgagctcaatcaagcaatcctccccacttggcctcccgaagtactgtgattactggtgtgagccactgcgcctggccttgatttcttaaaaagcactgatgagcagtcaagattcagcctctctaggtagaacacagccaaagaagttgtagaagaaagacctaaagtatttgttgtttcattcattctttcaccatttattaaaacctagtatacgtcaggtgatgtacaaaactgggaatggaaaagagtaaaaacacttcctgtcttctcagcttcctggaggtggctctggaggtctcagagcccaaaagaaggaggaggactttgctggggggatcagggagagaacggcattcaaaatcaagggcaactctgcatttgagaaaactctgctcctttccagaactcccgtwcaatgctcagggtgactggtgcacgggagggcagggcacggtggtggctgatggtagattttattgtgcaggcgaagggtgcactgcagggttgcagcacagacgagcagttataactrctgacttcgcatgcaccgcgtgcccggcactggtccggcccattgtgcctattcagctgtgtcaccctcaccgcagacaacactgtatgtacagagaaggaaatggcagagccaggcggggtgactttccaaggcgcgctactggcaagcaggaatccacgtgactccagagcacacactgttaactcctcagccggccagcagccttggccttmcctgggagcccctcagaaatgcagaatttcaggccccaccccagatccagggattcaaaatctgccttttaacttgatctaccagagattcctacacaccagaagtgccagtcgagtaggtcactctgaccgccaggaggatgrcctgaggcggggcagtggctgggaattagcaagacaaggtggaggactgctgcgctgccggagaaggggtcgggcccaggggccacgcgctgccgtgtgctgaagcccccttctccctcccttggccttcctgtctgcatctcgactgcacgcttgttaggaatggcccggtgctccccgggcgaccgcacagatctagcatggcggtgtccatccgccagcggccagtgtggatgggctcagtgttttgctcatggatcattaactccagcagtggagccgtgaggttgccacaaacacacatgcttctgtggttccagcgtcctccaygtgaactccgatcttgcttcccagggatctcctccttccctgggctgttccagccacttactgctctcagctccccctgctgacgcagccactccagcagcaggagtgagcgacgcaggtaacaccagctggcacgtgggaggccagtgtggaagcacacacagcaaacaggccactggttccctggagatggctgcagtgtcgctatcactggaacaaagaagaacagtggctgctgtgaatgtcctcatcttgcccccctgccccacccaaaaaagtagcctaaagtagcagaaactaccacagacctggagatcttctgttctgaggagtttagttcaactgagaaggctggaatagtaattgatatcaaatgacgggtgtaatttctccgagttccacaatcaccgagaagttacacattgttaagccagggctggatcctaacccccagacgactgtgggtgagggctttcattctaagcacatggcgctgatggtattttcgcccatcagtttgcccaggcatgccactgtgaaattcctttcccttgctgggattttgactctgaggtttccagagtggaagagaaatgcacttccactaaaggcatttctattgccacgagggaaatcaccaccaagtcattttgatagtcccacaactcaatcctaattaatatcaatcataattactaatatttattgacattccctccctaaaaatatccactgccattaagttgccccaaaattccctgggaaaagggtgaggactggctctgctccttcttctgtgtctttgagagcaggactctcagaatcgcactgaccagcccagaccagaagttagttcaatgaatggacttggagggggcgtgcaggcccatccagacacgctggctggtttccaccccaggaatcctgcactgaagaaaactgagaaggtggagctggtggagagatcaggggtttgggtggcaccaaccaccaatccatccgtacgctttctgttctcacagataaagaggkagccagccccagcatgatggctcatgtctgtaatcccagcattttagaaggctgaggcaggaggattgcttgagctcaggagttggagaccagcctgggcaacatagtgagatcttgtctctacaaaaaataaagaaatagccaggtgtggtggctagtgcctgtagttccagctactckagaggatgaggtaggaagatcacctgagcccaggaggtcgaggctgcagtgagccatgatcgcaccactgccctccagcctgggygacaaagtgagaycccccccaccccatcttaaaaaaaaataagttgtaaaaagagggagtcagcagcagggagggaaataatcaaatcaataagatatcattgccaagctctctgggaattagaaaatggatttagtaattctgcagaataatggatggccagaagccccagtcctaccaaaccactaaaaagataagcatcttcagtcaggagaagcagctggccatcgggggcagtacagggacaccagagggataggagtatgggggtttgtcatctactctggcggggcgggagrggggtggatttaggctcacacagtatagttgatgggttggctctagggtctgggtgtttctttcttgttatagctccttgttgctgcaagcagggaaaatttggtcaacctggaagaggagaatgtgtgtctggtgaacagtgtcggtgccattatgtttcgccatgccctgacctgattcctgtgcaccaatgagggcctccagccttggagtgcctcagacaactctcgaaccccctgcccatgcccgtgtaggtgttttcccagaagtccggacagataggtaactgaggccccaccgccatagcagtgtgaagcccctgcagggtcatgcttttctgccccactcttttccatttcctgttgaaccctcatcaaagtctaaaaagcaaagcaccaatctccagtgccccctgccctttcatcgaccccgctggagtttcaatgccttggagcccagggaacccatmtmtgacctctctgggctgcattttcctcttctgtaaaatgggctaagtgttgactgggataatgcattgagggcactttgctcagtgcctcggaaacattaaaaagccatgcctggaagctgggctgctgcagttattatctcaccactccacccacttggggcaggccaaggggaaggacaggaaaggtgggcagygaccttcctggcttcatgaagagttggattcaggaactggaagaaggaggagccaggaggatgggtgaagggaaagggcttctggtgcttcccaggtggaggttccctttgcgttggaaaaatcctgtggtttcgggaggatcccaaaaagagcaggctccagaacaagagtgggagggtcagaggcagagatgaagcctgctgggcgattcccttccaggggcagagtggaaacaaagctgggcaggcgctggcagctaaagccattcatccagccctcagatggctaaaaagagtgtccctctgtgttccttgaggtctcatgacaaaaaaccagcaaatgacaacattaaaaaagaaacttactgcttggcagtattattggtgaggaatcaaattattagctgaggaattaaaatgctgtgccctgtgcacaggctattctacaacaaaaatagaaaccctgccctgtgttgtaagaatggaccrggaaaagaaagtctccccgtgtcccaggaaacaaagcaggcatcaggagcattcttagtgaccaaagagaactgtgacctggtgggacagggctggggctttccaaccaaccctgggatggggatgtcttagtctgttttgtgctgctgtaacaaaatgccacagactgagtaatttataaagaaaagaaatgtattcttacagttctggaggctgggaagtccaaagttgggggacccacatctagtgggggccttcttgctacatcatcccattgaggaagggcaaagaaagggtgagagagagcaagaragacccaaactcacctttataacagctcactcatgatgacaaacccactccttgataaccacattgatctactcatccctcatgacctgagcacctgttgaaggtcccacctcttaacactgatgcattgggaattaagtttccaacacatgaacactgggggacacacccaaaccagaccagggggctttgctggggtgcaggtttctaattgcagaaggacatgagaacctgcctggccttgacctttcccaggtctgaatggcccaagcttcattgtgtgagctgtgtctgtggcccctcacagggctttgggggaatctagactcctgctttgaaacccatcccagactcgttttgcatcagataccaggttttggcttgaagagcaaagcctggctgttctctctgggtgtcagaaaggttggggcttgtgagtttgggttgttaatggtgtttctcatgaagggagcagttccatagaatctgtccccagtaatcaagcgcttatctgcaatgcagatctggaccttgccaaccgattggcactggggaaggcccttcagataaccagcctcctgccgtgactggcactgaagtgttctaacaatgggagggcccgatcaggttcctgatttcagagaggaccgaaagtgggggcaggggagggcatttcactgactgagagttttatggattagacttatttttgttgttgttgttttgtttcatttttattattatggactagacactgtaaacctgttgtctttagtcttcaagagaattcctgaagtggggcgtctcatgttcattttagagatgaggaaatggagttttactttggtaaaataaacttgctcgctgccttagggcttgccactaggtctgccccattaaaaaacctctagcctttaactatgtgamcgccgtaccgagtgaccccatcagcgacccctctaggggtctaagaacaatttgccatcacatgtgggtggctgctgtgccactcttccaaccctaggagctttgtgccccaaccctagtgctgtagtggggctgaatggtgccccccaaaaagatatgttcaagtcctaaccccttgtacctgtgactatgacctgatgtggaaataaggtctttgcatattgaattaagctaaaggtcttgagatgagatcattctggatttagggtccaccctaaatccaatgactggtatcctaataaaagaaaggagagagagaaatgatacacaaagacataagaagaaggccttgcaaagacagaggtagagactggagtgatgcatctcaaagctgaggacccaaggaccaccaggatccaacaggagccaaagagaggctgggatagattctgcctcagagcctgcagaaggagccaacctggctgatkccttgatttcagacttctagcctccagaactgtgagagtaccaatttctgtcattttaagccaccaaggttgtggtaatttctttcggcaaccacaggacactgccacaggcctaatctccacagtaggactcagagccttctcttgtgttgtgtgccttctgtacgcccaggcactgagctggacccacgctagctttgtcaagtctctcactttaagaggtgggtgtcattattatcacgctcattatccaggtaaagaaaccgaggcttagataactaagtccaagcagagctgcctggtggggtggactctgacccaggcagtaggactccagaacccacattcccagacagtgacaggggaggaagcaggggctggtggttaaaatccctgcccaagagtgcagagaatgtgggggctctgccctggtctggaagtccccatagcctcacagcggccttcagctgcacagaaccactgggagcatcaggggtttccttctctgcctccacagttagtagaccagggaggtgggtgcaacactttccctaggggcacacagctctgtgaggcagccagccagggagctcagcacctctaattctctgtcctacgtcctggaaatgcccagagagtggggcttcctcctctggcccagctgtgagcattccagagtgagaagccttccacagcctgcacctgctgcctgatccaggattgatttacctggagaggattgacacaagcagaaggatgattcaatacaacctatgtgtccatgattccttagagggattcccaaatcccagaacctgtttctggggtgtgtggtttagaggagggagggcagggatgcggggacgggggtgggtggcagagactcacccttgtccagccacagtcatggacttgaatgtgaagaacctgctctccccatgatggcctggtgcacaaggaggtaacgacattgactgcaaaacctgctggatgacttaaagatctttcccaacaaggaggtgctcgcagacctgcaggtcacctttgaggaccctggggcctgtaccatgtgaaactcctgatgaggaaggacttccacatcgctccacccaaaggcttccttccacctcaatatgggtgccagcagtaagatccggaggaactggacggttgagctgcgtgtctgatgtgtgctgctgaccatcaggtgccggctgagccacctggagtctgcacttaaccaggggtcaggctacctgctcttggagaaccatgtgtggagatctggggggcatggtgggcccaggagctgcagcctcctccaccgaacctctggtccccgggggccctggggtggccgagaatcccatcgccagggctgcagtgggctcttcttcctcatccctcccctttctttctcctcccttcaactctaaattacttaaattatggtgggggkttggggaggacatggggggcactgggacctagatttgttcttctaaataaagttggggggggaaaaaagcttcaaaggtccaaagctcggcatagctaattttgtagcaacagctgaactgaattgacgtgaaattctttataatctttatcccacttggtgtgaacattttgttacagtgggtagctagtcagacacaaagagggcaggaragggccctgcaccccaccaggaaagtcaggcacccatcaggtgatactcaggcaattttctgcctctctaaaataataataggttgcagccagcaccagagaaaggcagtctccctatagagagagaaacacctgaagctggtgatcagcagcttcctgataagatctcaggaggtgggtgagtggtctcaagcatgcatatttaaagacaaaatggcggcattgaactggtatatgaccttccagggacattccaccagtaataggaagaccgcctcaggtgagcatgcctacaactccagtaagcacactgctcatgctcccctcccaaaagctagcaggccattgtgcacacagcccacccaagggaagaatcggggagaagggacgccagaccctagaagtaagcagggtaattttatatgccaccatataaaagaagtaattttacatgccaccatataaaattccaagtcaaaagttcagaccccacacttgtcctcaaagatgcccatttggccctcttccaagtctactttcttttcattcctgctctagagctttttaataaactttcactcctgctctaaaacttgcctcggtctcttctgcctcatccccatcagtcaaactctttcttctgaggaggcagaagaaagagattgccgcagacccgagcagatttgctcctggtaacaatttcactgtggagatatgaatgtaattcatttcaaggtgctgcccccgactctactgggtattctgcatgacatggtatatgcactataattctataagtctaaaatctggaaaattctgaatcctaaaacacatctgggccaagaatttcttgctagagattggggccctcctttaagttctcctggaggtcgatctgctggcagcactggggcagagccacacgtgccctccacccagacatggtcagatgtgtagagggccaacagcaaccccagctcttacttctagaggggcaaggacgtggacaggtttcaaccttgagaaaagatttaatttaatttagggtaccattaaggtagtaaagtaaatttttcaagtcagagaggcctgggtgcaaatccaagttttgtttgtttgtttgtttgtttattgatagagtctggctcagccgcccaggctggagtgcagtagagcaatctcagctcactgcaaccaccgtctcccaagttcaccctcccaagtagctgggattacaggcacccgccatcatgcccagctaatttttgttttttagtagagacagggttttaccatgttggccaggctggtcttgaactcctgacctcaggtgatccgcctgccttggcctcccaaagtgctaggattacaggcgtgagccaccgcacctggccaaatccaagttttaaaagtgagtgacctaaacatctgtgagacatctgtaaaatggagacaatcacacttaccgcacagggtcgtatgagtgtgagtattgaatgagcaggtaccaggccaaccacagtaacttaatacatagaaccaccctttgtctgcactccttaatgaaatccctcccctcaaagctggccaaactgcaaattctccggaagaaaattgcattctttccaattcttagcaacagatatttggtacctggagttaagagatttttctgagagtgatgcagtcatgctgtcaatttgtccagtgcctctcagagagtcaccaaggacccaaagtgctccgccagcctcagcaagcgtggcagctgggtgctcaccacagcacatctggggacagagacacagcacagtgaaggccaccgtagtgctcccaccttactgctgtcattagctattaaaggaggtgttggtttttaaatgtcatatttgagtccccaggggcctctggaggaagtactatcgtaggacatcaggcagggagtgtgacattaaaagaccctggggatgggcagggtggtacttcacagagaccactctcctggcacagagagggcctaggggctgatgctggtaggggcaaaagcaatgtrgaacacactctcttttattaagccaggctcctctcattttatttgaaattgtagggtcttttccttgattcatatgattgtcattaaaccagcgaccttgtgtagctaatcaataaaaagcatgtggagtctttaattgtgcacgccctggtgggaggtccagggcatgcgcaccacacacccccctgggctcctgccacctgcccttgacagkatgactgcgcttcctgtgggatttgtgaatctgaccttgacgacagatagggaggggctggccagttggtctgggagaagggagattatatttatatatatttttttacaggttgagcaacccaaattcaaaaatccaaaatctagaatgttccaaaatctgaaactttttgaggatcaacatgatgttcaaagaaaatgctcattgaaacactttggattttggatttttggatttaggatgctcaagcagtatcaggcaaaamttccaaaatttaaaaagtaaagaaatccaaaacacttctggtcccaagtatttcagataggggatacttgrtctgcattttatcctgagggatctgtgctgcctatctcaatgtaatttttgaaccagggcaaactattcttatccccttggtttcaaatgggagaagcaaggcttcctgaaacttaacactgcagccaagtcacaggctggtcagatttggctgatgatggaagaaaaaagaacattcttactgagcaacagggctgagtttccaccttttgttctgtcctccactcctgagggtaayaggcattctcatttggaagcatctgctgccctggagggtgtgttagaatctcctggggagaaaaagaatgagagggagagggttgtgtacactgggagaaaaccctacttataataagaatttctttctgttgttttttgttttgttttgtttttgagatagagtctcgctctgtcacccaggctggagtgcagcggcatgatcttggctcactgcaacctctgtctccctggttcaagcgattctctactgcctcagcgtcctgagtagctgggactataggtgtgcgccattacgcccggctattttttgtatttttagtagagaaggggttttactatgttggccaggctagtctcgaattcctgacctcaggggatccacccgctttggcctcccagagtgctaggattacaagtgtgagccaccgcaccyggccaataataagaatttctaaatgatcttctctccccctgagaatgatcaagcaatggacccattcattcactaattccttcactctstcattcatttggcaacttctcctaggcccacagtayatccccrgctcttctgtgcttcacagytttgaacatgctgcctggaagggtgcttgttcaacctctaaaacccagaatcaattgtctcctcctctgtcaaatgttttctgcttccctgtgtctctcacctctgaaatctcttgaatacagcaagactattgcattgattattctgaatctaaggtctattcattttcctgtctttgttgacttttagctgtaaactccgtaagggaatggaccactgtgtttcttattggtcttcatatgyctggtcactaaccagagcctggcatattaaaggtactcaataaaagtttgttgagtgactgagtgaaggactttctcatagtggacagcttcttaagtgtgataaaattggtatgtgtgtggatcggggaggcgggactgctgagtggcctcgytccagggatggtcttaaccatgaggtgctgttgagcccatggtgtggtggacactgtggtgccttcccaagatcccctcgaccccttctcaatccctcctacaggttctgtgtgctctaccccagctttgctcctgagggctggtccttataaacctcyrcagaggactgcccctgggctcctggacctgatagggcagcaggtgccacaggctgacagggcctgggagtttagtcccctccagagtgactgccaacacccaactggtgtgggagtgtgaacactgggctcccttgcctcaaggacaaatactgagaggcagcgcctgctctggagcttcctgtggggtcaggttggagctggggctttgcctgaaatcgtgcccttgcttggcttcctcccctgtctctgtcttgcttccccctctcagtgccccctgcaccaccacctcatgactcccttaacaaaacatttgcacaagaatccttgactgaaggtctacttggggaggagggggtttctgtgccttatctttctcatttgtaaaatagagatttgaagagtayctgtcttcatcatgaggattaaatagagtacccccctgtaaatgccaacacagagtatgactcttgggcagcactttagtaacagaacattagtaatagaactttccaattttagttagcacactgggcccccacaaataaagactgtattttccaggtcccacccctagcagtgggttgatgtagcagtgtgggtaattctggccaggtgcattggagcagaagtcatgagtgtaacttgcagatgattgcctttgaaggtaatcatccttctgcattttcctctgccccttcctgctggctggagtgtgggtgcgagggtgggaattggcacagccaaccttgacaactaagtagaagctgcatgttgagcaaagtggagcaaaaggatctgggggactgcataccactgagccaccctcccagccctagaactcctaycccattgggcatgtaagagaaacttcaagtttattcaaaacaagtattgggatggcaatctctttgtaacagcagccaaacctatatcttaacatcttcagactccaagcagaaggtaactgcaggagagaaggtagraggatcatctctcgagacagccaactccagcaccaacaagcaaggaatcccgcttcagtgtgcgcttgatttctctgtcttcctttacttggtctccgtgtctatttttgartggaaatgggataacaataggagaatgtaggaaaggaaaataagaagtgacagctctaaagagaaggtaatattaacttctcacttaagcctggtggagttaaaatgaaagtgagcaggaaaagagaagaccttgtcccaaatcaaaattgttcagaaggcttaattttaattttaaattttttgagacagagtctcactgtgttgcccaggctggattgcagtggtgcgatctcrgttcactgcaacctccatctcccgggttgaagctattctcctgcctcagtctcccaagtagctgggattacaggcatgcaccaccacacctggctaatttttggtctcaaactcctgaactcaggtgaacgacccacctcggcctcccaaagtgctgggattacaggcatgagccacctggcccagccaggcttaatttttaaggatgtgctaaatttccctttcactcatttccaaagttcatcaacagcaagggaatggatctgccacaatcctcctacagaccctccctctgatgaactggctacgggacacattcttgcctatgctgcaacactttgtaattttgtacaaaagtcatccagggattgttgcaattttcccaaaggactcagaagagattaggttgattttgttagcgtgacacaagtactcggtgcctccttcatggtgcttactyggtcactgctactgcccaggggcaagttagtacccttggagtgaagcatagaatatggagattcttaygtataagggcctgagggagaagcaagaaggcactaagagaaggaagaaagttgattctcaggctcagtcctgtctttcagggttggttttctcaaccttggcgctactgacattttggtctggataatcctttcttgtgggaggctgttttgtacattgtaggatgtttagcagcatccctggcatccccccactaaatgccaacagtactaccatccccagcccccagtcatgaaaaaaaaatgtctacagatattaccaaatgtccctggaggctgtgtgcaaactcgccccttgttaagaaccactgttctagggtctggctctagggagacaagcagtggaagcagcgcctgaagatcatttttattattgttttgggggtatcttttcccctaaaaacatcagcaaacagtagccttggggaacacacaatctgttttgggttcaactgacagagggaaggtcaaagggaggaaaatctctgttctttaacagaaacccaaagactctagcatcaccagaagaccacttagagagctgcaagcaagggcagtggacattctgaggaaggagaggaaaagaggacaagacccaatgctcagcagtgcctgttatttaagtcaataatggatgtcttcgtcttctttgctagtgattggctgatggatgagcatgtgacccaattccggcaaatgggatgtaagaggagaactctcctaggggaccttgggaaaaattttcttcctagataatggagaaatagctggggcaaaactcccactctgctctcctcttcccttcccatcctatgccaatatggaatgcttggaactgcagcagttattttgcaaccatgaggcaacaaccaaagttcaaagcctattgaaatatgggaacagcctgggttcttgatgacatggttgaactactgagccaactttgggactatctacccttagacttcctattaagtaagaagtatatgttcctatgttttaagccagggttagctgggtttttctgtcatttgcaattgaagacattactaaccaatggaaatgttttcaactgcaattaatagtaatatctaactaaaagaaacttctaaagggagyggatatttttctcacctaatgagaagtcctgaagtaggtgattccagtgttggttggtggttgtgcagtatcagggctctgggttgacttacgtgtgattctcccagccttttcctcatggtcacaatattgctgccacagctccaaatgtcatgtattcactcaaaccatgttcaagacaggaagaaagacgcaarttctctttgtttagccctctatttttatcaagagacaaaaaaatgttccctcaagctcctagtaaactatctcagggtctcattggccaaaacyggactacatatgaagacagcctgggagagcaagttcttggcattttaagtctctgtcatgagaggtgggctctagcagagaaaggctgctgggtccacagataacagtttctgccacaaaataattgttcattccacattccccattatcagaaaatcagtatttccctgttgaggctctcatcccactccatccttcattgtctaggaagtccagggacccttaggccacctgtagtaggttggctcagccttcacatgccactaggagagagaactagagtcgatcagttcagttctgtgctcatcccctggcacatgatgtaactgctgaaggatggctcccggatgacagtgttgttcatcccctgatgagatgaccctttgctggctgggaagactgtcctgggtgcagttctagggaagacaatcatgcacccttagcactaagccaaccatgaggccccagtctctgctcccaaaatgtcagcttccagggatcagcctcttctcagggctcaagctggtcctgggagctctgatcggggaaccggagtcactggctcccatcttccaggtgagctctctcttcttcctgcacagctgcacctgcgaagggaggccatatgccgtgacttccaggaacccccaaaacaccctttccagaggccrctactcatagcatttgctctactgtgacatagcctgtaacctattttgctgaagaaaagaaactaatgaaacaagtttagtccccagcaaggccttccctctaatatgatcccctgatgcgtaaacacatacgctcccagagtttaatcctggtgagtagcaggccctctggtaaagcatctgcaatatcagatgacagtccctgctagatttccgtgtaggtctgttccgcatcttcccgtgtcgttctcctttttgtcctgcgattgagaacagcacagccttccaatccaagactgttccttatgaaaaatgaagcaccaagtgagatctcactcctctgtcggggcatttggaagcttgtgtttctttgcagaaattgctgcctgatagctttttcactggcaacagggagcaatttggcatcatatataatcctggattactgacttgattaatatttcatggtgtctattagtcrtttacatttatagaaacgtgagtcatgaaaaattaaagttttaattgccttgagtgtctttccttttgctttctttactccccctcctccttcttcttctttttggttagagaatttttctcttagctgagctgtctttcaagtcttcgtaccagagttactcaaaagaatcaggaaatttggagattcagtttgaggacagattgtgtgcagcaagacaataagacaatgtcaggaggagtataaaataataaatagcattcttcagctcaagggcaaggcccgggaaaaaggaaatgatccgatgtatcccttttctttttcagcatggcaactttttaccaggaaacaagatttaatccgtaactgcagaatttcagacatgaggacatcccaacattacagatcatgaaaaatgatacacagggatagcctgctcctgtgcattggtttctgttagtggcagttgtctttgttttcttttgtttttgttttgcactgattaggcatttcagaggtgtcttaagccacagacatccaatatggaagagccggaacagtagctggacagattagcccacttctgagagtctcctggggaactaacccttgtaattggacttcttggacaacaaattcaggcttactcagtgttgccactcttttttttttttttttttttttttgagatggaatctcgctgtgttactcaggctggagtgtaatggcacgatctcagcgcactgcaaccttcacctcccaggtttgagctattctcatgcctcggcttcacaagtagctggaattataggcacgcaccaccatgcatggctatttcttgtatttttaatagagacagggtctcaccatgttggccaggctggtctcgaacgcctgacttcaagtgatctgcccacctcagcctcccaaagtgcttggattacaggtgtaagccgtcgtccccggcccccagtgttgccactcttttgataaataaatgtatggtctttggtgttctgtacctctgtcatataactgctcctctttattggggcaaggggatttacttgtatttgactcagtgatttcaaataaatgcttgacttcagattcttggatcagtctctctgagggtgccttgtcaggtgaggttggcaattgtggggatttgcaaagtggagcatttggttccagtttcagaggacatcaagtggatgagagatgggctgctggggttaagggaagaagaggcacatttcgctcttgtagaaaggcctagaaaccaggctggaagggtaagtaacgtagaaggcaaaggtcagtcaggcggaaggcatgtgcttgtgcggcaggcagatgtatgaaaagtgatcttctatcctgaatattagaacaactttctcagggaaatctatgaatctcccatttaattgctaattaaacaaaaatatagcattttccaaagactatttgatttataattatgataaagtatatattaaatgaaaataattgttttatgtcacttcagtttaaaccatgtaaccatgaaacttaattgaaaaatgaacaattcttctaacctctaaatgaagcaaagtattatcaaccaaatttacagcaataggaaatacttgcaactgtgtgttatgtaagatttgctatgtgttgtcacagatttatgacaccagcaactyaatactgtgaaagtttcctagaggatagtatagatatgtagaataagtgaaccacatattttgtctcaaggattaatttcttttcaagccacatcagatttgcatgaatgtgcttatattaagcagttttttcatgttgttaattctcagtattccacaaaactaaaaaatgtaggtcatacctattacagatagtttattttagcatgtcacctatactgttacttaataattccttgactatattttcataatatagtacagtatttaacaaagaggtgaaagtacacctctagaacattagcatttcacttcttggttagttcaaatgatttcatcatctgaattccttgagatatataaagcaagtttgtcctttaaatgagctactggcaggaacttcgtggaactgtgaaatgagcagtgcaaaataattcattgtgaaaatgaaggaagcaagtatgtagaaaacacactctagatttttaaggaactgaattttgttactattatgcaaatgaggatctgatacatgtattattattttttacagaacattgccagagatggtatgcctggtctttgccgtataatggtgagttctagctgttagctacttcatagtcattacagatctcacaccagtgaatgagacagtcatatcacttgttgggattctctgttttctgcaaataaaggcagtcttccttacacaatcgctgggtcccagttattataatggcttaggagagttatcaaaaaaaaaaaaaatgaaggaacacaaagatagcacttgcaaaagagaatcaagaaagctattgccttccaggcacttggctgttctgaggacagagccctgtgtaatgctaggtgtgcatgagtctatctgcagcgagggaaagcgtcccacaccacgataactcaagagacagtgactctagtagggccattcatgaaaacatacagatacactactttattagaaaataaagcccccaaatccagaataacaaaacacaaaagcaaagaatcaacaggagcaacaaaaactggccatagcagcaagtttcaatagatgccccaaagcaaagccaagccattaatatggcctccttacctcctctgtctccttctctgataatgctcacagcatgggaagcagcttgggttggaaagaggacacatcaaatctgttttctctcttctggtgaattttcagtcctgacaagattcccaggacagtacttccagtgcttaaaatgagtgcaagctatttggaagtataactccgtctctactgttttcgaaaaacaatgttttgatgggaggggttgtttttatttttgagacagagtcttgctctgtgacccaagctggagtgcagtggtgcgatctcggctcactgcaacctccgcctcccgggttcaagtgattctcctgagttgttgggattatagtcgcatgccaccacgcccaactaacttttgtatttttagtagaaatgggatttcgccttcttgcctaggctggtcttgaactgctgacctcaggttatctgcccacctcaagctcccaaagtgttgggattacaggcgtgagccaccacgcccggtggaaaaccaatgtaacaagaattaagtttagaagcacacaaatacatgtctgcacccaaacacacacacacacgacaaaattgagctagaataactagtcaggctgtgtttgttagcagactgaaaaaaaaatacaaaggagaaaaaatgattttaatagagttaagatatttccttattactttgatttccaatgtatggactcatgaaagtggtcaaacttccacaatattgctgacatttatatgagaattttcaggagttcttttacttcagtataaatgttggcactgtcaggttgttcacttggaagatcacaaaatgtcgtaggaacatgcagaggttcgctcagaaaatcaattacagcgtatctgtagtacaaacagaaagatgaccttggcatctgccaaaaaggaaaaataaataaataaataaaaggaaaggcaatttrcttcccacaaaaacctttgtacagtgtgyctccgtggcttccaaaaagtaaagccccaaacaaacaaacaaacaaagtttctgcacagggactaaagaatggtttgctatagtgagtgaggggagggagttgccaagtgaaagtgccatgctttgcagtcatacttagccaactcagagccacggcaagatgaggaatcccgaacaatgttgaccttccagtgggagaaaaatcaagagctcagctcagcttgacaggtgaagtcgcctgggtttctgggtggggtggggacttggagaacttttctgtctagctaaaggattgtaaatgcaccaatcagtgctctgtgtctagctaaaggtttgtaaacgcaccaatcagcactctgtaaaaacggaccaatcagcactctgtaaaatgggccaatcagctctctgtaaaatggrccaatcagctctctgtaaaatggaccaatcagcaggatgtgggtggggccaaataagggaataaaagcaggccacctgaacgccctgggacagctgtttggactttgtgagtgtgttgttgttttgctctttgcaataaatcttgttgctggtcactctttgggtctgcactgcttttagragctgtaacactctccaggaaggtcgcagcttcactcctgaagccagtgagaccaygaacccaccagaaggaacgaacaactctggacttttatgagctgtaacactcaccgggaaagtctgcagcttcactcttgaagccagtgagaccatgaacccaccaggagaaaggaataactctggaagtgccgccttcatgagctgtaacactcaccaagaaggtctctggcttctcycctgaagccagcaagaccactaacccaccaggaagaacaactgtggatgctccatctgtgagagctgtagtactcacggcraagatctgcagcttcacttctgaagtcagtgagaccacacatccaccagaaggaagaatctccaaacacatctgaacatgtaaggaaacaaactcagacacaccatctttaagaaccttaacactgaccgcaagtgttcacggcttcattcttgaagtcagccagaccaagaacccacgggaaggaaccaattctggacacaagcttagctcagcagctgccccaaaggcatggacctgagaagttcctccccyccatcagggccagtcatacccacctcagaccagtccacttccacctcagggaatctgggggccttagtctgtttcagctgcgttaacaaagtgcttcaggggggcgctttacaaattgtctgctagttatggagattaaaagatcaatgtgtgggcagaattttttcttttgaaatttggatyctgggttgcagatggatgttttttscctgtgagcttgcatggtcaccccctgcatgtgtctgcttcttggcaggatgtcagaagtgtttgaaccagaataatttcatcttgcrtgggggctgggtaaaataaggctgagatctactgggctacgttcccaggagattaggcattctaagtctcagggtgagacagcaggtcagcacaagatataggccatgaagaccttgctgataaaacaggtcatggtaaagaagctggccaaaacccactgaaaccaagatggcaatgaaagtgaccccttgccatcctcgctgctcattgtacgctarttatgatgcattagtatgctaaaaagacactccatcagtgccagcacagtttacagatgacatggcaacgtcaggaagttaccctaaatggtctaaaaaggggaggaaccctcagttctgggaattacccaccccttttcccaaagatctcatgaataatccatccttttagtatataatcaagaaataactataaatatggtcgaccagtggccctcggggctgctctgcctatggagtagtcattcttttgttcccttactttcttcataaacttgctttcacttaatggacttagaattctttcttacgcaagatccaagaaccttctgttagggtctagatcaggacccctttaccataacaagaacagctgtcttaatggactagggcccaccctaatgacctcattttaacttatttcatctttaaagactgcctccaaatagtcgcatgctgaggtcatatgaatttggaaggacaccattagcccatcatgctggggtagtagacttgattttctatcccttcctactgttgttttcaaccattgtttttaaagctatccatatcatacttgaaattcaaatgctattcagcattccgtccctgacctgtccctgctattgcctctccccacacaagacgaaaacaagttcaactcttttcattctggggtttagctcctgttcagaaaacrtgctccatgttttcactttagtgtagcttctactgactttctactctacmaaataaggatttaattctcttatactttcttcactcacttttactcttcctcaatctcctgataaagttayagcacaattttaaagcttaratcaagattcaacatgtgtgttctatatgattgcaaatattcttcacaactgggtctagtagaacaatagagtcatttcttgtacttagatttttttttcctggaattaatcagtgttgtttcgctttttaaatagrtgttaattgcaggtgtccttcctggagccctgcttcctgctccatccacaggggtcgctttcccacctgctgcgtgggaaatcctggaggaagagcgagggggagagatgtggcaaaygttgacacacgaggttccgtgcatgtgtgggttggagttatccctcttatcttgctattttttgagttattgattagctaatgagccatggctcatgactccttaattctccaattctttttgttgttgttgttgtttattttaattctccaattatttagcctagggcagagttatatacactttttctgtaaaggtccacatagtatcttttagatttcctcagycagctgtctctgttgtaacaacttaactgtgctgttgtggtgtgaaaacaacgcatgccaatgatgagcatatttatgttccaatacaactttactcacaaaacatacctgtgggcaagatttggccagtataccatcattagctgatccctggcccataaaagggtgcttttaaatttttctattgacatgattccattggcagagaaaagtgggtttgtgcccgcagggtctctagcgggttacctggggaagcttactagaagcataagacagctttgaaatctcacgtatccacaaatttagacaaagtttgacaaagttgagttgttcttcataactcagtgccctgctgattaaggagggtagagagggttaaagacaactcagatgaggttgggggtctctgggaagctttttgcccaggacccctcttcttgtttagctagagtacttggcttggccatccagcaaatcaaaggtcgtattttcaagttgccatrgaatctacggctgaaaggagacaaacatggtaatctatttactgactttcttgccactgttccctgtttagatttttctttgagccaatgacatcctaaaaggtaaaacagcaatgaggtttagacagaacaaagccctgtggacccacagcaaagcctcacccttcagaaagatgatgcccctgcactctggccaccttgagggcaacacggaaatggtcacaagtagaaaaaattgtgtttacagctgtgtgttctgtagtcctatgagagagagaaaacagtgggcccaaatggagaagaaagggctgcctcatccctgcacagcccttggtgttgtttcattttatcctaagactcatctcatttcaactcagcaggctggggtttggggctgtgttgtaactaggactcttttgcttccaaacacaacaagagctacttgaactcacaggaattagccataatttttcaaatgacaaaaactgaatgtcttccctgaaagagagagccgcagcaggagccagctttgctggaaggaattgactggagtgttttcttcattctgaatccgctttccctgcctgtccccagcagatgtgggccagccttatggaaagactcattctagatgagtgggattctaagaagcaagtacaagcggattgccaccccatcgtcttgtaaggcagctggcctggaaaattcagtcccaaaaggcagctgtgacacagctgtgaggttcttatcaccacttcaccaacctctaatcacaggctcagaattagagcaaacgggacaatcagtgtgatgagagagggagaagaagacctgtgacccagctaccaagaacccttttctacccccaatttgccctccagatggattcaactctctagggcaaaacaccctctttctgggtttctgggacctgtgggaaggaatatggggggcttctaccgcacagggtctaactttaagccaatttcatctgaatcccaaaggatgaaacctctcttctgacatcaggaaagcgacgatatttcagcctaggcacactaatctggccgttgagagatgttttggaatgaacttttccaaatagtatcttccacaaaggaaggcagctaagatttgaggccagattccttgaaagtgccattgttactcctctaccctgctgggacataaggtagcaggaggaggcattagatgcagatgggtgcagcatccacagagcaggctgagtgagcctsttggttttagggctctggatgcagctgtgggaaccactccaacaactgtgtcctccacataggctccctggaaaaaggtgcagggtataggctgcaccacaagcaggcagacacatttttattatagaatcaaatggatgtaacattttaactttgcagggctactttgcagttcatgaaataaaacctgtgcacagacattatcttcccaacaatctttcattggaaatttttttttaatttttataaatttttgtgggtacatagtaggtgtatacatttatggggtacatgamatgttttgatacaggcatgaaatgtgaaataagcacatcatggagratagtgtatccatcccctcaagcatttatcctttgagttgcaaataatcgaattacattattaaagttattaaaaaatatgcaattaagaccgggcgtggtggstcatgcctgtaatcccagcaytttgggaagccaaggtgggcagataacttgagctcaggagtttgagaccagcctgggcaacatggcaaaaccctgtctctacagaaaatacaaaaatttgccatgcgtggtggcacgtgcctgtagtcgcagcttcttgggaggctgaggtgggaggattccttgagcctaggaggcggaggttgcagtgagccaaaatcatgccactgcactccagcctgggtgacagagtgagatcctgtctctctctcttctctctctatatatatacacacagacacatatatatgtgtgtgcatatatatctatatatatgtatatatgtgtgtatatatgtttacatatgtatatatatacacacacaagtatgttattattgactatagtcaccctattgtgctatcaaatagtaagtcttttttttttgagatggagtcttgctctgtcgcccaggctggcgtgcagtggcgtgatcttggctcactgccagctccgcctcctgggttcatgccattctcctgcctcctcctcccgagtagctgggtctacgggtgtccgccaccatgcctggctaatttttttttggtatttttagtagagatggagtttcaccatgttagccaggatggtctcaatctcctgacctcatgatccgcccaccttagtctcccaaagtgttgagattacaggcgtgagccactgcgcccggccaatagtaggtcttattcattttttttttggacccattaaccatccccacctcccctcaatcccccaatacccttcccagcctctggtaaccttctactctctaagtttatgaattcaattgatttgatttttagatctcacaaatatgtgagaacatgtgatgtttgtctttctgtgcctggcttgtttcacttaacataatgatctccagttccatccatgttgttgcaaatgacaggataggctgaatagtactccattgtgtatctggtaccacattttctttatccatttatctgttgatggacacagagtttgcttccaaatcttagcttttgtaaacagtggtgcaacaaacatagtgcagatatctcttcgatataccgatttcctttcttttgggtatatacctagcagtgggattgctggatcatatggtagctcaacttttagttttttgaggaacctccaaactgttctctgtagtgtttgtactaatttatatccccaccaacagtgtatgagggttcccttttctccacaccctcatcagcatttgttattattgcctgtcttttggataaaagccattttaactggggtgagatgatatctcattgcagtttagattttatttctctgatgatccgtgatgttgagcaccttttcatatgcctgtttgctatttggatgtcttcttttgagaaatgtctatttaaatcttttgcacattttttatcaaattattagactttttcctatagtcttcccgacaatcttgtgaggtgagtaaagtatggatttgacaagataacaaaagacgttgtagctatgccaacatcacaccttttgtgattgctgggagcaccgaggttccctgtcaatcttcctgaagcaggaaatgaggtgggccttgggacttggggcggaagggccttgtgctggatgctggaggattggagggcagaggaggcagggaggggcagcttgaacagcctgtgctaacacagggcctgagagggagccaccactgaactgccttcttttcttgctaaaagagaggtgatggtcaattttttgttaatctcaaggtgaagaaattgtaatatgaaagactagtgataagcattagaataagttaatcattaaattaaggttgcagcygggcacggtggctcacgcctgtaatcccagcactttgggaggccagggcaggcaratcacgagggcaggagttcgagaccatcctggctaacacggtgaaatcccatctcttctaaaaatacaaaaaattagccaggtgtggtggcacgcccctgtagtaccagctactcaggaggctgaggcaggagaattgcttgaacccgggaagggaggttgcagtgtgcagagatggtgtcactgcactccagcctgggaaaaagagtaagactgtctcaaaaaaaaaaaaaaaaattaaggttgcatcattattatacatagagtaatatgcttgaataaaaatgtaaaaaatatctttcaactgggagagatctaaatgagggaagccacttcatacgtatttgttgttcacctaccatgtgtctggcactattctgggtgcttgggatactgcagtgagcaaaacagatctcttattttgtggagcctacattctagaatttaaaaatagactataaaccacgattacaataagtaaattctttagaatgtttgaaagtgatcattgatagggagatattaggttgatgcaaaagcaatcacagtttctgccatgacttttaatggcaaaactgcgattacttttgcaccaacctaataaaaaacaaaatgcagacacaacaggagtcccaggaagggggaggagagcgaagactccagttgtaactaggaggccagggcaggccactctgagagacacctgcccccagacttgaaggagagaagggagttcatctgcagacatctgccgtgctccggtctgagagaatagccggcccacaggcctggagcttcgtgtccctggaatgcttggtggcctgtgctgctggtggcctcccacagtgagggagggacagcagcaggtcacctttcaatgtcagaggggcagccacagggtgagatcataacgctcttaraagtcattgtgaaaacgtggcttttgctctgagtgaaaggtggaggctttagaggtctctgagcagagggttagaatcatttcactttctcattatatccttctggctgctgccttcagtagggtgagaaactggaggccagatgagggacagacaatgtggctggggctggccggtagcaatggatgtgatgaccggtgcttagatactgcatgtgctttgaaggctttgaaggtagaaacaacagaatttcccccaaggatcagatgtggagtgtgacagtaaaaatggaggcaaggggccgggcgtggtggctcatgcctgtaatcccagcactttgggaggccaaggcaggcagatcatgaggtcaggagatcgagatcatcctggctaacatggtgaaaccccgtctctactaaaaatacaaaaaactagccaggcgtgatggcacacacctgtagtctcagctattcgggaggctgaggcaggagaatcgcttgaacccaggaggtggacattgcagtgaaccgagatcgcaccactgcactccagcctggacgacagagtaagactccatctcaaaaaaaaaaaaaaaaagacaaggaagagataagagttttttggcctgaggaagtgaaagggcagaaatgtcatgaactgagacagagacagttgtgagcggagcacatttttagaggaagaacaggtttgagacctattaacttggcgatgtctacatgttgtgttagatatatgtggcgatgtgttgagcacatgagaatctggagcttgggaaagaggtttgggctggagttgcagcttgtgggtggttggtgtgtagatgatttgtaaagcccagagtctgcattggttcaccaagaagcaagtacagatggagaacagaaaggaataactttcaagagagcataaaaatagactgaaacattacatatttcagatgcaaattttaaaaaaaatacatgttttttgttaatcaccctacaaatgcaaagcaatcccaatgatgtttatgagctctacaagaaggaccccttttacaacaataaaatcccttatttttattgttactgttttttggttgcttactatttatcagttcttggatgtactaagtgtcttgcatgcattatctcatgtgattcctcaacaatgctatgaaaaggcactatcattatcccctatttatagatgaggaaattgaagcacagagatttagtaacttgcctaaagtcccatagtttacttgaaaggaataaatataactaagaaatgtgaaagaggtagaacaataggaggaaacttaatctactttatatcaaagtgtattctagctactgtcattaaaatagtggaacattagtgaaatgtatgtttgggaatttagaatatggtaaagagcgtgttctgtatcattgaagatgaactatgttggaatagttggatatctgctgggaaaaacattaaggattcctgttccctgccagtggcagccatgaaagggcactgctatgcttgcccccgtgacagagggtgtagttccctgataggtcccagctgcagccccctgggtcacctgcagcactggaggtgaggccatgcttctcccagacagccggcccttgaggacacagtgggggaacttgagcctgctaattcctgtccctggcctgggtctcctctgcaggctgtctttgctctaacactccctgtggcctggctgaggctttctcagaggctgctccacagtccaaggctctctctcctttcttccccttctcctttcatagatatccgaccttcctcatagtctgaagtctttccctgcttcctcctgcttcttctccttttattgttcccaggcattatccccaataaatctcttgcatttttaaccccaayttcatgattgtaccccagaagacttaaactgaccacccctgtatgcagacatgctggagaaacagaagagctgcgtgtagaaagtaaaggatgcatgtacaactgcatgtacatatacatgtggctgcatgtacaactatgaggagaaaataatcaggaatatgtctataatgattggggtagctctctttaaggaagagcaaaatctgaaagcatgatagataacatgggatagttagttatgtggcaatcaaatattactgtcctgcaacagaaaccatacataaaattgactacaaatagggggaaattgggagttgttgttcaaggggtatggggttttgaaaaaattctagagctctattgcacaacaatgtgaatatatgtaatactactgaactgtacacttaaacatagttaagatggtaaatttaatgttatgtgttttctttttaccacaatagaaataaataaatacatatcaaggaaaagcagagaaaagtaccaattaagtgaaagtattgagtatttttaggaaacacattctcttggccaggcatggtggctcatgcctgtatatcccagcactttgggaggctgaggtaggaggatcacttgagcctggggagcagaggttgcagtgagccaagatcatgccagtgcagtccagcctgggtgacagagagagagaccctgtcttaaaaaaaagaaaagaaacatattcttatcattactgaagaatgccgttaatataccctctccctcctcaaaaaaaaaaaaaacaacaaaatatgagcttttcattttcatttcatactgacctggctgaaggctctcagctgtaacctacagaaatgcttctggccagggggctgggactgcaggcatctgtggccatgtcacagactcgctttatctcctgaagggacagactgaagagccctcaagtcacacttgagtagactacaactagaatcaagccaacttttgacatttgaatggtgatacttagcctgcagcttcctctacatgccaggccctatactcgggccttctgcacgggttgtctgcttgatcttcagaccctggcagacactggatagctgcttaccaaactcatttccctcttctcttgagcacacaaaccctgtgctcttcctttgggaagatccaggagatcttccttaaaaatctactagagaagagcttcagaaaaccaaaatgtctaaagggacatccacataagaactggtggtgtgtgttcaacatatggtctcttgtagaactaagatgaaatgtgggctgaaagggacgtacataatgtgtaatgccccaaagctcatctggtgtggacatagcaccaatatgaaaaaaatgggacaaggaaagaatgatggaagctatatgcaaaaagaaaatttaactgctctcaagaatcatatagatgctgtagattggtattgttattctgagactgttgtgtgtgtgctttgggataaagtaaatgagtcatcgtgggatattctaatcccatcatttcctgggtcattgagatcaagaattattgatgtagaagaaaggagataaaaatgtaacattaargcaatgaagtaaaaaaaccctgttgccctaaatttgaattggaagtatcagtgtgatggtattttaacttttcaaaaatataattttctagctctgtctagtgaagaggcctagaaacaatgattaattctgagtagcagtgacatctctgatacccagattgtgggcttgaaatactatttctcactaaaataaacagagcrtcttgggagaaatggccagttgcatgtctgggtcagaaatgtacaaggtgagcctagagcctctgtcatatcaggcagtgagaaagctaccaaagaccagtggaattgtgccccaaagcactcaggagccaacctgaagaggttcccaggctaaagatgggcaatttgaaagccaacaagaataataattaaaatagatcaaaacccgtcaaatgtgtttacatatgcaagttcataatgatatttttaaaagcagatggtcaccttcatagcatgatagagaaataattcattatcttgaaaagtagtaaataaagggaaagaatgaagcatttatcttgcctttcctgtatgaaaggtaccatccactgggtggccaaattgtagatgagagaaaatatctcttcataaaagtatttaactaattaaataagaaactatagaattagattgtcacccttttagagtccttaatgagctaatggatccagtcattgacatcaatatcagctgtggccaacagcatgagttggaaggggcagaaagagagagagagagagggatgtaaaagaagatggaggaggaggaagaagagaagaggagaaggaggaggaagaggacgaggagraagaggaggaagagsgaagaagaatgtaggaggaagaggaggaggtgggagggaragaacacagacattatgtgcttcccagtgaaagaacataccaccacctgtaatcttgccaaaggggttggaaatgagacagataaaacctctgatttcagctgtcaattttaaggaaatacagagctcagaagaacacactgaactgtaccatgagtacccaatcagcacaactcagactgtgaggaactctacgtgttaagtgtccctgtattttagaaaaataaaggagaaatctgtaaatctaatgatacttaaaagacataacaaatggttttaaacagcaagcctaaactatagtgaccaggaatgcacacttaggtgatagaactgtaaagaaacaccaggaagtgatagctctaaaagtcaggagagcatttacttctagggaaagggaaagagttgagggtgggacaatggggagaaggcttctggggtgcctggcgaagttctgtttcatgacttggtagtgattaaggatgttcaccttataactcataaagctatacacttattttatctgggtttctatacagtcatccctcagtattggagaattggttccagttttcccatggataccaaaatttgcagacactcaagtccctcatataggcatacactggagatactgcaagttcagttccagaccaccacaataaagtgagtatcacaataaagtgaattgtgaattttttggttttccagtacatataaaagttatgtttacactacactgtagactactaagtgtgcaatagcattatgtctaaagaatgtacatatactttaattttaaaatattgttaaaaatgctaatgatcaaccgagatttcagcaagttgtaatctttttgctgctggagggtcttgccttgctgttgatggctgctgataatcagggtggtggttgctgaaggctagggtggctgtggcaacttttttttttttttgagacagagtctcgctctgtcagcaggctggagtgcagtggcgcaatctaggctcactgcaacctccgcctcctgggttcaagcgattctcgtgcctcaacctcccgagtagctggaattacaggcacgtgccaccacacccagctaatttttgtatttttagtagagacagggttttaccatgttggccaagatggtcttgatctcctgaccttgtggtctgcctgcctcggcctcccaaagtgctgggattacaggtgtgagccaccgcgccaggccaactgtggcaatttaaaaaaataagacaacattcaagtttaccacattcattgactttttctttcatgaaagatttatctgtggcatgggctgctgtttgatagcattttacccagctgctgctttatccactaagtttatgttttattctaaatccttatttgccatttcaacaatgtttgtggcattttcactaggaatagattccatctcaagaaacgactttctttgctcatctatcagaagcaactcgtcatcagtttgaagattcatcatgagattgcagcaagtcagtcaattcttcaggctccacttctagttctcttggtgtttcyaccacatctgcagttgcttcctcccctgaggtcttgaacccctcaaagtcacccatgaaagttgtaatcaacttcttccaaactcctgttagtgctgagattttgacctcctcctgtgaatcacgawtgttctaatggcatctagaatggtgaatcctttccagaaggtttcaattgaccttgcccagattcctcagaggaatctctatctatggtagcgatagccttactgaatgtgtttcttaaataatactacttgaaggtcaaaatgactcctggatccatgggctagagaaaggatattgttttagagacaggaaaacaacattaatctcctgtacatttccataagagctcttgggtgaccaggtgcattgtcaatgaacagtaatattttcaaaggaatctttctttctgagcagtagttcccagcagtgggcttaaaatattcagtaaaccatgctgaaacagacgtgctgtcatctaggctttgttgttctatttctagaacacaggcagagtagatttagcrtaattctcaagggctctagaatagtaaatgagcattggcttcagcttaaagtagccagctgcgactcctaattacctcctaataagcgagtcagcctgtgctttgaagttttgaagccaagtgttgacttctcctttctagctataaaaattctagattgcattttcttccaataggaggctatttaatctacattaaaaatgtattgtttagtgtagccaccttcaccaatgatctcagctagatcttctggataacttgctgcagctcctacatcagcacttgctgctttgccattttatgttgtagaaatggcttctttcctgaacctcatgaaccaacctctgctagctccaaacattttttccgcagcttcgtcacctctcccagccttgaattgaagagagttagagccttgctctgggttagactttggcttaagggaatattgtggcagatttgattttctatccaaaccactcaaactttatccatatcaacaataaggctgtttcactttacttttaattttcttcaagaacttttcctttgcattcacaacttggttaactggtataagaggcatagctttcagtctgtcttggctttggacatgccttcctcattaagcttaatcatttctagctttttatttaaagtgagaaacatgtgactcttcctttcacgtgaacacttagaggccatcgtagggttattaattggcctaatttcaatattgttgtgtctcagagactagggatacccaaggagagggagagagatggggaacggccagttggtggaacagtcagaacacacacaacatttatggattatgttctccatcttatatgggtgcggttcatggcaccccaaaacagttacaatagtaacatcaaaggccactcatcacagatcaacataaaatgtataataataakgaaaaagtttgaaatattatgagaattaacaaaaggtgacacagagacacgaagtgagcacatgctgttggaaaaatgccgccaatagacgtgcttgktgcagctgtgccacaaaccttcagtttgtcagaaatacagtatctgagaagtgtaataaagcaaagcacaataaaatgagatagattgtataaaatggcatactctttgcatataatctacacaaatcgtcccatacactttaaatcatctctaggttactcataatacctaatataaagcaaatgctatgtaagtagttgtcatactctattgttctttaatttgtattatttttattgtattgttattttttatttttatatcttccaaatactttcaacctgtggttggttgaatctcagatgtgaactgactgtatgtgttttgacaattttttaaaagggcagagaaaagagagaattataaagcctccccgcaccccccccacacaacacagcaggacttccattcattgcaacgatggtctcagcatttagaggttatgaatggtatctggtgtcttctgagaacattttaatatttccaggatatttttagatattttttgtatgaactgcgttgtcttgcattccaatatgttaaaaagtagtgattccaagtatggtgtgttacagaggggctggcaaccaaggtctctcttccagctcttacgggcgatattgcctggtagcagcttgaggaatgcacgttccagggagtcaccacctttccacaatgccctttgttttcctctcgcccagatctcactaactgtatgctaacgaaatgacaatatggcacagctcgagaggatctcagaattcactcagtccagggttttaaaaatgtgccccaccacacagagaccacctgcagcagcatctctggggaccattaatagtgcagatggcccctccaggcctgctgaaggaggctgcctgggggaggggcttggattcacctttacaggagctccctaagcaactctgacacttactcaagtttgatatctaggtttaatccaataggtctaatccatcccctcttttatcaggtgaggaggtggaatctcagagaggaggaggggctcactaaattgtcacgcagcaaattggcacaaacctggactggaacccgggtctcctatgcctagttctccacccttccagtttgtttcctcattcccttcttcactcaaacacaggagctaccacaatgtgccacccctggataaagctcaggagtacaattctgagtgaagtagaattagtccctgcccttacagtgcttaccatctaacaggtgaggccaacatgaatttttgaaatccccataatgtataactacagcccatgatgtggtctgagaaagtgcagggcatctcaccctgtgcaggtggacagggctgccatccacagggaggtgcccctagagctgagatgtggagaggcagaggctacatggggacccttccaaccagaggggccagctctgaggtcacaggaaatacagctccatcgagcaactcagagaagcctaaggtagcctaggacacttaaggccccaggttgaaaggacttgaaggtggtgttccttgtgcactcctggaattacctgtccccatctgtctctaggacagcaattctgaaacccagctgtgcatcagaatcactttgggaaatttacaatcacttccggaactttacaatcacttcctgccccagctgagcatcgtgattcagcaggtctggggtagatcccaggaatgtgtgtttattctgatgtgcaaccaagtctgggaacttctggcctgggagatatcagaaaattggaaatgattggggttaagtggtgcactggctttgaattccttctcagaccctcagtgtgctcatttgtcaagtgaaaatagggaagcaaacctgttttatgggcttgcagcagggttgtaccagatatctgcaaagaaccaaaatggggcttggtaccttggtacatgctcaatacatagtgastgtaattaaatccagacatctggtttctgagagagctatttttagaaagaaaaatatttttatcattctgcaaaatttacaatggtttttgggaaatcmtacattgcacccctcccaacctggggacaattcttattccttccacactccacactccccacccccaccccactgagggcaggagatttagggtcaagkttgctttaaatgtstaccctcccccaacaccacccccagcaatgctctattcccagctgcccatatgggtgaataatcttttccctaaaaatagagagcaggcacaagctccattgagattgaatttcacctcttgtttttaaggctgtcaatctggcaaccagtactgaggcgaaattatctttttgaaaatcttaaatgatgagaggaaggcctctggggtatgaattcttggcattggaacagttatatggcagaatctccagatctgaaaaattgagcaagattatttgaaccacaactatttacgcttgcaaaatcagcgtagactcgtggactggttcagctccaaatagcacaacgaatgaacagagagggaggacaggggcccagagtttgctttgagatattgtcaaagttgtttcaggtctagtgtttagtgccttcattctaggagagaataaaagagagtataaaattagaagggagatggagaagacacgactgatggggagaggggctgaaaagcctaaagaaaaaatgggaagtctgagattggggtttgcttgtcccttctctctgtgagtggccccaggcttctcccctacctaggcttttgtttctttttttctttttcttttcttttttggcagggtctcgctctgtcacccaggctggagtagctgggattataggcgtgtaccaccacgcccggctaacttttgtatttttaatagagacggcatattactgtgytggccaggctggtctcgaactcctggcctcaagttatcctcccaccgcagcctcccaaagtgctaggattacaggcataagccactgtgcccggccctgatgctctaggcttctctgtgtgggacccctcttccaggtcagcttcatccctaagtgtaggctgagttccttcctttattctctcaaatcataattagcacaagacagttgtgtttaaccaactttattgaagccttagggtgatgtaagagaattacaatgcagaagaggaaaactgaaacgcttgactgttagattccacccagtgcccctacagactgtcagccacatccagccacaaggggctccctgctggctgtcttacttagctctatcctgctgccatattgcattggttcttaccttccctgaactggaagctacttctccagctccttcttatccaactccaggactctcctactgactctctcatctattccagccagatacagtttacaccacaataatctctgtaagatcttcctgagcccaggaaaatagactttgacattataaacagcatacttcacatctcagcctgaaacacctgcatataatttgcttcctgggttcaggcttccctgagagcagtaggtagataggtgcttgcttctacctgggagcatgaccccctcatgctccagccctgattcgaaccacaagtgatggtttagaaagatctgaatgaaattggttataggcaattttggagttacaaagaagaatccttagagcaaaaataagttttagttaaataaacaaacctttaaatagttcattggtgaattcatactttatcaaatttgtttgttttgcgaatagtagatggatatcagctaatttaattacataataattacataataaaattcatcgtttgagattcttcagatttaaaaaaaacttacctgggatttcttttggaaatagcagaaaaaagaaaacaaacaagaaaacttgtcattccttaaggacaactctatgttacattttctggacactttttgcatattaccatatttaattaatcaatccaaagtggtaatacatattatactcattttccagttgagaaaattaatataggtatacagtggycaagtaactcatcaaaggctactcaactagaaagtggccaaaccaggattccaagtgctcaccaatcacagtaactgggactaggttgtggtcaccagggaatgcaatggtgggataagccttgagctggtgttttgagagggcacagataatgaatgtttaatgggctctttgatgcccttggaataaagttggtatgtatatctaaaggaattaaacactccagccctgattcgaacccaaacagcatgttctatatggctctgcggtgaactgggagctcactttaaatgtatctggaggaagtcttgactcaaagcagaaagagctctgattggcccaggctcacaagaatggaggcagccctgcttgctggtcttggatgataatctggtgactggctccaggtggtcaagcctatttaaatgtctctctgcagctcagactcttgaggagggcctcatgtggcttttggaagtgytaatgggatggcagatgtggctgcaggtaattataatgcaggctccwgcaaggccttctgcccctccagtcgcagtaagtccttcctcttagtttcactcacatcacaccagtgcaaagttcagtcccttcaccagtttcaaccctacaaaattagaaactcagttgcaccaagcatggcctgagattagccactttagtgactagcaaggggcgatagagtgaaagccactcccactaccctctccttccctgtctcctcccctgtttctctcaggagtgacagacgcctctccttgtccttttcacttctgcaacagtctttggtacttggccatgaacttggggccttactcttcttcccaagggaggatattaaacaatttcttcttccaaaatataatattttcttctgcaagggggagcctgaggaatgacatttctccatctcattacataactgtgcctgggagatttaacaagggccaaggtttttttgaagcccagagatttgattgattttatacaaaaactgagggagtgagagcaaatccatccacaaaaaggttgagaaacatgcgcttgggctgctatttatttagaactgctgatcaggaggttatggctgtgaagaggtttgtgcacrtggcactctctgtcggagtgcatttcactcaagtttcattgcagtttgggataaaggcctgatttcttaacaggaaatccwgggatgccagaattttctcttgtttaaacacagaggtcatttgctgatggtttcctgttttgccttcatttttgatgatctagactttgccaaagaattagttcttatgtcaaaagtccttgcagactgtcatttatygttgtcttttaamttccaagttttgaagtgctactagtcagtggtgggactgaggccacatgggaagtagtttgtcatttctgagttcccagtactcttggtcactggggatcaataagtatctgtcccatctctctcgcccgctcctagcttcccttcccaccaaatcctgaccccaatcctcttttccttccaaaccagttaaagacaaagtaaaatctaccacaacagaaacaaagttcacttctaacattcaaactatttcaaggatttggagatgatgtgaaaatgcatttgactcaggagttgagcagaatgctgaactattttaacaaagtcgggtgcaataggttcattgctgaaagaacctttccatctctggatggaataattrtaacattagctcattttgttaagtgattacaatgcttacatggataatttcattcaatcctctgtgatgggattattcttatccccattttacagctaaggaaacaggtttggagagaataggcaacttggctcaaggttgctcagctagtatgactttagggtcagagtttctgccccaggggtctgctctagcacacacccttgaccgctgagctgcgctgatgctggaggttggtgtccaaggtactcgccttctagtaaagaaagtatagaggaagctcttttttcagtggggatctctgcatttaaattatttcactggaagtagcaggattttttttctctgtcttctgccaagcctgataggtgcttgaaactacattctccatccagcagccagtcggttctaccccacacattccttttctacctcacgccatttgcagttgctgtttcctttgccagaaatgctcttcccccagaggtttgcacagcctgctctgtccattgtcagctcaaatgtctccttcacatagaggcctttgctgacaatcttctgattgatgatcatatttccctgtttatttccctcataagtaattgccctgttcgtttgattttcattcattgttctcccaccaacaggaaggcctttcccatttccactgactcatttcagtgtttggagcagcaaccagtacctagtagatgctcaataaacatttgctgagtgaacaaatgaatgaatgaatgagtgaccataacctcctgattagcagttctaaatacatttgcataagtattaattgttggccagactgaaagctctaggagtatggtatagtgcrttttcaagaggaaacctctccatgtatttcagctcagttaggacacacgcagggcttcagagatcaatgcaggtctttgccacacgcgtaagaaatagcccttcccaatgggagtgtaacttttgcattggaaaatgaatcctctctgagtgccatggcttacacctgtaatcctagcactttgggaggcctaggcgagggattacttgagcccaggagttcaagagcagcctgggcaacatggcaaaaccccttctctgcaaaaaatatgaaacttcaccaggtgtagtgaaggtgtggtggtgcatgtctgtagtcccagtttctcaggaggctgaggtaagaggatcacttgagcccagaaggtggaggttgcagtaccagcctgggtgacagagtgagaccccctctcacagaaaaaaaaaaaaaaaaaaaagttgtgtttttcttaagacatttgctttgttttttgtttctgtttttttgttttgttttgttttgttttgttttttgttttttgagacagagtcttgttctgtctcccaggctgaagtgcagtggtgcaatctcaactcactgcaacttccrcctcctgggttcaagtgattcttgtgcctcagcctcccaaagtgctgggattacaggtgtgagccaccacrcccagcctgttttgtttttagagctgccaatgtttcttaagaaatcctgtaagatgtgaggaggtagagaaaagcaagcacatgagacagtcattgtcatactcagacaygtcagaaccaggtttggactttaggaagcctatctattttttttttttttttttttttttgagatgagatcttcctctgtggcccaggctggagtgcagtgatatgatcagggcccactgcagcctcaacctccctggctcaactgatcctccygcctcagcacccctcaagtagctgggaccacggtcaagcaccaccatgcccagctaattttttattttttgtagagatggggtctcactgtacttcccaggctggaggaagcccatcttggcagtggagtggatgatgacagccagaggtaggtgcttctgggcgctgacaatgagacagagattatgagggaggcagggttgaatttggagacggagtgtacttggtgttaggcctgagcctctggggccatgaggggtggaagagaggtccccttcaatttgctaatcctgtagatgtttttggagtgactcctcctttcctcttcctcattctgaagcctggctctgttattcccctgatagctcacctgtgcccagccgtttccagcccaaagttaacagtgatcacctcctttctcgaaatgcatcagcctgcctctgcttgcattttgggacccctgcatcttcacactgatttcctagtacccttctgcatggagcctgtcctctggtcaggccacctcctcgaagctcaccccagtctctttctgtcaccggcacagctgcctcccatttccccacaccaagccctacttctcccatgaagccacctgtgtccctctcctcatctcgttgccaatctcgctccatgcctctcagagcacacagaagtgctcagacagggattccctcatgtcctgtctcccagtaggccccccttcctgcagctgaaccacactctgtgccttgccccctccgactggctgtgctgtgtccaccctggagcccatcacccctcaccatctcaggacttccctcctgcaattgyccctttccactggaccattccaggcacaccaggcaagctagtatctctaatgtttggataaacttgttcttgctgctcacaaacccccttagtttcttcccccaagttctcagctccccttcacagcataatttcttgaaagaattgactatagttagtcctcatttctcctttccattctctcctcagcccagtccatttgggtttctgttcccacttgtccccaaatcagctcctgccaagatcaccgatggttggcaaatccatttgctactgaaaggtcctcctctgcgacctctcagtgatagtcaacactgccctttccttgaaatgtccctgactccactgcgtggtctccctgctccttcactagatcctccttctccatcccatttgctcaatcgtcttctatttgagttcctaaaggtttatttcctcttcagggctcagttcctgagctgtcatttatctacatgctttcttggataawctcattcaatctacgccttttcttttttttttttctgagacagagtcttgctctgtcacccaggctggagtgcagtggtgtgatctcgactcactgcaacctccacttcccaggttcaagtgattctcctgcctcagcctcccaagtagctaggactacaggtgcccaccacaatgcccagctaattttttttttgtaattttagtagagacggggttttgccatgttggccaggctggtctcgaactcctgaccttgggkggtctgccaactttggcctcccaaaggctggcattacaggcgtgaaccattgtgcccagccaatctatacctttaaataccatcagtttgacagtgactttcacatttgtatctccagctcagctcaaattcatgtctatctactcacttttccaccttgatatccattaggcatatccaatttaacttgtccaaactgaagtattgattttcccaccctccctacacacacttctccagsccatcccatgtggcaccatggcaccattctctacccactaaccttccctcactccttacacctaagcatttcaggattcctattgactcaatctcaaaacatgttttccatctccactgctagcaccctaatccaggccctcccatcactgccctggactatggcaaaggctcttcactggcctccctgactccagctccarcacatccattctctagagaccctccacagtggtattcacagaatacaaaactgatgccactcctgttttaactacccaaaggtttcccattgcacgagaaactttatatcctggcccacagtgccctatatgattcggactctgcttggtaccctgattttccatcattattgcctgtcctttctactccagccacactccccttcattttattcttccagtgcatcaaactcagtcctgactcagggccttggaatttacttgttcctctgcctgggatgcttttcctccacatatactatattaatcatgtttttttattttcgatattttataaaactttgacatctgggggccttgcagacccaggaggaactgccccttgcaaggtgagctaattcctagagatagcaagcaactttccttaaagcatgtatttgatatgcaaaccaaccaatccagagcccatacctcagaactaccctctttgtcaaattctcacagaccaagccaatattccccctgccctaaattgccctgggagtcaggtactggataactagggaccacccctgtagcccagagcctgccgaaattattcaaattatctagtcctaaactctgttagcataccaacctacttctattccttcccacaaaaatcccagtcaaggcttcggcccgcactctcctgagctccttgtgcttcctgactgaccctggtgctgcccatgtggccctgtgtggcagggcctgccccctccttttgggaacaccgagtaataaactctttttcaacgcaattatctcagtgtcaatcacctttctttgcctgatgaaaaccaatcccctgtacattttaaaacatacgtccatggcctattgtcatgacaaggtgcttcctgtcattcaggtctgagcttaaatgcagatttctcagagaaatcttccttgtccatccatctaaagggaccacctggccactctccttcatagcactcaatttcattttcattatagcaycttcacgcatgatgctttatcacttgtttttgtctagttcaccctcctaggatagagaagctgagaggcaggccctgctttgagaggttcacagcccactgttctaaaggaggagctgttcttctcatctcagaatgaggagtcaatcaaaaacaccccaatccatgtgaccaacggtatgtgaccttagccagaattcactcggcctcaaagctgtgagttcaacatagccaataaagagttttaatacagacacattgaagttaagattagaacagcttatctcccaggataggctcttatctctaaagagctagacagctctgtattttaatctcattagatctgtcacattggattcgttacttaccttgtccaggttcagcttattcatctgtaaaatggggttactaatatgaactgcctaactgaattgtgaagatttaatgagacaatgcttttaattcactcrgcacaataaatgctggaaagaatgttagcagttaatagtattgttgttttattcctcaaaagaggatggattatctctsaaatcactgaggtaaagatggaatttttaagaaataatgctgggatgagtggacctccatttggcgaaagcagcacagaggacagtgtgcagcatccrgtgagtcagggggcggtacagcaggaagcaggggagagcggacatgtcaggaaaggaacatccctgtcaccggaaaggagtcccgatccagacccaagagagggcttttttttttttttttttgagacagagtctctctctgtckcccaggctggagtgctagaacgcagtggctcgatctcagctcactgcaagctccgcctcccgggttcacgccattctcctgcctcagcctcccgagtagctgggattacaggcgcccgccaccacgcctggctaattttttgtattttttagtagagacagggtttcactgtgttagccaggatggtctcgatcttctgacctcgtgatcctcccacctcrgcctccccagagtgctgggattacaggcatgagccaccgcacccagtcaagagagggatcttggatctcgcacaacaaagaacttgaggcaagtccataaagtgaaagcaagtttattaagtaaaggaataaaagaatggctactccatagacagagcagccctaagggctgctggttgcccatttttatggttatttcttgatgatatgctaaacaaggggtggattattcatgtctcccctttttagaccatatagggttacttcctgacatcgccatggcatttgtaaactgtcatggagctggtgggagtgtagcagtgaggacgaccagaggtcactctcattgccatcttggttttggtgggttttagccagcttctttactgcaacctgttttatcagcaaggtctttatgacctggaccttgtgccgacctcctgtctcaccctgtgacttagaatgccttaactgtctgggaaggcagcccagtaggtcttagccttattttacctagtccttattcaagatggagttgctctarttcaaacgcctctgacaccccagccacttcagcagccctggatgtctcctatcagattctcctgtggcaccaagcagccttcggtgccaggggcagagcatcccagaggctcagctgggtccactgctggaggcaggggacactggaaatcccagcaccactggcctggcacccactgcctaacagacaaagttggctgtcaaactcagctctatttctaaatacaaatactcctcagtttatgacggggttacatcccaataaatgcaccatgagttataaaaatgatgagtcaraaatacatttaatccatctaacctaccgaacatcatggcttagcctagtttaccttaaacgttctcagaaaacatttgcctacagttcggcaaaattatctaacacaaagccctttttataataaagcaattttttcctttttttctttttttagatggagtctcactctgttgcccaggctggagtgcartggcgcaatctcagctcacttcaacctcctcctcctgagttcaagcaattctcctccttcagcctcctgagtagctgggattacagtcatgtgccaccacgcccagctaatttttgtatttttagtagagatgaagtttcaccatattggccaggctggtctcaaactcctgacctcaagtgatctacctgcctctgccttccgaagtgctgggattacaggcrtgagccactgtgcttggcctttaataaaatattgaatagcttatgtaacttcaacgctgtaccgaaagtgaaaaacagaatggttgtatggatactcgaagtatgatttctactgagcatgtactgcttttgcaccatcataaagctgaaaaatcatctgtggaaacattgtaagtcaagggctgtccctrctgcacaatccgctcagagacctgggagggtgaggccggccagatacagcttttaagccactggttttcagcatgcaggaaactgttccttggcacaaattgctgaggaactgataaccatctgttgccaaggtaaccattcttccaagaaggtcaaacagagaaacaactcagatagtcaatagtgatgtaattttgaacccaccggctatctggcatcaagtcaaaaagcacagccaaaagcccgtacacatttttttctttgcttgcaactttcttaagagttcagacatgggaaccttgtccgcacccccggcctttatagccagagggagcggcagtatttgtcactgtgcctgggaaaaagaggccctttgtggagcaacttgagaaggctcctgtgccagtctccctctcccagcccttgtcaatgctgctgccgaggcgagcccagagaacagcccgtcaactcttttcagggctgggaaagtcaggctttctgtcgccttggctgggctgagggacttggatccctggtcttcagcccaggatttgcaaagagggatgggaaacgtcagacctttcactggttgagaactggggactttcagaactgaagaaaaccttgacactctttgggtgcagtcaccctgctcccccattgatgagaaatggaacctggtgaaagtcacacagctctgggtccagcagtcttgctgccagaggcagaaggtctgagagaatcaagcctcaggcctggcatctmtatttgctggacaacccacggcagcatcccygcctctgtcacatggctctgctgggtagcactgccatgcctgcttytgttatctctcacgctcttcattccacacctccatcagctgcctgggagtctatctgcaacaccactagcagcccagaccttcccagcctgtccagtggggatcggattcctggaagagcaatgacaaactcttcaggatatgacttaagacctgattgtggaaagaggacaggctttgaaatcagctagacaagtgctcaaaatctgaatctgcagtggctcatgcctgtaatctcagcactttgggaggctgaggtgggaggattgcttgagtccaggagttcaagatcagccaggcaacatagtgagaaccccgtctctaccaaagaaaaaaaaaagaaaaggagctgggcatggtggtgcacacctatggtcctagctatgtgggaggctgagtgggggtggattgcttgaacctagaggtcaaggctacagtgagctgtgattggatcactgcactccagcctgggcaayagagagagaaagagagagagagagagagagagaccctgtctcaaaaaaaaaaaaaaaaaaatcggaatctgtcattttcttgtactttatactggtcacgttacttaatcttctgagctttaatggcctcattagtaaaatggagataataatccataccacggaaggatttagggattcaatgagagtctacagagtgcacacggtgttgggtttggcacagggcggtgcccagtaagtggcagctcttccatctgggatcctctatttccccaggcctgtgtctgtggctgctgcagggcccttcacttatgccatttgctgtctgctttacctggaggtcatgggtgtaactttttctcattccaagtaagtgcagctcctcaaatgtttcttgaacaccaacaacggggtccatgttgagtgctgaggatacaggagccactctgctgcagttttgcccctcgggcactcaaggccaaatgagagagaggagcagtaagtcaatcccagagcagtcacttcacaggataggacaggtgacagcragctacaaacatctgcctgggggagtcaggtgagggcttagggggcttcacgatttgagcattgcctaaactgtctcattccaacaggaacctgggtcctattcccatcctaggaatctgggggcctgggtccagagcaaaagcatggagcccaagacacacagacagtgtctgcggggaagcctggatcaagaactcagcgactgtcaactctgggccaagtcccaagaaattcccaagagcccaaggcaggcattcggtgcacttgatttattgaaggggtcctctcaagcccaggggagtgagggaggaaggagaaggcaggggatgcagtctcagctggagccgagcttcagccttcctacagagctccagagcaggaaccgcagcaccgtgtcggctttaccagaagacaaaggggccaggcttttgtaccctgtgccagtcagtcattagctctgggttttggagaaggtggtgggtgtgcctgggtgagccaattcctgctgggctgatgacaattctgtaggggagggcaaccctgagcgccctgagcccacactcctagctcccrgagggtgggtgccccggcccagcacactgtccgggtggaggtttaccccaaggatrgtaggcagaggcagaacttggcgggaacagccacatggaaactagacatagaaggcttgttttgttcttgttgttgttatttgagacagagtctcgccctggcacccaggctggagtgcagtggtaccayttcggctcactgcaacctttgcctctcgggttcaagcgattcttgtgcctcagcctcccgagtagctgggattacaggcattcgccacaagcctggctaattttagtatttctggtagagacagggttttactatgttggccaggctggtctcaaactcctggcttcaagcgattcacctgcctcggcctcccaaagtgctgggattacaggtgcaaaccactgcgcccggccaggatatagaaggttttagaattgcattctcatcttgaattgtccagcttccaaaactgtgacaatttaattgttgtttaagccacccagtctatgggaatttgtgacagagcccaaactgactaagacgactttcttcctaatgttgggagacgcttctcccatggtctctccctctcccatacagcttgtcaagctctgatgtctctttatctggccatttctcaaggttgtgttggaacaagcacctttgggagatgagacagtgtcccttccccagacaatgagcaggctgctgtgggcagttggttcccctggccctgtgtcctctcttaggtgtagcccactgtgggggggggggtgggctcccgtctagacctgcctgcatcaccgctgatggccttggagctcagggagccaaggtgatcatgctgacactctggcttctgctcttgctgtgagtaaggccatcattagtccctgactcaggagtctctcatctyrcagccccatgcaccraggcaggccaactcattagcttacaaggagggaccatctcagctcttcacagcccttggcatccagcattagtcactaccacttccagctgccacagcctatgtatgtgccacagacacatgggaaattcctccctcagcctcttgccgacacccagaatacccacaggtctctttgtctatctcatttctttcctctcccaaaccaagtagtgtttcaggcttcccttcacatcaggtgtcttcacaggaccccttgcccctacctctgtctgaagtggatcctccagcaaagcctacaaagcccttgtgacctacactcactgctcttggtcccaactcagagctcttccccatcggaaactttcactggagcaaagtcaaatgtttctgctccctgaagttgatgccccttgatgctgttctttctgcctggaattatccttcactgtctttgcctcattcttcaagactgatttccagagacacttcctccaggaagcctcccctatggtctagctaactcaatcggcttcccttataccctcattakgtgcccactgcatgttacacacaacagcatcaactagtaccataggtactggccaacttccttgcccttccaatactgtgggctccctagaggcaagaactgtgtattactctccccactatgtgcaatgcctagctggggtggtgttcagaaatctttcttttccttccttccattcttctctctcttttccttccttccttctttctctttcctcttttatccttccttccttccttctttctttccttccttccttccttccatttttcaacagggtcttacgctgtggcccaggctggagtgcagtggcacaatcacagcccactgcagccttgacctcctgggctcaagtgatcctcctgcctcagcctcctgagtagctcagactacaggtgtgcaccaccacaccaggccagaaatatttctagaaagaaaaagaatgaatgaatgcccaccctttgcacaaatacttcacttactaccactggccaaagtgatctcattcctctgaactgccatgggactttgtgacagtctctggggaatgtttcatgtttctcatctccagcctggctttgtgatcctcactcacagcccttgagggtcaaggttgtatctattccttgtttagatggatcttatatcactttggagtttttctggctttcaattttgtaggtgtattattttaaaatcccagaaacctaatccagggatagtaagaagagttatggagtttgttaaattttatttaggttaagggatgaatttccattcagtgctgagcatatgctaatttgcatgtctatttctaacataataaccaaatcaatctcctgggagaagagaagggcattgtgtttttcacgtccctctgtccattcactgtctctgagcaggtttcaggaggtaaattcattcaagattcaacaaatatttattgagtgtctaataacattcctgccccagggacctggatgatgtcccagtcaatgcatcggcagggaatgaagctttgatttttcttatggggcagaagcctgaacagagcctccactgcaacatcaaagtgcaagctgccaagcagctgatctgaaaaatctgagaacccaaagggaccatgaataaacatatgaatggatggatgccttttgacagctccacctagaatgcaatttgccctactccactttctccactcatcagagcacacgtcttccagaatgttcagcagctcagctcagagaagggctctctctaggcagtcacgagggtggaaagtctccaaacagtgggcagaacagcacccgggcaacagtgctgacaatcgcctgtaagaagagagagcagggcttcctttgcaagacaccataaatttctttccaatcttagtttagttccttgggaaagaaagataacttctttgcttattttgtcacttgtgtatttgtgagatggaaaataacattataacgggatgaggagtccagtcatttttctctttctttttttgaaaacagggtcttgctctgttgcccaagcggtagtgcagctgcacatcatagctcactctgcagccttgaaccctcgggctcagtgatcctcccaccttggcctcccgagtagctggaattacaggggtgagccactgtgcccaactgtccagtcatttctcaccacacaccattgagaggttcagtgggttctgtggtctgagatccaacatccaaacaagtggtaaaatttggagaaagggaggtctcagttaggacagtggtatggtgcagtgattaaaagtttggttctcagctgggtgtggtggctcactcctgtaatcccagcactttgggaggccaaggtgggtggaacacctgaggtcaggagttcaagaccagcttggccaacatggtgaaactctgtctctactaaaaatacaaaaaaaattagccgggcatggtggcacatgcctgtagtcccagctactcaggagactgaggcatgagaatcacttgaactggggaggtggatgcagtgagccaagattgtgccactgcactccagcctggccaagagcgaaactccatctcmaaaaaaaaaaaaawtttgatcttaaagtcagacagagaagggctctagtcctactgataccacttatgacttggggtatcatagtgggggaagctgtagatcacytttgagctcatttacctcatctgtaagtcagaaacaataaccctacctgtcattgtgctttabgctggtctcaacactcctaccctgtttgatgcacccctcaaacaggtgtgtggctttctctgatgcacgcccctacgccaaggagaggtgtgctggactttgatctgtgtttgtgtcaggctcctttactaaatagggagcacattgtgggccagtacttggcctcrttcatctctgtatgagggacacgtgatttgtccacaagtgagtgttctctccctcctcttacccccaaccagctcaacmtaattttccctttgtctactcagattttccctctttcctaccctctaaaaaagagtttagtctatactgggcaagatagaaaatgtctgtggaaacctaggtagagggaaacagaacctcaactgcaggaggaaagagagtaagatacagccagagaggctaagttaagctacaggcggaaagatgacagatcctgggaaaagcagagaaggaagacrgtagggaagccaagcaggccaggcatcaggaagtgtttggagggaattgggcaagtaggatgttctggggcatctgctatctgctgaaaagagacaaaagagaagctggaaaggtttggggggttatgaatttgttccccattaatagtctttaaaagatgcaagacggcygggcatggtggctcttgcctgtagtcccagcactttgggaggctgaggcaggaggatcacttgaggctagtaattggagaccagcctgggcaacataataagaccccatctctacaaaaaaatgtaaaaattaggtggcacttacctgtagtccaagctactcatgaggctgaggtgggaggattgcttgagcccaggaagttgaggctgcagtgagccgcaattgctccactgcactccagcctaggtgacagagttagactccttcaaaaaaagaaaaactatgcaaaagaaaaattataatttagttttaattaagtttaattattttgggactgtgtgtttttaaatgtgtctccatacctaaactaagccacatggggccccaaaatgtatctgggttacaccaatctcttcagagcctcggagggtatctgacacataccagatatttcaactggtgagctgaaccarctgtctaatgctggtggcttgggaaatacttaaaaccttttcttgttgtctgagccactcccatcatcacagccacactgctgtcacaacagagggagctactgtacaaaggcacagaattttggagggacatgctcaatctgataatagatacctttaggggtatattttcagccctcaataatctcctgggagctgcctttctattacatgacaatgacctccccacagtaggtaacctgatgaaggcaatcagattcattctccttggagcttggaattgtgactaatgcattggtctcagattgggctggttagcttgagcagatacataaacccagaggctatgaagcagctgggtttgtcctcacgtaggacaaagcagtgagtctgtctgtagagtgggagaatgagaagaacagagaaatgagacagggggcaatcaggcctgtatccctgggtctctctaagacggctttccaataaaggtccattgtggctgaagctcatttgaggtaggtttcacttacctgcaacccaaggcaatgacatcagtgccttgagccacagtccctcagcattgctggttgtccttctgccagtcttgtcctcttagccctgggcaggacaggaagctgtgggaggaaacacctcatgctcctaggggcttcrtaggcaggtgttcccttccaggctgctctagtgtccgctgtctcaactgggtcttcctagcctggcaaagaggagaagaggttaaagccctcactgtttccatctcccttgacaccaatgaaaagaaaaacaagaaaaacatctcttccaaaacagcaagtcagcagaaccagcggaggagcaagtcatcaatttttttctagraaactggcaaacacttttcaagggtgttaaagataatcagacacaaaaataagacttaattaggcactagttttgccctcaagaaaactgaacccaaagatgaaaacgtgtaggctttgaagagagcattctggaaaatcaataaaagaagtcagtgccatctgactgctaattttttttttttttttgagacgtcttgctctgtcaccccggctggagtgcagtggcacaatctccactcactgcaacctccacctcatgggtccaagccattctcctgcctcagcctcctgagtagctgggactacaggcatgcaccactgtgctcagctaatttttgtatttgtagtagagacagggtttcaccatgttggctgggctgggcttgaactcctgacttcaagtgatcaccccaccttggcctccagaaatgtcttccaacagaaatgctgcacccagcctgattgctaattttttagagtggatattttgtctcacatttcaccatgggctttggaagatgaattcacatgcctttctctcttcactgggcattttaacaacattgtaaaatccatcagctaagatttctcaaagtcccccaaaccaatctagctccctttttacctgcctttgtatactggggcttgtataagattttatttcaaaaggggttctgcagctaccaatggcctcggaaactcttacggacagcactccagaaggaagaaatgaggcaatgttcacttcttttcgaggcattcatcacatatctggaccactgcctccaaccccacccgccaagttcaccatttcccttgcgatggaaggaaaaagccctggcccacggggttgctctgaaaaggtggccaattcactttcttttttttgtttgtttccttttttgagacagagtcttgctctgtcgcccaggctggagtgcagtggcacgatctcggctcattgcaacattcgcctcccggattcaagcgattcttctgcctcagcctccggagtagctgggatttcagacactttcttctttcacttttactgacagaaacttgttcagaggagaaagcccaggtgctctggcctgaggctctgaccaaaactatcttcgacatcactttaaacagttaaagaagtagtaactttgaaggtttggccggggtgtgtgtgtgtgtgtgtgtgtgtgtgtgtgttgccaaagatggcaacttccggataggtctttgcttgataaaaagatattagctgccttttcagttgtggaagttgaggcccaggacacagtttgaatgaggtggctggggcaaaggaagacaacgtccattttctgaggagctatgctgcagagagggtgagtaggtggcctggggactggggaagctggggtttcggtgggcagggaataaaggtcttgggaggaagagggggcagcaccgaggcagctggcctgggtcgaaggagaagtggccggagaccctccgtgctgtagatgggaggtgagctcaaggacgcgatgtcaaatactcaagttcctgaacccccctccaacacctccaaaccttcagtaatgcctgtggtgtgcctgcctggaaagcacactcgagggagggctggaggaatgttctggagcaagccaggggccacagaaacatggagagggggcaagaatgtgcccaaagatggtcacggaggggctggggacaggtttcggcragagagtccccaatttgccttctgccccagaactcctcagacagagtagggacagccctggacttaacacatttatgtgggaaaagagtgagagttattttgggtgttaaaacagctggtgatcccagaaggtggaagaacttggggataattgggacatgaaatgatctacagcagttggtgttctaatctctctttccttatatctcttctttccttgcttccatttttcacatcttgtatttctctcttcaaggaaatgatatatttcttttcagtgcaaatccagtgtctgctcttgattttgagctttctctcttttgtctctcaagacgtacaaagcagctgccaactattccatggtttcccagctggagaagccctaccttcacagcatccttgaagcagacaccccaagggagyacctacctggggcaccccaggctggcaccaacatacaaagtggtcaaaaatgtgctgttacccttcaaggggctgcttaataaatcacagttttacttccctctttggtccaaaagttttgagagagagagcgagcacatgtgtatgtgtccttcacaggacaccataagaaagtaaagagacaacccataagatgggagaaaatatttgcaaattacatttctgataaggcatatctgataaacgcttacaacttaataattttttttaaaaaatgacccaattaaaaccgttagcaaagggtctgaatcgacatttccccaaggtaggtaaacatatggccaataagcacatgaaactatgctcaacaccatttgccatcagggacatgaaaatcaaaaccacaatgagataccacatcacacctaacagagtggctaaaatttaaaaagacagcaagaacaagtgttgacaaagatgcggaaaaatatttggtggtggtggaaaagatttattttgctggtagaaactgctaatggaaaaggttaagcatagagttaaacaattttttttttttttggcacagggcctggctgtcacctaggctggagcgcagtggcaggatctcagctcactgcaacctctgcctcccacactcaagcaatcttcccacctcaacctcccacctcaccattacccttgcaatggaaagaaaaagctttatcagatacaccttatcggatatgtaatttgcaaatattttctagagtagctatttctagagtagctaggactataggtgccaccacgtccagctaatttttgtatttttttgagagacagagtctcactttattgcgcaggctggtctggaacccctgagctcaaacaatctacctgcctcagcctcccaaagcgctgggattacaggtgtgagccacctcacccagctagagttacaatttaaccggactgaaacatatgtccacaaaaaagcttgtccacaaatgttcatagcacgttattcaaaaaaacccaaaagtggaaaaaacccaaatgtccatcgtttcatgaatgggtaatacattgtgacatatccaaacaatggaatcttaattcagcaatccgaatgactgaaagactgatatatgctacaacattgacaaagcttgaaaacatgctaagtgaaagaagccagacactaagcatcataaattctgattgcatttgtatgaaatgtccagaacagtcaaattcatagagacagaaagtacgtctatggttgcctaggaccggaggtgggtgtggatggggaagggactgactgctgccaggtaccacgtttcatctgggatgatgaaaatgctctaaaactgattgtggtgatggttgcccacctccgtgaatattctaaaagccattaaatgattcactttaaatgggtgaatgatatggtatatgtgttataaaaaaaatgtaggcaatgtattgttttctctaagacttctaagcacttggattttttgtttgttcaaacttttatcattaacttctagtattctgtcattgtggtcagagaatgttgccaaaataatttctttgaaattaattaagaatttctttgtggcttagtgtatgatcaatttttattaatctttttcagtatttgaaatgtacatatatttaacgacttattgagcacttaagtatgtcaggtgctatcctggatacttcacacacatgagctctgctctcaattctgtagtggccaccttcatttcacagtggtggtgccgaggcccacaggagttaatcccagttccagtgaacgggggtcctgggaactgagccctagcctgtctggctcccagaagcctgctcaccgcacttggtcacaatgcccttttaaatggtttttgttgatgcaaatggcctttcctttgacaagagcattgggtcatttctctccttatctggggctcacattgatgtagttaaaagactattttgcaggagcatttccttcctcacattattgcttcaattcggcagttaaaacttgactagtgaatttgagacatagaaaatgcagaaaaaaagcaaagtgattctcaaaaggacctagaagatgtgaataaactgaaagaccatgtaactgaatggataaattgaatatggttaggctagccaatttccccctgattaatatatcgtacatttaatactcctgtgagattttaaaaacttgtctaaataactctgaaattcatcagaaagtaaaatcataatctgaatagctagaaagtttttaaaaactagagtaatggaagggtcttattctacataatattaaacagtgtcatgaagccatgctaaagatgcaggaagatagaagagggaatttgatgcttaactctgtggaacaaagtagataccactgggggaaaaaacccaagtaaaagaagaactaagtgtctgacatgtggcatttaattcagtgaagaaagagaatattgtttaaaaaatgaggctgggatgattggttagttattttgggaaacattttaactcctcactacataaaactttaaaactttgcaatactaaaaacactattaacaaaattttaggacaaactttagattggaaaaatttgtaacaaatatgctatatggttttgatttataaagggcttttacaaatcagtgagaaaattgctgacatctcccaatggacaaagggcatacataggctttaaaagcactgaatgtataaatagccaataagccaaaaaaagaaggttcarcttctgcactaattgaagaagtacaaatccaaacaaataaaaaataattaactgttgaaagacaaaatttcctatttgccgttgttcactgtaatagttttggcaaaatcttaraaaaacagcattctcattgctaatagggatataaatccatgaaaacttcctggggccaatttgaaaatatacctcaaaagacttaaaaatatctatttattgcgatctaacaataatagtactaggaattcttcctttaaaaaatggaaaagggaaaggaaaggaaaagaagccgtgaataccaaaataggggattagtaaaacatgtcagggcacaaccattcaataaactattttgcagcctttaaaaatgatgtaggagggtcaggagcggtggctcacacctgtaatcctaactctctggaaggccagggtgggaggactgcttgaacccagaagttcaagaccagcctaggcaacatactgggaccctatctctgtaataaataaaaaatatatccgggtgtggtgacttacgcctctggtcccagctactcggaaggctgagtcaggaggattacttgagcccaggagttgaggagctgaggctgcagtgatggtcctgccactgcactccaccctgggcatcagagttagacccgcctcaaacatcaaaaaaaaaaagatgtaagagaggagaactggaaaaatgcttcaacgtgcaagccttctcaagtgggttgcctgcagggctgtgttgggaaggtttctgaggttttttctgggtgggagcaatgtcataattgatgggttactttccatccccgtgataaaaagccacataatgatatgtaaagatgttcaatttttgttaattaaaattacatgaatatacacattaacaaggacagaaagaccccttggcacactgcagtaagaagggcacccctgtgacgttctcccccaaaawccctaacacaagtgccattatgaggaaaacatgagacaaaccccaactgaggaatatcctactgaaaacctgatcagtgctccgtaaaaatgcagtgatcacaaagaataagaaaagactgataaactcacagagtggaggggactgaggagactggatgactgaatgctctgtggagtcctggatgtgatccaggattggaaaaggacattcatggacaaactggtgaaacccaaataaaatctgtagtttagttaatagtcttgtaccagtgttaacttctccattttcacaaatgtagccgtggttttgtaagatgtcaacattacaagaagctgagtaaagggtaatgggaactctctgtactgtctttacaacattttgtaaacctaaaattattacaaatttttaaaatgtttaaatggagggaatgctaaaaatgagtctacagttaagcaaatattcagtctggtgtaatgctattcagagtttttttttctgataatcaatacatagaacattttatttttcattgcaatgactttttaaaacttaatttttaaaattttagatttggggtaaatgtgcaggtttgttacatggatatattgagtgatgctaaggtttgggcttctattgaacccctcacccaaatagtgagcatagtaccctatatgtagcctttcaacccttgccctcccacctccatctctctccccacttttgaagtccacagtgtctattgtttccgtctttatgttggtgtgtatacctattgtttagctctcacttataagtaggaacatgcggtatttgattttctgcttcaaatcacacattttttttaaactagtcatatccaataataaaatgctagtgttagtgcaaggcagtaatagatgttatttttgtttcctgtattttaaaatttccttccatatacatatattaataattgtatttaactattttaaaaatcataaagagaaaaagcaacatactctggtctggattcagaaaagtcctcccagggccagcagaccgcaacccttgtagtccaagctggcactgaaaaggcaatgagatgcacgctggagagaaatggagagctttccaggaaagccaagcattgcaatgcaaagtgcgttcaggctgtgaaccacagtgggacaaaaaggccttgagaacttttggcaaaagtacactccgtgcgtgagcaagaaaagcatctcacagagagaaaagcatctctctccgtgtccttcgacggccaggaagatgtgcagccaggaggcagggaaggttttccaggctcaggtggcctggtgccaggccctgaaatgggaagagcagaaatgtggtctggctacttggtgtgaacaggacaaatgggaagtgggcagtgtgcaggggcaaagcaggcagagcagcccctggctgtcagttatggccaggacaggacagtgtggccagaccaggcaacgctgaggtgcattcaggggggtctctctacccgtccatcattcttggagccccgctgtgttcccagcacagtgctgagggttaaggatactggtgtgtcctgcctgatggcaccctgtctactgggggcaatgacatgcccagtcccataatgaaggtaagtacagggagaataggtggcaagagtgagaagcatgcctgccctcgcacagcagcaaaaggctcagaggtgggtggagaagcagccaacctgtgtaggtccagctccacgggcagagcacagstgggtaaggtttctctccccacctttggaggtcatgggcccaagggcaagccttagcacagccaagcttatctcctatgatagatcagtcagagaacacagggattccatttcctggcagtcactcagaaactcacagcaaggggatctgctcaaatgcagtggttttggctcgattcccttccatagtcctagtgaaagtgaggttgggtcattgctccttcacttaacattttcatgcttaaaaccaacatctgctgagcacctactacgtgctagatgacaccaatcccaaagcgccctcttcaggcaagctaagaaatggacagggccgacctaagtggggtctgggtggagatctagctaaggggcagcctgcagaacttctggcttggcgagggccccaggcaatccagcagtgtgacatttagtataatgtggcctcagtttccacagattcactagtctgtgccttaaaagaaaaaaaaatatggcaaaagaagccttttcagagtcaaaaggaaaattcagataatcattgtgccttcaggagctgtctctgattgctatggaatcagcctacgggcaaaaaccaaatgatagaagaytttaggacgatagtgactatttaagacttttcaaagaggatttcaaacgagtgtgggtggcagggcacccagaagtcatgagacctggagcaagttttctaccattcgaaacccgagtttcctcttctctataatggagtaaccataagtgtacctatttcatggggctgttgcaaggatgaaatagacaatgtctatttctcacttcacgcctggcacatatgaggactcagcaggtgttagatattagctgaatactgaaactccatgacatgttgatatattaaattccatcatacgaactctgaataattttaccaaatgcaaaaacggtcatgttccaagtatgcaagcattctcacctcattaattatacttaggttatactttcttgaactttaaaaattcatatcacttagcatttgtgtgtttatctggtagcagacgagaggaccagccactagcaaaggtgtacaagcacttgctggaaaagtttcttctgtcagtccatgcctcttttcctgtgacttggaaaacagtggtcagcattaaatcacagaamgactcctccgggcctgcttcaccaatgttctttgaaaacgtagtcttagagccagtagatttgactaaatatttaaaaaccacttccttcaattttaaagagaacccattagaatgtataatggggccaagaaaatcacccagctttctgccaacctttcctaaaaatacagtccatctgagaattcccagaactcaagaaaaactgcaaatgttcaggctgatgagctcgacagcaagacacgaggttctgctgcttgaggacctgttgtttatcttgttgagggatgagatgcttttgagagtggaaagggccctattaacaatgatgctggaacagcagacatacatgcagcttgtcccgggcaaacagggcacaatgtctcctcctccacaggcagctaagctccccagaacacttctgcgctgcaggcagtgcggacacacgagtgcacatgcctgctgcccacccagccatgtagttggtgaggaaagtgagggagatagacagtggctcaacatgcattaagacagctcagaggctggacaggctggtgtagatcaatatcccgcagagccctcacttcagctgaagacacggacccttcaaaacaagcactgtatttcctaaaagaaaccagaatttgggagtcagtatcaaaggaggcctccaaagccttcctggcggaattaccaaaatgattcaatccagttcatgagccagtccataaatggtgctcctgtgccagatgcagtgaccagggctggggacccaggagaagtaaggtgccatctatggaggggacaaagctttatgcccatatacacaggttagagtgactggcctcagaccagaggcaatagacaagccacagtcttgggggaaccaaggagggagggaaggactccacctggcaaggccagggacgcttggcctaggagaactgagcctggaggctggggtgggggccaggaagcagaccaggagcggcgcactgtctgcagagagaagggggtacacagcaggcttagagacaatcagtgtggtttcaagaacaaggttaatgcattcaagggatgagctgaataggagagaagagattaggggcatgttccaggcctgccttcagtaactgtggggactggaggtgcccggcccctggtctattcccttctcttccttccctgtcccaccctgccaccatttcttagcacaaatggtccatgagcatgtatatggacaggtcagcccaatccctccacaccagcttgcagacagcaccttgctgtccaccctcaggcctagggtgcatgacttgccgcacagtcttctttggagcagatggagccaggaaggaggttctcacagagctgggagcaggctcagggcgttgggacaggtattccagaatcctgggacctggcgcgtggtcttgaaaggggtgcaaaggctctgataagtagatcccctaagccccaaggactcctgagagaggggtacctggagaggaccagagcagggtcccctgaagtatagagctcagggcaggactacgattgcccaggactgagggtggttcttaccagaacttctccagtccttttgaaaaggtaccccccgccccaccaaggcccactggtaggagggcccctgcccccattcctccaaatcctgactgccctctcctttgcaaggactctagccctgcagctgttctcaataccctccagtacagcccactaccaggggcatggtcacaaatgtgacccccaggtctgagattggagcctccttgctggcccttggagaacactctcaattccggcagcttccctcaagcaggtgaccatcctcagggtctcacctagacgtcctgtcaaggctttcaaccctcacctgtaaaaaccctgatgcccacttctacccacaagattctgatgcaattaacacaggagaagcccaagagcaggaatttgtaaaagcttctggggtcactctgtattgaggacaaccagagtgaaaggtcaccctctctgcctgtagtaagtgtgttttttttaacatacacacacacacacacacacacacacacacgttttttgttttaattaagaactcacacactttctgttcagaaatggaaagttttttggagttctacaggaaatgctctgtccccaaagctacactcatacattctttcttgagaagaaatctatatatctctccatccattcatcacacacaaggggctgtgccttgtgccaggtacataggatacagctgtgtgggcggcaagccacccaggcgccgaggcaagggacagaggacacgagctgttccagtataataaaatctaaaacaaggatagttataccagatatagatcttagatatgattatatatgaatatcattaatcattagtttgtagcaagtactttttattccaatattataataatcctcgctctataatcatagcctaggaaaaaccaggccatacagagataggaactgaggggacatagtgaggtgtgaccagaagacaagagtgtgagccttctgttatgcccagacggggccagcagaagggctccttggtctagcggtaacgccagtgtctgggaagacgcctgttgccgagcggacggtggtctagcagtagcctcagtgtcaaggaaaaacaccggctgcttagcagaccgggaaagggagtctccctttccccgggggagtttagagaagactctgctcctccacttcttgtggagggcctgacattagtcaggctcgcccgcagttatccggaggcctaaccgtctccctgtgatgctgtgcttcagtggtcacactcctagtccgccttcatgttccatcctgtacagctggctctgccttctagatagcagtagtaaattagtgaaagtactaatagtccctgatatgcagaaataatggcataagctgtctttctctctgtctcttctccctctctgcctcggctgccaggcagggaagggccccctgtccagtggacaagtgacccacgtaaccttacctatcattggaggtgactcacattctttaccctgccccttctgccttgtatccaataaataacagtgcagccagacattcggggccactaccggtctccgcacattggtggtagtggtcccccgggcccagctgccttttctcttgtctctttgtcttgtgtctttctttctacactctctcatcgccgcaaacagggagagatccaccgaccctgtggggctggtccctacacagctgtgaacaggacagatagtcccagccctcagggagggtccactggaaatgagggagacatgttagatgaggaatcactcagttatgtattacactgcaattacagcaagtgtttcaaatggaagacaaggaaaacccctaagtgaagggcataactggacaacctgcctaaccaggaagggccttccttggagaatcaacatcagagctgatcagcaggacagacaggactcactgagggtaaggattgctgagaagttaggaggtatcagaacattctaggcatggagttcttgagggagaggaacccaaaagaccartatggctggagtgtggagagacaaagagagagaggcaggatggggctggaaagcagagatcagacttgggcgaggtgaggactcgagtatgtatcagttatccattgctgtgtaacaagttactgcaaaccttatcagcttcatacaacgaaactgtattatctcacagtttctgaaggtgctaagtccagagcaccttcgctgagtgggtctaactcagagcctctcatgaggttgcagtcaagccatctaggatgtctctactggggaggatctgcttctgagagggctcctgcacttggctattgcctgaagtcttcagttcctccctgcatgggcctctctgttaggccgcctgaatgtgctcatgaagtagcagctggcttctcccagagcaagggatccaggggagaggagacccatgagggaagctgaagccttttataacctaatcttagaggcagcaaaccatcctttctgccatattttattggtcagaaggtatcatgaagtccagtccacactaatgggagagtgtcccataagagtgagcatagcaaggtgtggaaccatttggggtcatcttggaagctgaacccacagggagcacattccgattttattttcttttttccccgtcttttttatttatttacttttcgtttttctttctttttttttttggagatggggtctcactccatcatccaggctagagtgcggtggcatgatcttggctcactgccacctccacctcctgggctcaagccatcctcccacttcaatctcccaagtggctgggactaccagcatgtgccaccaaacctggctaattttttgtatttttggtagagatgggattttgccatgttgcccaggctggccttgaactcctgagctcaaatgatctgcccacctcgatatcccaaagggccagtattacaggtatgagccaccatgctcagccccaattttcatttaaaacaaaatcacatgttcccaagggaatgttttggtataataggaatgttttatgtcatgtttgtgatagaggttatgcagctgcatacctttgtcaaaactcatcgcattatgaatcttcagtgcattctgctgagtgatagaagtcagactcaaaaggccatatactgtgacttctgtttctgggaaggtggagtagataaacttttccctattcttttcactaactacaaataaatgccctagacattatatacatatgtgtgtgtgtatatatatatatacacataaaataaacacaagatttatatatataaaatatatatattttacatatgtatgtgtaaaataaacacaagattctgaaagacagagagaaggtgacagactggctagacatcttgggacctgagtgatgacactgggttttctttttgtccctgtatatcccagatttggagctgaagaggtggccttctagaaacaccaaccatcatagacaagaagagccccaagaaaggcccctcctctcgaaggcaaagcaccagggaaggggcagcctagcaagacagaaaacttttagacaattactgctctactccagcaaaattatcatagaaaaaaactgtgctctccccattcatgccagcaaagaccaagtggggagctggcagccaggctgtaaggaggctcctaacacctgtccagaggtggtgtcaaaaaaaaccaagttggggagcctgcacttccatccctgtcagttggaaatgaaaccccagctctccagtgtcagaggaaaccctacagggggcctggccttccgttcgctcctggcagtaacggggtgccccttcccttcctcactggggcagtgtcagaggaggccaaatggagagtcagaactttcacggtctcctggcagtaatgaggccaccccgacctcggagacgagggagtcagaactcccaccctgccccgtaacaaggaacckycccccttgggtgtcagcagaggcttggtggggagcctgagctgtgacctccacctggcggtaatcaggtggtgccttccgcctcccctgcaggagcagtgccacaaaaagccagctacaacaggaggttgaaatcagagccagagtctcattacatcatatgaaaatgtctcattttcgattacaaaaatcacttggcctattgaagaaccaggaaaatgtcaaatttggagaaaaaagacaatcaatagatgtgaacattaagatgactgagatgctaggatcattagacaaaaattttaaagaagccctgatagaaatacctcagtgagcaataaaaatgaaaaacttttgctctacaaagatcctgttaagagaatgaaaagacaggctgccagagtgacagaaaatagttgcaaatcacatatgtgacaaaaaatgaataactaaaaaatacatataagattaacctggctattcaaaaaaaattttggagagaagtggttctcactttgttgcccaggctggtcttgaactgttgagcttaagcgaccctcctgctttggcccctgtatttgtccattttcacctttctgataaagacatacccaagactgggcgattcacaaaagraagaagttgaatggactcacagttccacatggctggggaggcctcacaatcatggaggaaggtgaaagtcacacctcacatggtggcagacaagagaagagagagaagcgaaagtagaaaccccttataaaaccattagatctcatgagacttattgactaccaccagaacagtatgggggaaactgtccccccgattcggtcatctcccactgggtccctcccacaacgcatgggaattatgggagtacaattcaagatgagatttgggtggggacacagagccaaaccatatagccccccaaagtgctgggactacaggcacgagccactgtgcctggcctatttttaaactctcagagctcaacagtaaaaaagaaaacaatccaagtagaacatggacaaaagatgtcaagagacatttcaccaaagaacatacacagatagcacagaaaaagatgggtagcatcataagtcactaaggaaatgcaaattacagccacaatgagagaccaacatgcacatatcagaatggctaaaataaaacatagtgacaacaccaaatgctttccagggtgcagagagattggatccytcatgtgttgctggtgggaatgtgaaacagtacaaccactctggaaaacagtttgacagtttctttaaaaactaaacatgcaactaccatatgaccagcaactttacaggcatttatcccagagaaatgaagactttggtttacacagaaaactgtatacaaatgtttatagcagctttattcataggagccccaaactggaaacaactcagatgtctttctatgggtgaatgattacacaaattgtactacctcctaccatgggataccactcagcaataaaacgggactaaatattcatgtactcaacaacccggatgactccccagagaattatgctgagtgaaaaaaagccagtccttaaagtttccatactgtatgattccacttacaaaacattcttgaaatgataaaattatagaaatggagaaacaaatagtgtttgccagaggctaagaaggaaataggagtgaaaaggacgcagatgcagtcataaaaagtcaacagtggccgggcgcggtggctcacgggtgtaatcccagcactttgggaggccgaggccaggcgatcacttgagttcaggagttcaagaccagcctggccaacatggtgaaaccctatctctactaaaatacaaaaattagccaggcttgttggtgggtgcctgtaatcccagctacttgggaggctgaggcaggataattgcttgaacctgggaggtagaggctgcagtgagccgagattgtaccactgtactccagcctgggtgacagagtgagactcagtctcaaaaaaaaaaaggtcaacagagggatctctgtggtgatggaaatcctctatgtcttgactgtatcaatgtcaatatcctggttgtgatattatcctgtagtttggtaacatgttaccactgataaaactgaataaaggatataggggatctctcagaaacatttcttacaattgtgtgtgaatctacagttatttcagaataaaaaggcagcatatgttatcacttcacttatatgacactctggaaaagggaaaactataagaacagaaaatagatctccatcttccaggagctgggggtgggctgacttgtagttggccacgaaggggcaggtggaaattttggagtgatagaaatgttctacatcttgattgcagtggcagttacatgagtgtgtgattcacagaactcagaactgtttactaaaaaggacgtgttatattgtatgtaaattatatctcaatatagctgtttttaaaaaagatcacggccagggacagtggtttacgcctataatcccagcactttgggaggccgaggcaggtggattacctgaggtcaggagttcaagaccagcctggctaacacagtgaaacctgtctctactaaaaatacaaaaaattagctgggtgtggtggtaggtgcctgtaatcctagctactcgggaggctgaagcaggagaatcgattgaacctgggagacagaagttgcagtgagccaagatcgcaccactgcactccagcctgggctacagagccagactctcaaaaaaatttttttaaataaataaataattaattaaaaagatcacgtgcccaaagcactgactttscccatctttttagcctctgaactctttttccaatgaaatcttatatggatttttaaaaatctgtaaaacagataaaattgagacccctacttaagttgcgtaggggacgtcctgttgattcgcttcctccaccccaggcagcccccagcaccctcggaagagttgaagcagggccatcgaatcctctggttctgtggttgtgggacctgaggcggcagcttggggaaaaaggcttcaatccatgaattgggcttcctaatcagcaacatggaaactaaagccagctccacrcagcagcatgtgaggtaaggaatcttcaccgtgaactgagagcttcactgcatggtgcaggggaagggccggcaggagcggckttagtattcaataactaagctccgtgaggcaccagcatggtgccactgaactccatgggaggcagcccaaaggcacttaaatgaaaatcggggccaggcaaggttgccttggctgatgatggcagagaaggccatgggaacgagtcccaggagagagagctgcagtcatcacacgtgggctggcccctgccagctgcagcccccacacactgctttctgtctgtcccttgctccaaaaggaccctgagaattgcttatcttacaattactttagaagcaagaagctctcttgaggcatctacattttttagcttcatccttaaagagaatcttctagagaggattcctgtgggtgcttctaggatttgctgtatcactttctgaatgatcccagtgaatcctgcctctgtgatttaccccagcttcgcagctgttacctgtgtagtctccygctcttgggtgcttctttcctgaatccattttaggtgatggaaatttgtgaatttggtgttgacaggagggtttccgaagaacggacttcccagagggcagagccaggccactggattctaacagccaggggctcgggggtgggggcaccctcctttgccagaygcacagttctgttggctccttctgtctctagacatatgctgcagaggaatgtgtttggagacagaagccgcctgatcaccatggtgaagaagacatgctgcttgagcggtacagggctcattatatatttagcagtagcaattagctgggctgcagttggcattcagttggagcacattactggctggaatgagcatcctgaagaaggtgcaatccccagagaagggcctagatgagattttgatgagatccgaagaccatcctgtgacatagtccaatcttcctagccagccagstttaggaaggcagatggtagggccagcctgtcctggatctggaatcagaagttctgactgtcaggccttgtcacttggaagctggttcccgtgtgttaggcactatgctaggggtgtgtgcatctccacgggatcttcctaacaacccccaaaggcaggcattcttgtccctgttttacagatgggaactggggctcagagaaggtaagtgaattgaccagtctatggcagagctgagaaaagaacacagtccgtcctaccctaaagctaccctctctaattctctggtttttaaatctgaaaattaaggataaccaaaggtctcactcttcttggtacatttaaagaaaamttaggaagagatgccagaaggtggatgggtctggctgtagctacaggagctgaagggaatgagagcaggagagcaagttggttccggaggtgagaaggctctgagcagtgagagggtggcgagacttcccaggccaggagtgagcaaaccctagggacatggaggaggaactggccctgaagcagatggacagaagagtgagcccagaaaccaacagggcccctgggagcctggcatgtgtcttccattaacagggggcatttcacagctggggaaagaagattcttccagctgtggcattggaaagacaggctagctcggaagaatgacacagaactagcagcccagactgagggtttactatgtcccagtcactgttctttgctttacagtcttattgacttcttactgcacaattatgaaatacattccatggttattcccatttcacagaggaggaatcgaggacacagagaatattagccactcgcctaatgtcacgcagtttgtattcacacccggttgtctttggattcccaagaccactgttaggaaatatggccagagccctgtctgccttccaacatcagatcagagtaaattcycaaaggaaataatattttaatataaggaataaaaccatggaagtttcagagaaaacatggctgaatatttttataaccttcaagagggagaggcctttccagcgtcacaggaaagctagaaaccataaaggaaaagattgataaatttggctacaaaaaattttaaaacttctctgttaacattagaacatcataaacaaaggcaagacatgtaaccacaacctgagaaaacatacttacattatatattacaaaatcctaatatcctaaataagtgaaaagtttctacaaatcaatgagaaaataatgaacaagccaagagtgaaaaggacataaacaggcattttgtagaacaggagacacaatatgagaattaagaaattcaaactaaggccaggtgtggtggctcacgcctgtaaccccaacactttgggaggccaaggcaagcggatcacctgaggttgagagttcgagaccagcctgaccaacttggagaaacctcgtctccactaaaaatacaaaattagctggatgtagtggagggcgcctgtaattccagctactcgggaggctgaggcaggagaatcacttgaacccaggaggtggaggttgtggtgagccgagattgtgccattgcactccagcctgggcaacaagagtgaaacgtgaaactctgtctcaaaaaaacaaacaaacaaacaaacaaaaattcaaacttaaataaggacatcagtttcatctataagaattacaggctgggcgcagtggctcacgcctgtaatcccagcactttgggaggccgaggcgggcggatcacaaggtcaggagatcaagaccatcctggctaacatggtgaaaccccgtctccactaaaaaatacaaaaaaattagccaggcatggtggtgggtgcctgtagtcccagctactcgggagactgaggcaggagaatgacgtgaacccaggaggcagagcttgcagtgagccgagatcacgccactgcactccagcctgggtgacagagcaagactccatctcaaaaaaaaaaaaaaaaaaattacaaagatgtttttcaatgactgatacctgatgtcaatgagggtgtgggcatcatgtctgcccatgtaaaactaacacacaacttagcactatcctgaaatatgcctatccttccatgtgggagtcccacttctgggaatgtatactgcaaaattctcagacgagttcattaagatatatgtgcaaggatttttttctactcaacttgtttataaaagggaaaacccagaaataataaaaagtcaatcaacaagttatacacccaaaaaacagaatgatgagtaatttgtgaactgacattgagaatggacaagaggtattgttaagttaaaaaggaagcaaattgcagaagagtatgtccagtgagcacccaaatttgttggtcatactaaattaataacatttttggctcacgcctgtaatcccagcactttgggaggctgaggcgggtggatcatgaggtcaggagatccagaccatcctggctaacaaggtgaaaccccgtctctactaaaaatacaaaaaattagccgggcgcggtggcgggcgcctgtagtcccagctactcgggaggctgaggcaggagaatggcgtgaacccgggaagcggagcttgcagtgagccgagattgcgccactgcagtccgcagtccggcctgggcgacagagcgagactccgtctcaaaaaaaaaaaaaaaaaaaaattaataacattttaagataatatatacataggaagtaatcaaagcaaccatttctggtgattaggttggggtatttgagggactttcacgttctttgtttatttgtttgtttgttggtttgagatggagttttgctcttgttgctcaggctggagtgcaatggcttgatctcagctcactgcaacctctgcctcccgggttcaagcgattctcctgcctcaacctcccgagtagctgggattacaggcgcctgccaccatgcccagctaatttttgtatttttaatagagacggggtttcaccatgttggccaggctggtttcgaactcctgacctcaggtgatccacccacctcagcctcccaaagtgctggaattacagatgtgagccatcgcgcccggtctgggattttcacattctatgtaattcaactctgcatgttcaaaatattttgaacccggaattacagttgtaatcataaataataataaatatataaatgaccatgggttattaacatcccactggtgcctctgcacaacccttgggagacaagccattgcctcttaagtgggacaaaatcttttgataataatatttcagttcaaaatagtaagtaattaagacattytaaaaaatctaaaatactgccattaatcaaataattcattttacaacaatgaaactacatttttgaaacagtgagattgtttttctttgctgaattatttggaactcaacaaacgaatgttctctaagcagggtgtttaacagcacatagtcaagcttttctttccccccagcaagttctgtcttccaaactgcagtcattcagctggtttgcaaagagaagaagatcaacttgaggttcaagccaggacttggaggcggtaacgactgtgaggtgcgggccctaaaaccaccccatacctgaataagacacactaattatgatattccaatgtggtggttgtgggggggcagtctgagaggcaactatgcaaataagatacccaaatattggtttcataacccttaaactcctcatcagaatcaggagtgaaaaggctgatggcaaggacaggtagggcttttgaaaaggactttcagcagcgctctctgtgtgctgagtccctcccactgggtgcttggaagcctactctgcgtctcaaggctttggaagaggggctttaatgggagggctcagagtctccctctgtctccgctgccacccaccgcagtagcaaagcagaagaaagctctgtgaccctgggttggatcaaaggaacagcagaaatgaagaacagctgccagatgcagagaggagaacaaaacttggcaaagaaactaatttagagaagagttgatactaaaaaacctccaggaattcagataaatcttgccacagctctgtacttctacaaycaatgggaaaatgtttgaatcaatcttatctaactctgaaaaggtcctgagaccctggttgatatctaggttataccgtattagttaaaaacaccacatctttgcaatgaggagctgcctggcatagctctccgtgaggcaccgagatgatgccactttctcataaacacacaggtgtcagaccctctcccactggctgctgggggagatggggcagatggaaacttggctgagactgtaaggaacccgtggagtcagggttgttagagaaaccttcacaactcctcttttggaggccaccaaaatccacagaggtccaagaaccaaagattaagctctttagttgcagaaagtctaaaccagtcatgaaaactaggccccaacccagatatctgaaggcaaaatatggaatcaggggtctttaagcctcctgggaacactgtggaacagccacttgtgtgtgcacccagtgatgaaggactggtcttgtacagtcaagcaatgatgaatgaattatctattcaagccaagaaactaagtcataatcattaatactgtaagactaactcctggctcatccacatgggccattagcagtcccaagtacatacagtgagaaacaccatccttctagataaagactagggaaggagataactcagcagttttctgccataatggggatctgaataatacaaatatttgacatttgtagatggtgtgcaatgatctcaatcctcttatctaagccttgctggagacagcacttgtaacatctacatgatttttcatcttctctcccttcctctactttggtgaatatgttcaccaatagaactgtctgagaaaaggggatgaaaggagggcagaaaaatagccatccataaacaggatgaccagtttccatgttaccaaaagccatccatcctgtgtagtgtcaagatccttgtaagccactgctatgttttaagcaggcaatgttgatatcagacccagcagtgatgaagctcttgttcttaaattccacatgcaaaagaggcacacaattcttttgtatttatatttatatatgttacatttatttaatgtttccattatcagactcttaaaagtaatgaaaaactattaaatctattaaatatcaatttaccagctgtagcgaggaatagccaccactgacatggcctagacagtgtgtgaccttttggaacactcagattgctttcccaagtgcccgcaagtgggaggagaaaggaaacgtgctatacagatgctgcttcctccctggtctacctcctcactctatggtttgawatcaaatgttctgtgtcttgagatgaaattcaatgggtaggtcagagctggctggttcatagcagcagcttgacttggcagcaaattgaacctgtttggaatgtggagaggtaaagtttacaaaatgggtatactcagagtgtattacttatttgatttcactgtctggtttgattccttacatcctccctatgataggcagaaagtggtactattatcccaattgtacagaaagtgttactgaagcttatgaaggttacagaatagttcaaattcagaaccatgctttaaacccaagtaactgcaaggccagtgctctttctatgccctctcttcctcatttcctcttgtcccaaaagggggctaaatgtggcccctgtcagatactgtacctcttttctttcctgctaccctgatctcttatttactgatgaattatttattctctgagcattttctccccaatatatttaaaaacaaaatttttaattgtggtaaaatatacataacataaaatttaccgtctttttttttttttttttttttttgagatgaagtcttactctgttgcccggactgaagtgcaatggtgtgagctcagctcactacaacctccacctcccaggttcaagcaattctcatgcctcagcctttcgagtagctgagattacaggcatgtgtccccatgcctggctaatttttgtatttttagtagagatgggggtttcactatgttggccaggctagtcttgaactcctagcctcaagtgatcctcccgcctcagccttccaaagtgtgggattacgggcatgagccaccgtgcctggccaaaatttaccatcttaaccacttttaagtatacagcctagtgatattaggtgcatttacattgttgtgcagcagtatacactatttgtcttagtccattttgcattgttgtaaaggaatacctgaggctgggcaatatggttctgccaggctttacaggaagcatagcascagcatctgcttctggtgagggcctccggaagcttccactcatggcagaaagggaataagagatggcatcatgtgacaagagaggaggaaagacagggaggagggaggtgccagactctttaacaaccagatcttgagggaactgagagtgagagttcactcaatccctcaagaatggcaccactttgggaggccaagatgggcggatgatggcccccatgacccaaacacctcgctttaatccccacttctaagggatcaaatttcaacatgagatttgcaggggaataatatccaaactatattgctattcttaattccttaatagattttaaataaaacaagaaagaaattctgggctttagagcttgtcatctctcctgtttacaaaacaaatggaaataataatttttaatagtcacaaggcacaaattccttgtgtaaattgccctggtggacagctccagtcacctcttgactgagccctttccttgaggccccactgccacagtccacctggctgaactcagccctgctgggttcagtctctacaacctcgtgttggatatgttggtccctggaccaaaatctttaatggttcttcatattctgcagaagaaagtctgtactcctgaggttagttctcgtgaatcttcctacagtgactccagtgttgtgacattgtttcactcgctcccatccattcccaagccccttcacatttgttactttcctttataaagacaaatctaagaactcactttcacagtctcttgcagctatgaataacttcaagaaaaacttttatgttcctaataacaagaatgaaagcaacccaggccacctctacatctttcttcttgtcttgagtgagtatgtgatgccgggaactatgcagccattttgtgactgtgaagcagaaagcatgaaggatacacagggttttgatgacattgtaggagagctagagagcacctccaatcctccttttagctattaatgagttctttacctggatctagaaaccatattgacatcaggcatattaacaagagaaaagtatacaaagtttattagttttactacatgtctatggggacttcacaagagagtgaagcctgaagaactggccaaagccagatgcttttatactttttagaaaaagagcaataaattttagaagaaatgacagaacaaagaaaatgtggccagggcagcaaaattgtctagggaagtcactagtagatatatgtgagggagtatacaataggtggaagataaaggttgctttgttaggtatgtttattcaggttcatcgtagcattcaattccaagtctctggtgataagggctatttcctctccctggtatggagagggtactcctcccagaggaatctttatagcttgctacatgcaggaagagataggtcagcttgtcctttctgaaactacaatttctcaatgttttcaactcaaaataatcaatatgccaattgagcgtatttggggatggcatgtccttcactcctttcacatcaaatccctgcccccaccctgcactgcctacctccaaccttcttaagtgagaaaaatcatcctttatttgcgtaagcctttattagttttctgactgatttcactaaccaatacatatattctttctctaaaaatacaaataaagaaacaaacagaattactattttggaaaatgattgagtcaaggagtatcactggctcctgaaaccatttggcaaaagttgatggcagaattttataatagaggatcaggctggcaacacctgaacccccagtcaaactgcatatcacaaaagagcaacaattagacaattatacgcacctggcatgtacaattgtgagtatacaatactaattacatagagtttttgccaaaaaattgaactggaatctgatcaagatcctaaactgaattaccaaattacagaaaatacgagggaaccaggaacaagttacaggataccatcagaaaaatccagaatgtgagaagttctctagagcatatcatgattcttcaatagataatgttgacaagggaaataaaaagagggaaccttttgattggaagaattaggagacatatcaatcaaatgcagtgtgccaaccctgtctgtgtagtacctgtttaagacaaatctacaattaaaaaatcttatcagaacaatctgggggaatttgaacaccaactggatatttgaggttattgaggagttactgttaatttttagctataacaagagtattgtgtttttttttttaaaaaaagaactgagtccttgagatactgcagtagaatcccaattaataaagacagaaggattgacagaaatagaaaattaccatgtggcaaacaccataataatagttgctgcaggcaacaatcattagtagattctaaattctaaattcagtgaataaaaataaaaagaaatgggatatgtacatggtctcataatatcttcccacaattgcaaagaaaaataattttacagagaaatctacagtcactacttgtattagcatcctattgctgtggtatcaaattaccagaagaatcttagtggcttaaaacaacacaaatgtagtgtcttgcagttctggaggtcaaaagccaaaaatgagtctctctggactaaaagcaaggtgtcagccaggctgcattccttgtggaatacccagggagaatctggttcctaccttttgcggcttttagaggctgaccgcattccttggcttatggccccgcatcactttgacctctgcttccatcatcacacctccttctctgactcagactcacctgcctcccttttcwcttataagaactctcctgaatatgttggggctgcctggataatccaggataatctcccaattttagtctgtttgggctactatagcaaagtcctacaggctgggtggcttatcaaccacagaaatttctttctcacacttctggaggctggaagtccaagatccaggtgctggcagactcagtgtctggtgagggcctgcttcttggttcacaggcagctctcctctggctgtgttcttacatggtggagtggcaagagagctctctggggtctcttttataagagcaccaatcccatttacaagagttctgtcctcatgacctaataacattccaaagcctccacctcctaataccatcacactgagggttaaratttcaacagatgaatttgccagggggaggagrggggagggacacgaacattgcctatatcactccccatttcaagatctttaacttaatcacgtctgcaggatcccttttgccatgtaaagtagcatattcacaggttctggggataaggatatggacatctttggggatattattctgcctaccataccactctaaccaactgatcagcattcacattggtagtaatgagacatagtgataccttgtgcctgctgatatgctgccctgagaagggcacaacattatttctgtagtattcttgccaaaaatgcataacctcaatctaataatgagggaacatcagacaaatccagattgagggagattctacaaaataactggccatactcttcaaatgggcctagtcatggaagacaagaaaagactgaggaactgtaccagctttcaggagactaaagacaaatgacaactaaatgcaactaaatgcagaatcctaaaatggatcccagaattgaaaagaacatccgttggacagttggtgacatctgaataaggtgtatagagtagttaatagtattataagaatgttaattttctgtttttcattaatgtactatggttacataagatgttgacatcttgggtagctgggtaaaagttacacagaaaattgtcacactacttttgcaactttttcaaaggctaagtttacttcaaaatgaaaatttaaatttgttaattaaaaatgataaacctaccaaaatattttttaaatgaaatgatacactaacttagatttgctttaaaataatccagtaaaaagaggaggaagtatatgaggttaaagacaaaatttaatgggccatgtgttggtcattgatgaacatgactaataagcacatgggttcattatattattctctctattttgaacatgtttgagcttttcccctataaaaattaaataaaaacaagaagttattattattgcataaaataaataaattgaatcaccagcttaaaatagttccacaaacaatctacctggtttactagccaggtaaagaaacatataatcttacagaaatgatttaagagtacaaaagatagtacacactctattcatttttatgaaatcaatataaatcagacaccaaaacctgaaaaataacgagaaagtaaattacggccaatcccactatgaaattatcagtagatgcaaaaattctgaaccaagtttagaaaggtaagtccagtaatattttaaaacattaatacataatgattaagttgggatcaatccaagaaatgcaaagttcatttaactttagaaaaatcaattaaggtaattcacattaacaaattagaggaaaaaactatgttatcgttttaatagatgcagaaaaacacatttattaagtttcaacatttactcatgattaaaactcatagtattccagactgaagaaaactagtgatatgacaaccaaatgcaatagatgatgttagattggatcttaggatcaggagaaaattactatcaaggacattattggggaaattgacaaaagtggaaaatggactatagataacagtattatatcagtgttaagtttcttgattttgttgactacattgtggttagtaaagagaatatccttgctcttgggaaatacagactgaagtatttaggggcaaaggagcataatgtctacaatttactgtcaaattattttagaacaataatgatgtctgtgtagatatctagacagagagatgcaaatgtagtaaaatgttaccagttggtgaatctcagggaaggatataccaaagttctttgtattatttattcaataattctcctgtatatttgaaattgtttaggaataaaaaattttaaaagagtctgcatctatggttgtattagtccattctcacgctgctatgaagaaataccaagactgggtaatttataaagaaaagaggtttaattgactcaaaattctgcatggctggggaggccttaggaaagttactttttttttttttttttttgagatggcagtttcgctctgttgcctaggctggagtgcagtggtgcaattcgactcactgcagcctccacctcctgggttcaaacgattctcctgcctcagcctcctcagtagctgggactgcaggcatgtactaccacacgtggctaatctttttttgtatttttagtagagatggagtttcaccatgctggccaggctggtctcaagctcctgacctcaagttatccgcctgcctcggcctcccaaagtgctgggattacaggcatgagccactggcccagccaggaaacttacaatcatggcggaaggcacctcttcaaagggtggcaagagagagaatgaaagacgagcaaagggggaagccccttttaaaaccatcacatctcgtgagaactcactcactatcacaagaacagcatgggggtagccgcccccataattcagttacctcccactgggtccctcccaaaacatgtgggaattatgggaactacaagatgagatgtaggtggggacacagcccaaaccacatcagtggtagatgccaaggacacatgaattaattctaaaatagatcaaaaaacttttagtaactagaattagaagaaaacctcttcgacttgataaggtgtctgaaaaaacaaaaaaactacagcaaagtacagtagggacatctgccacttatctgacagccatatgccccctatttcattttccaatcattgtacctttctttcmctctttgcctcactgcactggctagaacttccagttgcaatgttgaatagaagtagggaatagaaagcactcttgtcttctttctgatattaaagggaattatttttatcatttcatcattatgtataatttttgcttaattttatatttgcagatatcctttatcaggtaaagaagattcccttttattcctagtttacctattaaaaatacccaaagcactatatttattaaaatgaacaagagtatttagcaaggtcactgtatgcaaaacaggaaaaaaatggtatttctacatacctacaacaattttaaaaatgtaaatttaaatatagcatttacaatagcatcaaaatatgtaaatatctagcaataaatataatcaaagatgtgcaagatttgtagagtgacaattataaacatttgttgaaactactgaagatctaaataagttgaggcacatgccttatgtattagaacagtacataacttttggtctcagtatccatttatactctaataaatcagaagaccccaaataaattttatttacatgggttaaatctatctgtatttaccatattacaaattaaaattgagaatttaaagaaatgcattaattcatttattataaaaataacaacgaacctattatatgctaacatgaataacattactattaaaagtaactattttcagcctggcacggtggctcacgcctgtgttcccagtgctttgggaggccaaggtgggcagatcacctgaggtcaggagttcgagaccagtctggccaacatggcaaaaccctgtctctactaaaaataaaaaaaattagccaggcatagtggtacacacctgtaatcccagctacttgggaggctgagggaggagaatcacttgaactcgggaggcagaggttgcagtgagccaagatcgcaccattgcactccagcctgggcaacaagagtgaaactccatctcaggaaaaaaaaaaaaactatcttcaaaaaaaaaaaggtaagaaactgcactgcatctggcagaaagcagaaggcccctgagaaggattaggccctctcatcccaaccttgccaactaagcctcatcctcacttctggctggccaagtcagcttccgacaggatcaagcttacttcccgtgggttaggcccacttctggcaggtcaggcctctttctggagaatcacctcatttccggaatacagtatagtgctggcttctgatggattaggctcacttttggtagatcaggcctctttcgggagaatcacctcatttccggaatacagtatagtgctggcttctgagggattaggctcacttttggcagatcaggcccactgccggcagatcaggaccgcttcctggcttcccaagggtgaggtaggcctcaggccgcccaggcttgggtctctgacacttccatggccagtggggaggggtaaacttgtgaggtttttgatgtctcccactgtggccagcagaagaggtgggggagagacgaaggctcgtattcttgtccagattgctggggtcgcggggaagggccagcccaaagcacaccgatattgtctccatttggctagagccgttagaggaggcagtggtaagggttgtggctgggcttttcagttctggctggtacagctattgctggcatgctactgtactgtgatcgtgcaacttctgtgtctactaatgtgtactctcatgtaggaaccctatgtgctgaccaccgttggatgagatttagaattctcatttaatcatctcatcaactttaagggttgcaggtgttgttaaaaccattctacaggtcaagaaattgagatgtagaaaagttggttaccttacccaaaacctcataactggttacatggcagagctgttctcagcttttctttaagcctctggggtcacaacttgcagctgctgtcataaaatggagcagtcaattttttttgtttttttcagctgcagaactyctctctctcaggagggaaaccaattccaaacccagcctcatcaggagagaaaaatttttttttttaaatatctgagagcacatataaatggtaacggtacttaggaacctgtactgataatcaaaaaaattgcatattctgtggcccagccattgtactaggaatacatcctgaggaagtcctcagagacgttgagtacacatttgttcacacagatgcacactggagcattacaatataaatgaaaaagtgaaaaccatcctcaagtctaataataaagggctgatttaattatacatgtggtttaaatatatatccctagtataatcattgctaagatatactgagtgcttaccatatgccactcattgatttaagagctatacatatattaactcatttagcctatgtgatcgattagagtgcgattgaataggaatatttaaggcttgagaaaatgtttacgctctatcataatgaaaaaagtgtattacaaaactattttttaaaactgtgtagatgcaaaaagtcagtagttagaattaaaatatgaaattgctgtttttattttcttttttgccatgtggagaattttctggattttccacactaatcatttattacttaaaaaaaaaaagatttaaagataaaagcatagtcagggtattaggccatgcctgagagcctgatgcccaagtgagtccagctagtgctatggccacagggagccactgacccctggggctaaccatgagagtccttggcaaagtgaggagacccaactgggacctctctctaccgtgggccctgcccactgccttatttgctcagaagctctgctgctgtgaagacctggttccagggtctgggtcaccagagagggctccagtcattctggccagcactaaaaccagtcacagaggttgacgctttcaggactaagatcaaaggtctgaatccagctttccgaggcattcactgtctggctcctcctgacttcttggccccagttttccactctccacagcccttcacttcagaaaggccatttcctcctaactttccccgtacccatgatgcatccttctccgcattttccaaactttctcatcctctactccaaaaatatcttttttgttgttccaagcatacggatgaggctgacaaaactggtgatagtattgatggaactgctataaacgccagggtaatagcaataacaataactaccatttattgagcacttacctcatgctgtttaaatacattgatcccatttaatctatatagctcatctgtgggcagatactagtgtccatctttacagataaaagatctaaggatcaaagaggtaaagtaaaatttccaaggtcccctcatcaataaatggtggaaacagctgggcacagtggctcacgcctgtaatcccagcactttgggaggccaaagcaggtggatcacctgaggtcaggagttcgagaccagcctggccaacatggcgaaaccctgtctctactaaaaatacaaaaattagccgggcgtggtggcaggcgcttgtaatcccagctactcgggaggctgaggcaggagaattgcttcaacctgggaggcagaggttgcagtgagccaagatcgcgccactgcactccagcctgggtgacaagagcaaaactctgtctcaaaaaaaaaaagatggaaacaaacttcaaacccaagtctgcctgtgcagctcacaaagcactttcctattcatgacctccccagatcggcgaggatggctgcgcaggtgtgatcagccctcattctagctgaagaccctgagtctggttgctggtaaatggtagtgggggagggagtctattataagaatccaggtctccggaattctaagatgcagaagacattcattatgctcacagacttatcatggctgtcttaatgtgaattcaggccaatccgggattcagaattttatctactcccttaagtgcaattgtgaattcatcagtgcccaggaaaggcactgatggaaaatgtcacactgtgaatggaatgtcagatatgtgtatgtaagtgtgtgatatatgcgaatatctaaaacagtctcatgaagaagtatctgccaagaagctgggcataaagaaatttaagattaaatttaaggaggaatatacagttttgcttctttttctaaaaatacaaacaagtaaaacccactcaggttcgatgaatggggaatagaagtctccccattgtaaaggagtgacctttgaccccaattgtagggaacttaaactacatccctgaggagtcctgtgttctagagtggatgtgatgataagccagtgaacagtgattattcataagtctgaatggattgtcttcccatgctacagttctggaccatggctgatctatttcttgcttacagaacactcatgagccatgaattcgttgtgttggactcccaaggcaggcccagccctgcggttcacctcttccctacatgtctgtacaaacatatttggttcattgtttacttagacttggcaacttcctgtcaatgtcccaggagaagcataaagcagaccagaagtggaatgagttagttagtttgtttgtttgtttgtttgcttttgagatggagtctcactctgttgcccaggctagagtgcagtggtgcaatctcggctcactacaacctctgccttctgggttcaagcgattctcctgcctcaggctcccaagtagctgggattacaggagcatgccaccatgcccagctaatttttgtatttttagtagagatggggtttcatcatattgaccaggttggtcttgaactcctgacctcaagtgatccacccaccttggcctcccaaagtggtaggattacaggcgtgagccaccaattgtagtacaatttgaagtcaggtagtgtgatgcctccaggtttgttctttctgcttagtattactttggctatgtgggctcttttttggtgccatatgcattttaggattttttttctagttctgtgaataatgatgatggtattttgatggaattgcatttaatctgtagatttctttgggcagtacggtcattttcacaatgttgattcttcccatcatgagcatggaatgtgtttacctttgtttgtgtcatctatgatttctttcagcagtgtttttgttttcctcatagagatcttatatctccttggaattgaaccatagttttaaatgcactttttaagtttgatagttaaggaaatagtgttgtgaattattttaaagtaatgactcttccaaactaattagcacctaaatatttttataacagttttattgagatatcacatgctttacaattcaattttaagtgtgcaattcaatggtttttagtacatttacagaattgtgtgaccgtcaccacaatcaattttagtaaatttttataatcccccaaagaaactttgtattcattagctatcactccccaatctcctcacgccacctcccagtcctaggcaaccactaatctttccatcttcatagatttgtctgttctggacatttcctatatatggaatcatagaatatgtggtcttttgtgactggcttctttcattttgcaaaatgtttttcagtttcatccatgttgtggcatgtatgagtgcttcattcctttttatgacaaataagatgccattgtattgacatgttacattttgtttagccatcagttgatggacactaggttctttccacctttacgctattatgaataatgcagatacaaacattcacaggcaagtttatgtgtaaacacatgctttcagttctcttgggtatacacctaggaatgtgttaaaatagttaattgggaggctattaggctgagacagctccagcacattgggttcctatgtaagcaaaccaaaacccaatttgatgtaaacagtaaatgaaactaaagcttaaccaatcagaagccaccaactaacctctaactaaggactttccaccttaaccaatcaartattttcattgtcttgcttccacaaacaccttataaaagtttcttcttgcacgccttcactgaactgctgtggtctggtactgatgaattcatgaatcactgaatgctcaaataaactcattaaaaattttcatgtgcctcagtatttatttatttagacagggtttcactcagtcacccaagatggagtatagtggcatgatctcagctcactgcagcctctgcctcccaggctcaagcagtcctcccacctcagcctcctgggtgggaggagtacctggtaccacaggtgcgtgccaccatgtctggttaatttttgtatttttgtagagacagggttttgctatgtcacccagactggtctcgaactcttgaactcaagcaatcctcctgccttagcctcccaaagtactgggattacaggcatgagccaccgtgccccagccctcagtttgtttttaacaagtggaattgccgggtcaaatgataaccctgtgtttactttttgaaggaactgccagactgttttccaaagtagatccaccattctacattcccaccagcagcgtgtggaacttttgcttcctccacattctcactaacacttgttatctgcttttttgaggaaagccatcatagtggatgatatggtttggctgtgtccccacccacatctcatcttgaattctcatgtgttgtgggagggacctggtgggaggtaattgagtcatgggggcaggactttcccatgctgttctagtgatagcaaataagtctcacaagatctgatggtattataagggggagtttccctgcccaatctctctctttgcctgccgccatccacctaagatgttacttgctcctccttgccttctgccatgattgtgaggcctccccagtcatgtggactgtaagccattaaacctctttcttttgtaaattgtccagtctcaggtatgtctttatcagcagcatgaaaatggactaatacagtggatgtaaaatagtatctcattgtggtttttattagcatttctttgacggttgtgctgaacctcttttcatgtggttgtatatttggacaaatgtctattgagattctttgcccactttttaattgagtttgtcttattgttgagttttaagagttctatatattctagaatacaagtcccttaacaaatatatgatttgcaaatattttcttccattgtgtgtgttgtctttcactttctgaatagtgtcctctgtagcacagaatttttaatgttgatgaatttctatttatttttttcttttgttgttcatacttttgatgtcatatctcacaaaccattgccaaattcaaggtaatgaagattcacccctgtgttttcttctaagagttttttatctctcaaatttaggtatttgatccatttttagtaaattaggagtccaagttcattcttctgcatgtggatatctagtcccagcaccatttgttgaaaagactcttctttctctgattgaattattttggcacttttgttggacatcagttgactgtaaatgtaagaatttctggatgcttggttctattctactgatctatatgtctatcttaatgccagtaccacactgtcttgattactgtagatttataggttttgaaatcagaagtttgagtcctccaattttgttcttctttttctgtatcattttggctattctaggtcttttgagtttctatgtgaatattagaattaatttgcccatttttgcaaagaagccagctggggggcagggggtggttgtgtgtgctgatagggattctgttaaatctgtagatcagtttggggagtattgccatcttaacaatattcggtcttctgatccatgaacatgagatgtctgtccatctttttacattgtctaacatttttcaacagtgttttgtagtttatagagtataagttttgtacttcttttattaacttcctaagtattttattcttttttattatattaataaatggaattgttttcttaatttcatttttggattgttcgttgccagtgtatagaaatacaattgatttggctgggcgcggtggctcacacttgtaatcccaacactttggggggctgaggcaggtggatcacctgaggtcaggagttcaagaccagcctgaccaacatggtgaaaccctgtctctactaaaaatacaaaaattagccgggtgtggtggcgggtgcctgtagacccagctacatgggaggctgagacaggagaatggcgtgaacccgggaggcggagcttgcagtgagcggagatcatgccactgtactccagcctgggtgacagagcaaggattcgtctcaaaaataaaaataaaaagaaatacaattgatttgtatataaattgtcattgtatactgcaattttgcccaacttggttactagttctaatagttttttcatggattccttaggattttctatatataagatcatatcatctgcaaatacagtttttcttcatcttttactatctggatgccttttatttcattttcttataccctaaatcttaaaaaataaatcttaatgttcattttttgtttgcttaaagcaaagttcagtatcaattatatctcaataaagctgtttttaaggaaacatttaaacttcccttaaaaccatcacatttgtgtgcgggggaaggtgggagggaagctgttaatatgttggcccatttccttctaagctttttttttctaggtatatttggatgcttagccataaatataattggactcatattgtatagatattttagtcctgttctcaggaactcaatgcacagtcaagccgttctcaggattaagaggctttatgaacattaaaaacaaaatcttagccttattgaatgacggtgtcctggaacaggaggcggtggagagactgagtgcagctacacacagagcacccctactcctgcggggtaggggggttgtcccatggcctcggggacagcacagcacccaagtccctgcatctctctcgtaggagaaaatgaaggtcacacaggccgcctggatttcatgggctcttttaaatgtctaaatacctctaaatgtctggtttttctgctattctttaatccttagataagggttcagagcctgtgcttccaagatgactttgggaccagggtgtatgaggaggtaggaaggcgtggcccctgcacgaggcctggctgggaaacgccgctgtgatcacatcgttcatcactcactgctgaccacctgacagttttccaggaccaagcctcctgcactgtgtgattctgggaacatctcctctggctcacaaggtctgaaaagcaaaccagtcagctatggtatggaaaacagtttttactgccagagttcttcccagcaggttcttatgtgacttgtttgtgcttcagcttggccctaatcagttcatgttctgggcaaaggcactcgctaaatattatttcagcagatgtaacatttacattttccaatgtcaataagaaggcctcaaaagcaggattttttgtaggggcaaaatattacattgtctgattagatcataatagatttaaccagttcctccaaaaagagactggaatctctttgatggccacaagcactgagttcttaatgtacttccttggataaggctgtgtgtcaccagcaatggtggccagcactaaagctatcctccatctttccaacaaggacaattcacagacaagccccatcacttaaagacatggccagggcttcccagggtgaggtctggccctcaattctggttcttctataaaattcacaaagcctgatagtgtttggccacagaaaaagagagagttttcccagtgggacatgttagggttgaacactttaaagagagcaatttacttctaatatcaattctgaaggaaagcagtaaggaaattcctgtcagacctaggctgtttgtatttacaggaacctacgcgatcgccaggcgacccacacaaatccatccaggtgccagggtgtgagtcaacactggtaactcaacagggacagaagggcagacacaggcctggaaatcgctccatgtgcctaacaaattccccacagcctcatggcatttcttgtaggtttcatggcatctggagagaccctctggggcttctgcccaccatttttgcctggctgttacctctgtgggccatgtctgcagagaactgtgcttgtcatcctcccagcctcggaacactatcatcactgacagggcacgtgacccctcttctggctttttttttttgcttaagattccttttgctcccatacccatctcctcaccagtatgtttgagatgtatccctggatgtgtacctggctgtctggtgtcactgtgtgtatattttatatttgcattttactcggctttagtcctggctcattctacttcttacttgctgctgctgctgctgctgtgtgtgtgtgtgtgtgtgtgtgtgtgtgtgtgtgtgtgtgtgatagtttgtgactcctcaggcctctgcccattttatgtcaagaacatcaaaaccacatatgaaaatcacttgagcagttttgtctggcactgacttgctgagatcccaagacctagggcagtgttatccatgttcttcccaaggggccagtcatgtcaaatgtgttgtcctctggtttattttgaacggattccttctcctacccactaagactggcacgtatttaaaatcaggcacatgaggactccccctatggataccacaagaaccttgggtgggggctgaggttacacagccctgaaaaggtcctccagtggtccagatccggggtcccaggtcagggcagctccccacatctggcaggaaagttgcacgccacctgggcagctctgcagcctcagccacagcactcactcctgagcctcccctctgcatctggcggggcagtgccaaggagaagggctccaggccacccccgccctccccactgggcctgcgcaggccccacagtatgcaacagctgacctctcctcagaggccatgccgaagggaaggctggctctctccagtcctcaggagacagatgacagcctcaggccaccaccccttttcgagtctccacaacacaaggcatccgttctgcctctttttgccatgacagggcatcagccttaaaaccacaaggccatcttcattcctacttttggctataagtggggctggaacaggggtcaagaccttgaacaggaaagtctggctcttttcctggaagaaggaaaatacctttcatttttccctaataaaccacaaacccactcttctgcccccacccaacaaggattaccagaagcacttaaacaaagacccctgaactaaacaaccaaaatttcacagtcgctcacccagcaacctgccacactaacatttactgagcttatactgcatcctacatgctctgctaggcgcttggtagatataatctcattttatcttcaccacaatgccatgaggtagagacaatcatccgtgttctccaaataagaaatttgactcttaaaaaaacaagttagggaactttctcaggatcgagtgagaactggcacctacctgatgcacatggttgagattcatataaattatctgggcggaatagacttttagaacctgatgccctattagaaagtcgcatctacctgcaaagtcttcctctcagtaagcaagtatggcctcactggattattccagcatgcattgcctgcccctcccaggggatgtgctcaaaacctggctctaggaattcatcctgtggttgtcttgtcctgtgctggcctcactgccttcctcagactgcacagacccaagctctttcagaaaatgttgtcaggttggccacgcagaaattcatatccttcttctccctcctctcactttgagagattgttgctttttagcgatagaaacttctagtaaagggaaggccctagcagtggacattcagcagtggatagccacagactgtcccccacccctgcacttgagaggctcccaggtgctgctgaggtctcctgcaggccaggtttgatgactttgactctctgcgggtctcacttcttttgaggacaaactagctagtgactgttccgggccatctgtggccatggaagccagagcatcacgcatctgctgcatctttccatctacggaaaattaattccaaaaaacagacttttttttttttaagaccgagtctcactctatcacccaggctggaatgcagtggcacaatcctggctcactgcaacctccgcctcctgggttcaagagattctcgtgcctcaacctcctgggtagctgggattacaggtgcgtgccaccacgccaggctaatttttgtatttttagtagagacagggtttcaccatgttggcaaggctggtctcaaactcctgacctcagtgatcctctcgccttggcctcccaaagtgctgggattacaggcctgagccaccgtgcccagcctgaaaaaaaaaaaacggactctttatgaatccatttgtaaaggcataacgttggtacatttctttgccacagggatgccaatgactaggccagccaccttgaacatgggaaaagtgtttcacatcaatggcacgagagatctttgagcagtaggtggggaagacaccatttcaatctgataagtagagaaactgtggcaaagagaggagggaaaacttgcttttctcatcagagctggagagcagaacctggtctcacgattttttccccagatgaggtttgtccacctggtactgcaaagacctgcaccaagttcatgaccctcaaaacgtcttttacttcttaaaatccaaaaacgttgatctagccccaggagtttactgcctctgcagctgctgaagccagggctcccctgtgggaagggcctgatgctggggctgcactgcctcctggtgcccactgggagttatgtccccagctctcccacctgataggggagtcggggcccatacttggcttcttctgcctcatcttcctcacatacacactcctctaaatggacagaaggcgacagggcacagggaggggcctcaaaggcctccactcacacccccattcccataaccagaccacctaccagacagtgttgacatatttttattaatttatttatattttttgagagatagggtcttgcccaggctggagttgaattgctgggctcaagccatccgcctgtcccagcctcctgagtagctgggaccaacaggctgtccatgtggtcaaaataagcatggtgagcccagtgtgtgcagtcacaacccatggaggtccttccatgagtgtctgtcaaacccaagccgacactgcctttctccagagaggtcccacatccatcaaggacatgatgaggtcactggggactcttaatccagtgctccacttccaatggccaggctgatgttctgaggacaggcctgtatcttccccctctgtagccatcagggagttgatgccgtctgtggtccttgaccactatccaaaatgggaacccctagggtgatctgtcatcccctgtgcttctccctggcccagtcccacccctccccagcattcccatctgtgccctgcactctgccccgcaccccatcccacagtcagcaaactccagactgaagggctctcccaccttctcctctctccagctcttctcatgccctggcctccctgtgatgttcaggccctggtgagagtaagtgagaagctggagaagggactgacccgcatgcaggctggccagggccagaacaacatgtataggggctgtcagccctgcaagatgagcgccaccaccacccacctatccaattcaaaagaaaaaccagcttaaactctacacaggtgcaatgaaggtcaacaaatcctggtttcccataagtgatttgatgtctttttctaaaacagtatcaaacttcaagctttttgcctcccaaagctttagcaacctaagcggcatctgatgtgcctgttgggcaatgcacacatctgaggaggtgggaggtgaggccaagcgtggggacctggggcctggtgccctgaggtgaggacaggagtgggtgaggaccagtggtgggagaggagagtgagcttgtgctttcagagggacagggcacaggcaggggctgcagtgaagcaggagaagttcctggagatgaggggaccacgttggcctgactcctgcccccacctgctaaggaggagagaggggtctctgggaagctaccagagtctccctcttgttgtgctgacctgggcagggaacagacaggatgggattctagaatagtcccgtcactccctgacttggggaagcttgggaccagcaccctaaggcccagaccaggcccaggccaaagaaagcacagggagaagaatgaggaagttgatgagtaacctatggtgttcccagggatgtgagggggtgtgagggtgcagcccctccaggcccaggcgcctgctggctgctcagagggacgctgtgcctcactggtcctgctgggtttgcgatgggctcaaatcctgtgccttccatttgcatgactccagttaagtcattcaattgcccctggcctaaaagaggtgaatgggaggtagaggagtaaacgcaatgggttttcactattttttaaattatgggaaacaatatattatataaaatttgccatgtaaccaatgtttaacttacaattcagtagcaggcatgacatctccccaaacagaaattctgtacctattaagcaataactttctattttcctctccctccagccccaggtaagccataacctactttctgtccctgtgaatgtgcctattctagatatttcattgtgaactcatgcagtatttgtcctttcgtgtctggcttctttcacttttagttaagtttttcccagttcacccacctggcagcacgcatcagactcacattttttaaggctaaagagcattccatagcagggaataccacgtttggcttaccattcagcctgttaacgtttgttcgcgggccctggggaacagtgccgtactgcccctccatccgctgggtccttgccttactcttcggggactgcgggccacggggagattctatgcttaacccctgggggaagcacactctgtgggtgctttcttcatgctggggtgtaacgttctgtttcaggcgtctgttgcttttgtaacattcttaaacctcttccctaaatagagaaagagactagacggccctggagtatttctgaaacaaaataaaatcccactgctgaatggcgtgggtcgcagggtcgcgctccaaaagccccctgggggagcccactcctcgcgacccgcaaggaggtgctgccaccttctgtggcaacggcctcggccgctgctgaccctcggagggtggccccatgggttccagcccccggcgaccctaagagaccagrggccccacggagaagggacccacaggcgcggggctagggggcggctacggaatcctagggtccacccggaggtggccagcgcgggcgggggacacgtagagcccaggctggggtccagtgccacttaggacgtggggacggaagcctgagggtttgagtctttactgggccctcggaagggaacactgattttgaccacgcttgattttctgcagactgtgaccctgcgctaaaaagcgtccctctcatgatgcttcgtgcctgtttctctgaggccacgcggtcctggagggcagaagcgtagtgtatgtgcgtgtctggtgcagagtgggcacctgcacccatgcccccagtgacctcgagctcagaggagggagggatggaaaagaaaaggctgcctcacagaatggagggagaagtgaactgggagcctgacccctagacaggtgtcaatcctgctgctgattccatccaatcaacccacagggtctattggcaccaaagggggccaggcccagggacactgaggtgacccccctttgaattcatttgaaggaaaatgcaagcacaacagcctgaattggggactttgaacttaatacaaaatgcaaagtatataaatatgaatacatactgaattatctaagagctctatacatgtttttaagtcttattaaaagctcactaaatttcttcacattttgatcattgtactgttattacgggagagtttctaggaaatacacacaaatatttagtataaggcgcatcaaggctgcacatgactcaaaaatagttcagaccaaaaagtgttttcagcaacctttttgtaaattgtttgaaattatgccaaaatatgaagtgaaaagtccatttaacagtctgtaaatggggaaggggcatttggcaatctgttgggggtaccagcaggaagccagcactgggatgagggggagcacgtgctgggatgcagggtttgtatacatggccatggagtaggggccagtgtaaacctacatccaggttgggcagcaaggaggggtggaaagacttggagtctcatgatggcctgcctgcatgtggggaaaaggagtataggatgacagcaacatagccaaagccccaggatggcccacctgttatgcctggatctggtgcatgaggtatgggtgagtctgattcaaaggcccaggttggctggagaactggcacctcatttatccattccctgggggaaggcagatttgcaggctatccgaggtgctgtgtggctcacagtggttctcagtgaccacatctgtaccaccctccttactggagctgtcaaagttcttccctgagactttccaaactctaaggcagagggagagatcccattcccttctctggtcaagagactataagggatgtaaggtggcctttagagagatctggtctgagtggggaagaggcaggggaataaaacattctgcatgatgcatccaggaaacccatacagaggcttatgaacctaaaaatgatgcatttgctggctttgttcatgttggtacagaagcctatagaaacacttgaatatttaggcaagatatatatagaaatattcactgcagcattatttgtaaaaatgaacagatgtctattacccagaaaatggataaaatactgtggcagccaccttctagtactcccactcttgtacagtcccttcacgcattgaacaggactaagctgcattagctacagcatattgggaaattatgtgtgtgactttcagagccgggccataaaagccatgtggcttatgccttgctctgtcttggattacttgctcagggagaaagccagccaccatgtcacaaggccactcaagcagccctggtggagagaggtccatgtggcaaggggctgaggacacttaacatcaacttgccaggctgggcacggtggctcacgcctgtaatcccagcactttgggaggctgaggcgggcggatcatgagctcaggaaatcgagaccatcctggctaacacggtgaaaccccacctctactaaaaatacaaaaaattagctgggcgcagtggcgggcacctatattcaggagtttgaggcaggagaatggcgcaaacctgggaggtggagcttgcagtgagtggagatcacgccactgaactccagcctgggtgacagaataagactccgtctcaaaaaaaaaaaaaaaatggtaaacactaacttgccagtgatgtcagtgagccatcatggaagcagataccccaggcccactgaagcccacagttgactgcagcctcagccaacatctttactgcaacgcaccctgccagaccacccagctaaaccacttaattcctaacctgcagaaactaagataatgaatgttactattacagattgttgtggtttaaattttgttgataggattgaggggcatttattgtggaaaaatggataacaaatacaaatgttagggaatcacacagtgaaattttagcttgcttgtttttatgaagaggtgaaaatggccatgtcatagccttctcatgagctctagtttagagtctatgtgaacgctctgtgtttgcacacagcaagtactccacaaatgcttattgctgtgcttttccaattttgtttccttcccttagacttcaaagtgagttctcactcccttgataggcaggtatttttcccagtttgaatatactgtctaaaacatttgcatttggtgtgattagttcatcagttcttacgagttggagaaaaaagcctcctatgtccttttcaggacacgagctataatcgggccaatcatacctgaatggagactacagaaggtgaatttttatcagtggtctccattccatcttccaagcacccgactcttagggatggggtctaattaggcactaatgaggtggagatttgagacagaaaatgccaatttgagtttgtggcacttctgcccagcaatacaaaggtctaaggaagatttcatttgtgtctgggtgagagaactgtgttcctgaaatatttagttttgttttttaactttatcaggctaagccagagatttgtataatcacattgagatttatccctatggaaaaaaaaattctacagctcccactacgtcccaccgatatattccctgacttctgaaacgcagggaaaacagctcacattaacaccagaggccatgccagggtgctcattgcttcactcaccatttgccaagttgcctaaaactactggcttatccaaggcacagggaacttctctgtgctacactagagtagagcatatatttaaatatgaaagagatcattaaaaattcaaagacaacagaattaaatgaggagtaaaaaagttgtatgcctttgccagaacaagttagtttggtatccccacacttgggtgagagccagcccctaacccaggggaatctgtgctctacttacgtgcaaatctcccggtgaaatgctgctcccttgcaacacacttggacaaaagggagctaagcggggtggcccacctcaaagagagaacaaagagaacaaaaaggaagtttcttggtaatgcctgaccaccctgcctctgctagcctcctcatctatgccacatcttcacaaacctctgctctcagaggtgtcagctactgcctcttcccaccccaaaagggtttcagaaagcctgagtggcattcgatttcggcaggtccacaaacagcatctaaaacagaggttccgtgtggccaataaggcttcaggctaccctttgggagcctggcacagaacaaggtctcttttcacttgaccctcctttgctaatacaagcctgcttggctgggtccagcaccctatggggcaaatattcaggccaagaatagtcttcattcttcccatgaagctttcaaagtcgtctaaagaacacaggaaattgtcagcccctattttctgctgaaaatggctgacactaaactttgaacattctatggatgaatcccaaattacaggaaccaagtttgcttgaaaagcagcaaaagtttttgttaaagatgagagactttaaagatgataaaccatctcggcattacttacaaagaatgacgtattttataactccaattactaacacctttcctcttttgaccaaagttaccttatttccatggaattaacttcaaaagactatctctgtgcacaaagaagcagatccagagacttatcatggcactatgcacacttcctaaaaataaactgtcactaaaactgagaagaaataatactttttggtctgtcatgaccccagcagattatcacattctcaaggtccggacaccttaatgtgtgcagtcacagtgtaatcctcactccagtcacaatgtaatcctcactccaaacagcaaaggcatggggcccattttatagctgaggaaacattcagaaaagttacatgcccaattcacagagttggggtctaaactgagacaattagtgtgtccggtgctttctgcttctccaggctgcctggtggccagctgcccctcttaatcagggagcatctgctctgtgctaacaactccgtagatcatgcttcagaaatgtggcagtgagcagactaggtgctagtaaggcataagatttacacacaggccctggtgtcaccaagaccagttcaaactctggttctgccagttaccacctattgaataagctactaaatattttaaaccctcagtttcctcatcctttcgcagatgaggaaactgagggtttaaaatgtttactaacttattcaattattagataacatattaagttatattaacagataacttatccaattgttatctattaaggattaaatgatgataatacatgtaactacttaggttaccatctggaacaggacagttatgggaagttgttataacaaaagaggcaggtaaaattctgaatgaagtataaggacttacatttgcaagcttttaattagaaaggacttcaatttactggtgtggcaaatttttctttcaaatcaagtaggacaccacagcagtcttcactaggaccttccttggtgattcaacagtaactattaactatccacatactacttagatcgatcgatggcctccaaggtgtagagtaatacttcattggggcttaggaactaacctttttgttttactctttcaaattttattacataatgttcataatagtgtagcagtacatttgttgacacatattttcattgatcaatatgttacaggaagtcagagactccaaatggaggggccggctgaagccatggcagaagaacgtggattgtgaagatttcttggacatttattagttccccaaattaatacttttataatttgttatgcctgtctttactgcaatctctaaacataaactgtaaagatttcatggacacttatcacttccccaattaatacccttgtgatttcctatgcctgtctttaatctcttaatcctgtcagctgaggaggatgtatatcgcctcaggaccctgtaataattgcattaactgcacaaattgtacagcatgtgtgtttgagcaatatgaaatgtgggcaccttaaaaaaagaacagcataacagcaattgttcagggaataagagagataaccttaaactctgtccaccagtgagctgggtggaacagagccatatttctcttctttcaaaagcaaatgggagaaatatcaccgaattctttttctcagcatggaacatccccgagaaagagaatgcgcacctgggggtaggtctctaaactggccccactgggcgtggtcgtctcttatggtcgagactgcagaggtgagatagactccagtctcccatagcgctcccaggcttattaggaagacgaaattcctgccgaataaattttggtccgatggttgatctcaaaactctgtctcctgataagatgttatcaatgacaacagtgcctgaaacttcattagcaattttaattttgcctcagtcctgtggtcctgtgatctcaccctgcctccacttgccttgtgatattctattaccttgtaaagtactttatgtctgtgacccacacctatttgcacactccctccccttttgaaactccctaataaaaacttgctggtttttgtggcttgtggggcatcacggaacctactgacatgcgatgtctccccctgacgcccggcttgaaaatttctctcttttgtactctgtccctttatttctgaagctggccaatgcttagggaaaatagaaaagaacctacatgaatattggggcagtttccccgatatcaatacatataactatggacactcaaaaatattttcataaggaaacaacatcaggtttggaggctgtgatctagataactttctgagtcaacattttgctcctgatgcattcatggctatcaagccatctttcctttcttcccctcacctaccatattctgacttctactcctagattaatttctccaagaggacagaacatattaagatgtggtgggtcagaatgtgcaggtggtagtggtgacacccagctaatgagtgtgagaggcatgggtctgtatctcctcagctttcaagattacagcctgagctacacagaaagaagctctgtgtccattttattagcaacttcacaacttgcttctgaacctgataaggaagcaatgatatcccattccactaggtggcagcaaaactttacccacaaggtgcccaagtggttcactggtattattagtgctaacttgttcagccccactttattagcagaaagacagtggctaacaggatacttcaattacataatgcctctgacagtggagaacagacactgccgttttgctttctacaggctggcctttccttaggcctacctgaattttacatgtattgtgaatgatcctttcagaaatccacagaccaaatagcaaaacgagccttctaatatacttaagactggagtcaacaataaaaagacctagtaaagttatatagatcctacatcagattcaggtgacaccctgggcatgccatggataaaaacttctgaagttttcattaggatggtagaataatgaatgcgtcttagaaatctgttattataatatatacaattttgaaataatatttcccagaagcagtagtacttaatcagttaggcaggcagtctgtataaattttttacctttgcattctccaaattcagtaggttgttcttagcctccctaaaaccaaacatttttggctagaggtgttaacccaatctctcaacacaaacactgaaaaaaataaataaaaaacacccaaacaacaatctctgatattgacttataattattccctctgcttaggtcattaatttaaaaagtaaatagggtaaaacatttcaagataataaactgggctacattaattacacttaaattatgtattatgttaaaatctacatcatttgaycttgagaaattacaccactctctttccagttaaaaaattcagtttccagggacttgagagtatacctaatctgaatgagttagaaacttctcagaggccaggcatgacggctcatgcttgtaatcccagaactttgggaggttgaggtgggtggatcacttgagcttaggagttcgagatcggcctgggccacataatgaaaccccatctctacaaaaaatacaaaaattagccaggcgtggtggtgcatgcctgcagtcccagctactcaaggggctgaggcagaaggactgcttgagcccagagggttgaggctgcagtgagtcgcgtttgtgccactgcactccagcctgggcaacgaagcaagaccctgtctggaaaaaaaaaaaaaattgttctcagaaaaataagcatacaaatgagagatagaaatgaatagagagatatggtatctcttaaattagaaaatcagcacaagcatataagagatgtcatcatagaggaggcaaattcaagttgaaaagtttcttcccaaacatactctactcttgtacatcgactgtggaatattgaagcccccacactctattacatcactacatggcttattatgtgaattttttacaatacaaacaaaacatacagaaatgcaatatatgaatacagctaaacgcagaatggtgactttttttctcttcaagaggccatgattcccatttctagtaaaataaagagactgcatataggtagaaacaggttggtcattagctttgcctagaaatgattttgcctagaaatgatctataaatgcattttccccctgctacttaccataaagtgtaaaaagggagttaatgcaaagttttcttgttggttcctaccatatgaaagatgctgtattctattttagcagggccaatatatggaaaatatctaaattaaatgttattacaaaaatgaagcagtaatgagactctggctaaggagggcactaaatgagaataatatatatttaaagaatccaaaacaaacaaacaaaaagagactgttataaaaaaaaaaacctctaggtgcactgtaagcatatagggtttttttttccccatgtgtatttataaacaatggaaatgtcaaaaaatagggtcaactgtgttagactaaattatattattgtatatgctgcattgaatggaacctttgtattatagttatcatagagaagcacagtttgcatcatattatggcaatttatcctcaatgaaaaccttccagagtccttttttttggaatatcttgtaaaaaatcaaaccaccagaacatgattgtacaactgtaaaatgttcttttgcattaaaccaaagatatctgtttaataaaaaaaaaaaagaaaatgtaggaaagctacttagagctgttactttctaagtacagaacaccctagacaattcgaggcatcttaatctccatcaagaacaacaacaacaaaaataatttttgtcatgctgttaaatccatcattatggataaaactagtgcaaactggtcaaacggatccaacgctgatgtccaagctggcatattggcaactaatacgtaactggtggtcaatagagggtttaaaagatctgccctttcttcttgttcttttccaaggttctaaatgatgaaaggaaaataawcaagatgagtgaccattttataaacatgatagacaacatgataacaacaatagctaacccaattacaacaatgttgggattttcagatrctactttttcatttaaagaaattacaagatttagaagtaaacaactaagacaatgttaacctatagtagtattttcttagacaatcaaatatttgacaaaattccaggataagcagtaaaaaatatggcaaaatcccactttaatatacaagaacaattcttcccaaataaaacagcacaaactgaaaaacatcaactggcatcaaacagggtgttcttttcccccactgtcatttgcattctgaagtgcaactgcttttacaaatctattttcctcttctttggggaaaatgttaacagtaggctagtgtagtagaacaaatgtcaaatctgaaaatgtttagtaatgaggataaattatagaatccttataggaatcccacttttcagttttaaatgaaactatgaaggaaaagaaaatcaaggtacaaatattgaattttgtataaattgagagaaagtaactgattagctgtattggaaattaaatatctaacattttgtcttaagaattttatcgtaaaaacataattcaacacaattaaaatgtacccctaaatatataatagattttgagcaatgttccctttgtatgccaaaatttgaaaacaacccttatgtccaataattggggggaggaggtaagaaatccaattcaggtgagttaactggggagaatgttatgaagttgctaaatcataattatgaatattaagtcatgaaagatgtactgaaaaaatactgctaatggacacagactgtatccatccatataaaaatatttatccatggaaaccgttgtgtttggaatgcatgataatgggtgatgactttttaagtgttattctaatgttttttaaataagtaggaaaacaattctttaaaacattaatacacacatttcttagtaatctgctattagttaccttgaagagttctgttgttctaaaatacgttgttgagcttcccagtttgctttctcatcctcaaactgackacgtttttcctccaattctttgtgctgtgcttccaaattctttttcatttgctcatggcgccgctggagctaaatcatagcacaatatataaaacaaaactatttaagaaaycagaagcagaggtatgtttcatccagacaccctaatgataaggagtatgagcactatttgaatagccctgttgtaaattcagagtactacctggaaagcacggtcaaggactcctcctattttaggacctgccacggaaaaggccagtgacccaagacaataatcttgggaaacagggggaaaaaaagaagcaataaacttaacaatgtgtggtactttataatggaaaattactatcttatctcctttttctttaatcacaaatatgttggaggctgggcagtgatcactgttctcattgtacagatgaggaaatagttgcagaatttaagtgacttgcccaagactgctagccagaaagtggaagaaccaggacttgaacaagccacccaattccaagtgtagaaagctaagacaagtgaaaagaaagcaggtagtttaggaccctaagagctcaaagatgccagtgaagtactccgattcctgtaagcagtggttctcagacactggtcttcattcaaatcacctgggatgtttgttaaacatatagaatcctggacctcactcagatgtactgaattagaatatctgggtgttaaggggtggcggtcacggggacaaagggcaggcggatcggcggggagggagcggggcgcggccaggccctgcccgggrgctccgcatgctgcagctgcccccgggtgcccccgccgctgccctcgccgccgagcagcatggagaggagccggggacctaaccagagccagccggccggcctcccgaaggcggcggcgcarggaacggcccgacgcgtgctcgtggtcccggcggccgccaaggcggacagcggcaccgcgcgggggcgctgcgttggcggccctggcccccgggccgggcagtggcggcccaggaccacgcgtctactttcagagcccctctggggccgcaggagacagcccagtgaggcgccaagggaaggtcaccgtcaagtatgacggcaaggagctacggaagcgcctcaacctagaggagtggatcctggagcagctcacgtgcctctgcgactgccaggaagagtagatcccagaactggagattgatgtggatgagctcctggacatggagactgacgatgcctgggctgccagggtcaaggagctgctggttgactgttacacacccacagaggccttcgtctctggcctcctggacaagatctggggcatgcagaagctgagcacaccccagaagaaatgagggtccccgacccaggcaaacggtggctgccacaggacaatagctgccccccgacctcgtagcaacagcaatactgggggaccctacggccaggcctggtgccatgagcagggctcctcgtgcccctggcccggggtctcttcctctgccccctcagttttcacttttggggtttttgttactaaactggtgggactttttgtgtttttatattgaatctgcagcgcgggccctttttagctaggatccgcctttggtgcaactaaaaaaaaaaaaaaaaaaaaaaaaagaatatctgggtgttaagtctggaaatgtggattttcaacaagttacagtgattctaatgcaggtggtccttcctctgctgtgtattaatgctgtaaagaatgctgactgagaggtgggaaacactcatgcaaaataactgaagaaacaaagagctttacgtccaagagatcattagataagtaatttcatttaggcgcaagtcaatccatttctgaaaaaagtcaacaaattttaaaaatcagattaaatcctactatgccaaatacccaagggctattcaaaaccttcagttatccaggaattatgttctgttatagattttactacattggtgagttaacatcttgaatttggattataatataattttgcatacaatttgttttcttttttgcaagcccgaagtgacttcagatttattcctatttcaattatttcatgcaattcctacaaaacaaaatcacgtaagacacatttaagcaaacatgagtcaaatcaggtgaaatcttcctgatgacagcaaacaagttactaagaaaatgtcagaaagtaggaacataagaaagtgtctctagttattttttttaaatgcaagggaaccacatatacacaattcggaatagtagttacctctgggaatggagagagagggatacaataggggacaggcacacagggtcttcaaatgagttgataacattctatttttttaagctggtggtggggcttacagtgttcatcattccttaacttacatttatgtcatatgtaagtaattatcttttgtgttaactgcatgtagataaaggtataggtcacaatctcactcttaagaaacccatggggtcagatgcctttcaaagttcaacatttttctgttattaaaatgacaacactgcttagaaaggagtatatgtttataaaatacctcctgggctatctggggcaacaaacataatcaaacacattactttttatttttttcagtaaaatatataaatattcacaatatgtaggattaaaacttagttcatcttaggttttgcagttttcagagctttttccattctgaaattgtgaaaaacaggactgtagacctatctagcaattaacagcaaacctaaaaattaactgggtttaaatgctggcatactaagttaacttatccttcttctcatctataaaggggagatgggcaataatatccttgtagggctgtggtgtgcactagatgacacaataaatgaaagttgcttggtgctgtggctgatgtactgtgctgctggctgtgccccaaatatttccagcataatgaatttaaggagaaactgtattaaggctaaaagggtttctttacctatttatgtatttacatgtatcatatacatgatgatttgcaaactcattaccacagggatgttggtaaacacactctagatgtggtttcataaaagacaaagcatctagaatgagcatgcctaattctctaatggcttagagtattagtgggaacttggcccagagctcttcacgggtcctttaaatgttaacattccatccttcaaagagtagttctcagcatatacccgaggctttaagacgctgctggtgccacacaagctccggggctgtggttgccacactgaagcctctgccgcctgctccggacactcggacgcgcaagtccccatcctggctcactgcagcctcaatctcccaggctttctttgagggtgttccctcaaagaaagaggcccaaagtcctcccccgcaaaaaaagccagaaaggaatggaggttcctccccagaaatccacagcatctgcaggacatacagccctacaggaacaggcagacaggccagtgttgctggagttggcccctggctcccggggttcccccaggccagcccgagctgggagcctgctgagacccctcccacctgagccccactccggccccctgctagactgcatctacacaatccaaggtgaccctgaaggctggctggggcttcagaacccacacagcccctcaggtgagacacagagggtggtccgcgggcagtgccaggcctcaggcggcccagggcagagtaagcagctttgtggcagtgtggtgtgtcagggaggggagtcttccgtgtcccgttggctgcggctgggaccagggcacgcaggaaggggctgtgcagccaggcgggccccccccgtctggatttgctcctgggcacacagccctctgtgtccagcggcctcccagggtgatgtctaaagtccctggcagctgtggtcctggagagaggcccaccccgcagtacgacctgaagacgtgggagcaggagccaccagcaggtgggcgccgcccctgagagtgcacacggggagggtgggcgcaggaagccagcctagggacggcgttcgcaccatcacggaagtcttagccctttctttactctccatgggcgccgggcagcagcgactgcctgcgggatgggcggaagggaaggccctggccgatcccacccatggagaggacacagccacaggccgggacgatacatcaagctcgcgcccacggccctcacatgtccacgaagaccatgaggcaccagcccaggcccccatccagcagcatggtgacgtggatgctgtagatgagcagctcgttcaccaggcggaattccacgcgccagcggcccagcagcagcagcagcacccacagcttgtgctggaagcacaggaggacgctaacgcccaagtactgcaggcagaagaaggcggccagcgtgccccagtgacaggctgcagctgaagtagagcaggaagtggatgaagccctacagccagcgcgtcttgatgcacacctcgaagctgttgtacttggtgcgggccaggtgggaggcgcccacgggcccacagaccgcatgcaggcaggtggtgtgtggaccatggaaggagcacaacccccgcgggatgggcatgaccggcattggaccccggcggcagcggcgtccaagctacggtcagcgtaagggccgtgggtgcctacgcctgggagcccgcagctgagcctcgggggaggcgttggcctgatgccctctccgctgcgacgccagtttcccgaacctcccggcaggccggtggtgctgggggccgggcctgctgtccctctgggctccatgcgcagggcagctgcgtggtgcaggggcgcacggctgggggtgctggcggggcggctacggaggtggttcacgcgtccccggctagggttgccccacaggggaaggggcgcctgggcgcggccgccggaggcgtttggcctagcttgggagccgtagagcccttccttgaccaccaccttagggcggcctcacgtcccttccacccacgcggaccgagctgcgcttcccttccccctgctccgggcccgcgctgggcgtcccagactccacgcttcccaagggcctgtaatttttaattataacagatttatgttgagaaaacttcatactgaaatcactgatttattttgggattacccaattttttttctactattctcagatatctatcaaactactgctctatggattcttatgttaagtttatccttttctccatcttttctttcttgccacctactgaaggaaatgtctccaaggtctttttgattaatagaaactaaatgtataactcgacatctagaagggtttcaagatagtagatatgtctgctgggatgttttgtcattaccctgcccaatgttgtaacaccaggaactaccttgacactacattataaataaagaaggccaacctgttaacaaaaatatcacattccctaattttctctcctttaactgtgtgtaatttatccaggcatgtctttagttcaataaaggttatttccctctttttcattcatacacaagtaagtctggtcaattattattatcctagcactagtttttgtgcataaatccacccccaaactctcatctttagtgttcttatgccacctgtatggaatggcttataattttatttttcacaactcacacttgttcattataactttaataattcattgtaagtactctactatgctgtcctacctaatacactatgtccaagcacttatgtattgaagtctatattattttattgtaaacagggcttgcttctagaaatttctccattttgttacgctagggtattaatttctaaaaaatatgtataagaaggttatattatctataaattttactgaagatactatttaaaaaggaacacaatgtctgctaagagctggaatattggactgattacctcagcttcagagtccttcagtttttgaactttttctttgaccttcatttcaaacacctgctccatctccatctccatcttcttaattttagctacttgctcccttctttcttcttccatttgtgccagagggctcctgtcacgaatattaagggtaatcattaaatgtctgtgaataaaaattataatagaaatatgaaacagtttgatgaaaacagagatgctatatatgtatatatgccattattaatatatttataacctagaacttctttctgtgatatttcatatataaaacttatgaaaaaaatgtaaaaagcaaagatgttctctaaacctactacatatcaaatctaaggatgatgacataccaaataaactgtagaaggaaaatgagggaaaaaattcccaaaatacatttacagaataaaatatcagaagaaaatcatttaattttgttctttaaacaacattttaacatgaaaaacaggaaatgagtaatgaagttaatgtatgtagagtatttttagttttaccaaaatttcaagtgttacaatctcttctaagacagctactaacaccacaaaaatgaacaatattattatttattttggtaactgaactgatacgttggaaatcactactagtcaatacctagagcactatttaggtatacagaatatttctaggcctcttatagtaacttcagtgctcttgaaaattcattccacttggccggcatggtggctcatgcctgtaatcccagcactttgggaggccgaggcgggtggatcacgaggtcaggagatcaagaccatcctggctaacatggtgaaacaccgtctctactgaaaaaaaatacaaaaaattagctgggcatggtggcgggcgcctgtagtcccatctattcaggaggctgaggcaggagaatggcgtgaacctgggaagtggagcttgcagtgagccgagatcacgccactgcactccagcctgggtgacagagagagactctgtctcaaaaaaaaaaaaaaaaattaattccacttaactcaaatatttcagtcttaaattcaatgatttaacacacacacacatactttagagataatcagaagcaaatattttatttttttaaatgccagaatatacacataagcatagttaaataaaaaaaaaatattcactctgttgatgttaaagtccatggactcaaatctctttggacaattgtgttcaaaatttttcacactgagatatatttacaggtgggatttatgttaaggccaatatacttactcacagagacacaagagaataccaaattacctagtgctttcagcccaggagcagaaagataagtgggctcttagctttgagagtctctgaaaattattcaataccctgggacaaattaaatgaggtagatccttctttgaatttgttaataaagcatgcttgttttgtttccataaaaacaggctttgaccattaaggtttatattttaaatgggtaaattttattgtaatacactaattttaagaaaagaattaactcatggc

SEQ ID NO: 96552 - DNA, 46040 bp, Homo sapiens
  misc_feature (1)...(46040): n = A,T,C or G
ccttgatgaacattgatgcaaaaatcctcaataaaatactggcaaactgaatccagcagcacatcaaaaagcttatccaccatgatcaagtgggcttcatccctgggatgcaaggctggttcaacatacgcaaatcaataaacgtaatccagcatataaacagaaccaaagacaaaaaccacaggtttgtctcaatagatgcagaaaaggcctttgacaaaattcaacaacccttcatgctaaaaactctcaataaattaggtattgatgggacgtatctcaaaataataagagctatttatgacaaacccacagccaatatcatactgatgggcaaaaactggaagcattccctttgaaaactgacacaagacagggatgccctctctcaccactcctattcaacatagtgttggaagttctggccagggcaatcaggcaggggaaagaaataaagggtattcaattaggaaaagaggaagtcaaagtgtccctgtttgcagatgacgtgattgtatatttagaaaaccccattgtctcagcccaaaatctccttaagctgataagcaacttcagcaaagtctcaggatacaaaatcaatgtgcaaaaatcacaagcattcttatacaccaataacagacaaacagagagccaaatcatgagtgaattcccattcacaattgcttcaaagagaataaaatacctatgaatccaacttacaagggatgtgaaggacctcttcaaggagaactacaaaccactgctcaatgaaataaaagaggacacaaacaaatggaagaacattctatgctcatggataggaataatcaatatcgtgaaaatggccatactgcccaaggtaatttatagattcaatgccatccccatcaagctaccaatgactttcttcacagaattggaaaaaactactttaaagttcatatggaacaaagaagggcctgcattgccaagacaatcctaagccaaaagaaaaaagcgggagacatcacgctacctgacttcaaactatactacaaggctacaataaccaaaacagcatggtactggtaccaaaacagagattagaccaatggaacagaacagaaccctcagaaataataccatacatctacaatatctgatctttgacaaacctgacaaaaacaagaaatagggaaaggattccctgtttaataaatggtgctgggaaaactggccagccacatgtagaaagctgaaactggatcccttcgttacaccttatacaaaaattaattcaagatggattaaagacttaagtgttagacctaaaaccataaaaaccctagaagaaaacctaggcaataccattcaggacataggcatgggcaaggacttcatgtctaaaacaccaaaagcaatggcagcaaaagccaaaattgacaaatgggatctaattaaactaaagagtttctgcacagcaaaacaaactaccatcagagtgaacaggcaacctacagaatgggagaaaatttttgcaatctactcatctgacaaagggctaatatccagaatctacaatgaactcaaacacatttacaagaaaaaacaaccccatcaaaaagtgggcaaaggatatgaacagacacttctcaaaaaagacttttatgcagccaacagacacatgaaaaaatgctcatcatcactggccatcagagaaatgcaaatcaaaaccacaataagacaccatctcacaccagttagaatggcgatcattaaaaagtcaggaaacaacaggtgctgaagacgatgtggagaaataggaacacttttacacgttggcaggactgtaaactagttcaaccattgtggaagacagtgtggcgattcctcaaggatctagaactagaaataccatttgacccagccatcccattactgggtatatacccaaagggttataaatcatgctgctctaaagacacatgcacacgtatgtttattgtggcactattcacaatagcaaagacttggaaccaacccaaatgtccatcaatgatagactggattaagaaaatgtggtacatatacaccatggaatactatgcagccagaaaaaaggatgagttcatgtcctttgtagggacatggatgaagctggaaaccatcattctcagcaaactatcacaaggacaaaaaaccaaacaccacatgttctcactcataggtgggaattgaacaatgagaacacttggacacaggaaggggagcatcacacacgggggcctgtcatgggctggggggaggggggagggatagcattaggagatatacctaatgtaaatgacgagttaatgggtgcaacacactaacatggagcgtgtatacatatgtaacaaacctgcacattgtgcacatgtaccctagaacttaaagtagaataataaacaaaaattgataataaaaaaattaattaaaaaaaaagagtcacaggcaggaagagtaagatgccaagtataggaggaagagtgtgtggtgggttagtaagaagacggccctcactctgaacgagggctagctctgaaagtcacttgttttcattttaagcattttggtgatttccatctcaaagaaccagaaagaatgtgacagcattttaagaggaagaggtgaactctcccactttgatgagtttgctgccaactttagcaggctgtggcactcctggggagcaccatagccttaaagcctagatcagctgccctatgatgggtgcaggccttatagacatgcccagatgaagtcatatctaaaaatgaacttctaaacctcacgggagggtcatcttagaacatgaaaaactcccctgaaaatttttgtcagtgcaacaggttttgtttacttggcaacagtgagcccactgtgggaaaggggttttcccagcagtcaggctagcaccgtgggccctgagtaggcaacctgcaaatgacagcactgaggccactgccaggagccagcccagccctccctgtggatgctgaacggaagggtaggaaggttgagctcaggccagctttatcagcatgaggaggtgaagtggctccaaggtcaagagcagaaagatggaaccttcatttccacagagatcatcctgttcaggggtaaagcaaagggccaggcttcccctacggtgtcgcaacagcctctgcaccaacctctgagtgacaaagctgcatctccctctcgtcatctcttcctgctgggtcctctacagtctgtgattgtgttttcatttcatttataatgtctttcattgtacaaatatttttaatttttatgaattcaaatctgtgtatcttttcttttttcgtggcttccaagttttgtgtcttgctcaccctagaattataaaaatatactttcataaatttatcctttcaatttttcacataaaaatttttaaaagaatttttatgtgaattatttttaaaagaatttcttttacttttattacagtaaagccaaggatggatttacaaaaaaataagtggcactaaagaatttacactgaggagcagtaattcctgctttattcttctccaaccctgggtctgctcctcagaacaaactcatttaaagtttttttgttttgttttgttttgtttttgaaacagaatcttgctctgtcacccaggctggagtgcaatggcacaatcttagctcactgcaacctccgcctctgaagttcaagcaagtctcatgtctcagccttcccagtagctgggattacaggtatgcaccactatgcccagttttttggttttttttttttttttggagagctggggtttcatcacgttggccagctggcctcgaactcctggcctcaagtgatccgcccacctcagcctctcaaagtgctgggattacaggcatgagccactgtgcccagcctccttttaaatcttttacttggttttgttttgttttgttttgttttccagtaatataggtattcgggttcggcttcctttgcccgtcttcatccatctcacctccagtgtccagaaatttaccttagaaatctgtggtccacaggtcatgctcctagacacattgtaggaggaagaggaattaaacacatcccattagtacataatcttggaagagaagccttctgaattttacaatcaggattggggaaactctgtaaagtaccttcctggtgttcctttcttccagcctctttgattaagtcacatcaaagcgctaatggcaaagttgtttaatgtgtgtttctccaaggcaggttaggatttcactgggattcttaaaatttgagggtgtctgtgatcgtcaaaatttgtattcatgtagtccctcatgaaatttctaaaactcggctgggtgcagtggctcatgcctgtaatcccagcactttgggaggccgaggagggtggatcacaaggtcaggagtttgagaccagcctggccaatatggtgaaaccccatctctactaaaaatttaaaaattagcctggcatggtggcacacgcctgtagtcccagctactcaggaggctgaggcagaagaattgcttgaacccaggaggcggaggttgcagtgagccaagattgcaccactgcactccagcctgggcggcagagaaagacttcatctaaaaaaaaaaaaagaaaataaatttctaaaactctgtatttctttgctcttttaagttgacatctataactttctattactttaaatacctggaaaaaaaatcacttccagtgcattgtaataatgtatcaagtagaagtggctaaaatcagtgaaaacatttctttgatctgaataaatgttcaagaaaatagaaaacatgaacttacctccaatctatgttccctttacttgaaaatgtaatgttgatctactagaggtaaggcaggaattgtcacatccatattccttgcaactattcaaaatatgcatctgagaccagaacaagacacaggtgaagaagggtgctcactaggccccttctgccaatacagaaggagacagtgcagtggagtcctttcatagcaagttctgccttcatgatttccaaagcttcagtattccaaatctcaggtgaatagggtggtatccactaagctctgccacaaacttgttgctgagatgaaggaagccgccgctgtagtcagtatttctcacccacacggtttgctctctttctggctggtgtgggaaggatggcgtcttttttttttttttttttttgagatggagtcttgctctgttacccaagctggattgtagtgttgtgatctcggctcactgcaacccatgcaaggtgctgtcaggttccacctgtgcaaacaagtacactggtccagcatgggtcagctgctcactcacaggggctccagaatcctacaaagggacacacaggggtgggtggcaacctagttggaaatgggagtgatgggcatgactaaagtcttcctcatcccaccagaggcgcactcaactgtggctagggtgaccagaattcactgtccagcgtggctggcaggagcccactctctgaagatggtgggattcagaggtgggagtagagttgggtggtcctgtgagctgagcactctcccaaaagtgtcccctacatatgaggttgacagcttattcctgcagggactcaggagtaactctgggtgctaaaacaaaacttgagaccagcacagaaacagccagcccatgaagctggcctcccatcacacagcaaggctagccagatgcccctcactcttctcgggcaccattcttctcctcccctaggccgcctggtgctcgtggtgtttcatgtttgttagtccatgcacggtggtgagggaggctgctgtgtgatttgccccagccacagcctctacaaaagcaactagaagaagacggcagcagagggcgcttcttcaaacaccctgtccaactcctggcactgacaagtactgagtgaactcaaaccctctgtaaagtaacagaagttagaaggggaaatgtcgcctctctgaagattacccaaagaaaaagtgatttgtcattgctttatagactgtaagaagagaacatctcagaagtggagtcttaccctgaaatcaaaggatttaaagaaaaagtggaatttttcttcagcaagtaagtacatttactattatcttactatgggatagcttggtagaactagttaccagcaacctcactgctttttaaacaaacaatacctctgctaccacctcctggatccaggcttgccctcaaaggaacccttagggtctcattcccacaggaggctgtggcttcccgacatatttggagcatcatagtgagaattgtggcccattattttaaaatatcctagatcctagcaaatattgtttttgtgggccgtatttgaatttctcaagccagtaaaattctagtgaaagtgggaaaatcgcttgagctcgggaggttgagactgtggtgagctatggtcacgccactgcactctagcctgtgtgacagagcaagattctatcttaagaaaaacaaattctggtgaataagtctcttttaactaatcctgtctaaaatggatgatggctaataaaacaatatggcgtggctggaactctagctctagggtggtctccaaagaggacactcaagcattctctgagcagcacggggctgtgtcctggtagcagcctgaaggggtgacagtggagcacagtgttyattttcatttctcaattttgacatatttactggaaaaattaatccctagccacctcacatgacagtacataattttttttttttttttttttgagatggagtctcactctgtcgcctaggctggagtgcagtgttgcaatcatcttggctcactgcagcctccacctcctggattcaagcaattctcgtgcctcagcctcccaagtggctgggattacaggcacccaccaccacacctggctaatttttgtatttttggtagaaatggggttttgccatgttggccaggctggtctggaactcctggcctcaagtaatccgcccacctcagcctcccaaagtgctgggattacaggcgtgagccaccacgcctggccctggagtacataattttgrtaagtaacgtctgcagtgtctttttttccctccctttttatggatagacttttctggttattgagatctcatacccctttatgatatattatttgagtagagggtttaaagaattgagatacttgttttcttatgttaatatgtcaagaaagaagttgtttcataacttaggtcctgccttggacaaaatacacccttactgtctgctctatgtttcttggtatgttcagaagaggatttgaacttttgcaggttggctaacagatatggagggtccttagagctctcctgtttctaaccaaatcttcaccccacctattaagtagaaagccttttcatggaagggctgtggttkgttcttggaactggtcccctcacagaatttccattcgcttttcctcagggtcacgccctgctttagaggttgcttaggttaagctctccaattaattttagcaggcaactcgagagttttgcaactcaaagtaggcacaccttccttcctgaatgacttttatttgttcctttttcaggctgtgaaactaaatccacaacctttggagacccaggaacaccctccaatctctgtgtgttttgtaaacatcactggagggtcttctacgtgagcaattggattgtcatcagccctgcctgttttgcacctgggaagtkccctggtcttacttgggtccaaattgttggctttcacttttgaccctaagcatctgaagccatgggccacacacggaggcagggaacatcaccatccaagtgtccatacctcaatttctttcagctcttggtgctggctggtctttctcacttctgttcaggtaagcaactttcaggaacttaactgagtcaactgctacagggttaagagaaaggacatggggttctctgagctgctcccttctattatcctrtaagcyggaaggaaccttcagggtgttttcagaagattttaaagattagaagactgtggtccaaagaggttaaaggacctgcctatcatcacacagcaagttagcaaccaagttaactcaagaacccaggccttcaaggaagcgtggaagggacagtgttattttaacaaaaccatacagccgattcataatggtctcttccatgaatattagatgctcatttacattttgtgatgtgccgatactggcctcggagtctagtcccaaactatgttttcatgatacagctcagcgaaagtgtcctgcttctaaaattgaacaatggtgatcttctttccaatctgaaggcgggagagtagttgaggacaattcctcttaatgacattcatcttcttaaccttcttaagttcctcttaatacattaatcttatttgttctgctttggatgctgagatcttttttcaacattggcatctgactttaagtggtatcagatttaacacaaaattatgtttttagttatttttaatctgccacataggtattacatatatgtcctgaaagtaataatttgacttctagaggcttttgttcctgctcaggtgatcttaagagtgctgaacttttgggactgtcaagaagggtgaggcttgtccctgctggcaggatggttctgatttttttttttaagtcagaaaacaaaagatctgttttctagtgagcagcatacttcccagtttcccaaaaacaaagaagtytgggctccagcatgatttgccagtctgcaaagacccgactattaagggtccttgtcttaaaaacttctcacataaagtactgcctagaatatcagaggtgtgagagagaggtagagggaagagaagaggagttgggggcccacagattacttgactgcgatggtggtcatttaaaattttctgtccagagctattttacattgtttcagaaccaagagaaacatggcctacntttcacaatttacacctcaggttttttatatatttgacagttacattacatttycaacagttacaatttccttctggggagctggggaagcattcccaaactagtcttctggggagtacagaggagtttaaaatatatagaaggaaatttgtacaggcttcccagaaataaggggggcagggagggggagagacagaaagagggagaacaataaaaaaagtaaaagaggacataaaataaaaattaaaacccagactttagaaattgtacaaggaaaattagggtcagaggtaagtggaaagagatctttgagctaaagaaagatgtttaggaaagcaccttgttctctagctacatcctggttttactgctgctgtgactgagtcaatgaagcacctactgtgtgccaggtgggccataaaagttgaggctaggattcctgcactcaaagaggtctgcatatgttagttgsggaaatgcaaagctaacccatgtagaacaagcaaagagcaatgaaatgctttgccctgattgtaggagcccaagatctgggaaagtgggtaacagactgggctgcaggaaggagggcaggctttacagaggcagatggatgatggagagagaattctggtcagggcaacagyctggacaaaggcacaaaggtaaggatgaggctggcacaggtgttcatycttttgtttaatcatttattaattcaacaaacatgagcatctcctaaaaccaagagacttttcttggtcctggggacatggctcttgcatttgtgaaatttactatcattggaamgaggaaaagtaatccaatagccactcaaatgaatgtgttaaagtgtggccaacaaacaaagccacgtgctttgaaggcagggcacaggcactgcctgaggaagtgctgtcttcctctgccagcaagaaggggcagtgagctgggaagtagcagaggagggactggcccagtgagcaagaaccggaccctgcagcacttgtgagttataatcatgaatccgcatgttattcaggaagctggaagggctttacccaggagagtggcgtggtctaccccagctctgttcactctttacacataccaatagcctgggggttttgctaaattgcagtttctagcacagggaattttttagagaagtgaatctattttgcataatactgtaatgatagatataagtcattataaatttgcccaaatccatagaatatgcaataccaggagtgacccctatcgtgaactctagatttggggtggtaatgatgtgttaatgtaggttcattgattgtaacaagtgtactgccctggcgcaggatgtagacagtggcggaagctgtgaatatgtggggagggggttactttacattcaatttttcgatgaacctaaagcagctctaaaaaataaagtctatatagttttttaaatgctgtttctgcttaggtgggtctgggatggggcctgagattctgcatttctaagaagcacctasgtgatgctgatgctgctccaccatacactttgagtttcagtagtaaaggtgtaaataactttaaaaggaaaaaagtgttactgaagaacagagtggcttgtagggcagccacagtgactgtgcaaaacctattaggaggttatttcagtaacttacagtaactgatgatgtctttaatgaaaagaattggatcagaaggaagttgatgggttggagagtgtgtaccatgtaaaattagtgaggactgctcaacgggagtgtaggtgtgagtgtgcatggtctgtgggaggtgagattcagtgaatacagtggagtaggattatagagggctttattcagggcagagatttgccacactaggccttcctctcctgccacaccatggcagaggtgttccccctctcctcctgcccagccactgatgcccaggggaagggactcctctttcatgcacagggtggaaccagccaggctcctctccccctctaggcctgcaggcactgtctatggaggcagaaacgcctgactttatagtccagcaactggtggcagtaaggcagaggctctaacagggcagccctcagagggaccaatgtgggcagcttttccttcagagctggagtcctttaagagagggtcaggtctaaggagaggggaaaggcctcctgtaggaggaggcaagagatgtaggaaaagcattgcctataagtttatagtctgagaactcagagctaggagaaaagagaataccccaaagtgccaccattcacagaacacatcctcctctccctgcaacacacaccgctatgctgctggcccaggggtcccatgagcagtgattgttgccatcatcaccctgacaacagctgttcaagtccctgtgcattttaaggatataaatactgtttagaaagagaaaaagtaaggatcagatggtacagagtatatgagcagggtctaaacagggggaaaagtcaggaacagtgtgaacaygaggagacacaggtctcaagcctgtggctgccagaggcagctctgcctgtctcctttgtgtggctagcacctagcccagggctgacaccagccctgtcggtgctagttcacctaatcaaacatttagaggggggtcactcctgttggaagagtgtgcacaaaccaggaacggtaaaatctccaggtggtgagacaataggtgactttcacgcttttctatatcttccattctttctaagaatgtttatttcatagtcagggaaaatgtttatttaaaaagcacacttgtgtttccagggagatcatgtatgtcccgtcatttggtgagttaaaagatgttgtgtcaactgcttctctcccttctccactagcagtggtgatgcagctcccagacccctgcgagggcagcctctctaacggctgctgaggttgaactccctgggaggggcactgcagactggccactgcatcctccaggcctccaggctgcayggagagggtggggaagactcaggtcttcctagtatggattcttcttttcccttcatgttttatttgcaatgacataaaattcaacgttttaaagtatacaattcagccaggcacggtggctcactcctgcaatcccagcattttgggaggcygagrtgggtggatcacctgaggtcaggagtttgagaccagcctggccaacatggtaaaaccctgtctctactaaaaatgcaaaaattaaccacacaaggtggcccgtgcctttaatcctagctactcargaggctgaggcaggagaatcttttgaaccctggaggcgggggttgctgtgagccaagatcatgccactgcactccagcatgggcaacagagcgagactctgcctcagtaaataaataaataaataaataaataaataaataaataaataaataaagtgtacaattcagtgggttttagtatatttgcaatgttgtgaaaccaccatcactatcgaattccagaaggaaatgttctggatgatgatggaaatcatcatcccagaaagaaacctgcgcctatttgcagctactcctcattcccctgtaccccatctcctcgtaaccactaatttactctctgtctctatgaatttgcctgttctagacatttcttttctcttcctttttttccagaatccaggtaagaaagaatattctggacatttcttacaatatgtggcgtttcgtgactattttctttcactgagcattatgtctttcaggttcatccatgttgcgtatgtcttagtactccattcgcttttacggccaaataatattctgaaataatattctgttgtagattgagatctattttttctttttgtagcgatggggtttttgctatgttgcctaggctggtctcgatttcctgggctcaagcaatccacccgccttggccagctcccaaagtgctgggattacgggtgcctggcctagattgagcccttgagaggtccttttttttttttttttttttttttttgagacagagtcttgctctgtcgcccaagctggagtgcagkggcacaatctctggctcacagcaagctccgcctcccggcttcacgccattctcctgcctcagcctcccgagtagctgggactacagctcgtaaaagtcctccacacaaaaatcagcccgccaccacgcctggctaatttattttttttgtatttttagtagagacggggtttcaccgtattagccaggatgatcttcgagctcctgatccgcctgcctcggcctcccaaagtgctgggattacaggcgtgagccaccacgcccggccgagaggtccattatttgtctaaaattcttggtctctactcttgttggcaaatagcttcctctcctgtgtggctagcagtccagagttgaagtggtcagagcaggagggtggccaaggggtcaggagaggcagaggctgaggccagcagtgttgagtgtccctattgtgccctacaggtgggcagtttccatgcattcgccagaaggcgagcagcgttgccgtccatctctgccttctctccgcctcctttcacagcctctggccctttctgactgctgctgggtagaggtgcaggaggggctccccatgccagctatgggcactgaactcagttcaagaatcagccagttaccatggtgatgctggtcctatgggggtgtggttcagcaaagcaggctgttgtgcatgagaaagaacagccccatttaaaatctgtagagcattctaaagttaagaaagcactttacatctggtatcctgtgatcgctgtgataattatgtgaagcagggaagatagttatctcggtctggtttgtgctgctataacagaatacctgacattgggtaatttagaaagaacagagatttatttcttactgttctggaggctgggaagtccaaggtcaaggggctcacatctgatgaggaccttcttgctgcatcatcccatggcagaggatagaaaggcaggagagcacgcccaaggcagagtaggaaggaggccaaaaccatcctttataaggaagccactcctgctgtagtgaacccactcccaaaaaaatggcattaatccatccatgatggcagagtctccatgacctaatcaccttttaacagtcccaattctcaacactgttgcacccggaattaaatttccaacacaaaacctttaggggacacattcaaatcatagcaatagtattatgactgttttacagagatggaacctgaagcccagagaggttacccagcttgctcaaggttatgattctaatacacagtggatggagccagacctcatttcctcatgcctagacatgcattcagcaagtatttactgagcacctactatgggccaggccctgttctagacactgcagatatggcagtgaacaaaggaggaagcctctgctccatagctccatacgtaattatgtatcacatatacctgtaaatatacatcacagttgtaaaaatatatatcagctggagacaagcctgaagagaaacaaatcaggcaaagagactaaagagtagcaggatggaggggggcagggaggatggcgctgttcaaggagagtcagggaaggcctctttgacaaggggccacgagagtagatgtgagcaaagtgggacctgaactgtgtggatctctggggaagacamtggctccctctaatgtcctaggtactgtggaggacttttatgagcagtatctcattttgaatccttgcacccactgggttgggtaggtgttacaatgcccattcaaaaatggcaaagcaagctcagaagttcaaccaggtttgagacagtaatattgagatttccaggtgctgactttccccgccagtcactgaagcagacaaaatcgttagagacatttccgtttcaactgctttttgtccgtgtgtgatggrgtccctaaaacagacaaaactgatataaatttgggcaaatttataatgactgttttctgtctctgtgtggtggaatcccgaaaactgggttcccgtgtgaatttccaaattgttcggaagattttgggttcctctttttagtcctgttcttcttcactcttctcctcagaaggctggacaaaaactcctcagaagccatcaccaaaattagatagtctctctttcagctatgctttcacttttgctaacatcaccacataccaaaatcagtgagaaatattggattctttttggctgggaaygaatagttcggtggggaaagaccctattattgggaggcccagacaagtgagttgctgtctgtctggcccatagcaagaccagagtgctatatatctgacataacccttgagtgaaatgaaaggtaagagttggcagtgggaggagggagaaagaaaaatggaaactcttacagaagacctgctatgtccttgggactttttatttatatcatttaattgaactgaattttccagtgatcccaaggggtaggtgtcatacctatttagagatgaagaaacmgatgaaacagcaagtggctgagctgggactagaatccaagtcaatggagatggatagcccatgttccttctacgtctcattttgctttccttgcaacactaggagtgtctgggttgtcatttgatctttagctaatatagcttcactttgaaatatgctcccttcaagtatgtctttttatttcttcctttctttcagttatattccctaaagcagggactggcaacattccacacaattgctgaagaggtgcctggacctttctgcattacctcactttgctatgcaaatacccaccatcacaaaactctcttgttcagtgctgtggtggggccgtatccagtctgacagaggcctgagaatggctggtgagatggaaaggtgctagtgccccatgatcctgctatctaagaaaagagagggcttggaaatgaagtccctagacatgggtctccctaaggggatctgtgtggctccaggggatacagggcccagaaggcacagtrcgacagcactgggcagggggcgctggggccttagagggatgctgcttttaggtcctacaagagcctaggaagaatgaccatgccttctaaaccaaaaatcagaaaatacagcctgctaaggaattttggtgctattgacacagagactagtttagatattgatatgctgatatttcttggctatgtggatggagaaatgaacagaatattttaaataaaaactcttttagcaaatccaggctggagggtaattgtatggcatggactgcagatagccaaagagataaaggcaggatataggatccatttagggtacctgaagatggtagaaatagtccaaaggtataagcatgggagtcatttcagcctggaaccatgggatcaatcaggcctggaaagaaagggactctgtttcttatttatttatttatttatttattttgagacggagtctcactctgtcacccaagctggagtgcagtggtgtgatcttggctcactgcaacctctgcctcccaggttcaagtgattctcctgcctcagcctcctaagtagctgggattacaggtgtgtcccaacatgcccggctaatttttttgtatttttagtagagatggggtttcaccatgttgaccaggctggtctcaaactcctgacctcgtgatctgcccacctcagcctcccaaagtgctgggattacaggcttgagccatgatgcccggcctgggactctgtttcttatagcaaaagggctcagtggtagggctggattggggtgggtggggacagtgttggcttaacttactgactgtggcctaaaactgaagaaatcggtaaacaagaagaatggccctaaaagcctgggccagaaagaaaaaaatgtgtaaaactggggcagtttcttttcctcagctcagtttcctcatttgtaagataaggccacgagaatgaatgatcatggaagtcccttccagatctcacattccttactaygactttcatatcccctggggctgagcacatygtttaacccatggttggcacttatattcaggtcttctcaggggaccagtggactttctcactcactagggatccctgtctctgtccccaactcctggcccataggcatctggctatatacataagacaagcaggtgcctttccatatttctgaatgctcacgatgtctcatcatgctaggcgtggtggctcacacttgtaatcccagcattttgggaggctgaggtgggaggatcacctgagatcaggagtttsagaccagcctggcaaacatggtggaaaccctgtctctactaaaaatacaaaaattagctgggcatgatggcgggcgcctgtaatcccagctactcaggaggctgaggcaggagaactgcttgaacctgggggtggaggttgcagtgagctgagatcgcgccacttcactccagcctgggcaaaagaacaagactccgtctcaaaaaaaaaaagaaaaagaaaaaagaaagaaagatgtgtcgtcttatggagatkcagggaaggggaagattctggataactcttgaaagataacgtcactggaagagctttacccatttggtggggtgttgaactggatgtaggagcagcacacagtggtatgtataggtggaaaaataaggcaatttgcttgtcagtatatcaatagttatatcaaaggtgtaaggtggctgctaatatattgaattcaactttaggctgcaaacatagatttaggtaaaggaagtgacaacccggttctactctgagccaatcacacagtggatgtctggaatgctagatttagtgacttcgctctctcaaaaaaatatacacacaaatcaaactgtgtagtgaggaaagtgagggtactcactttcagtacatcaataaggaacaggggcagatgggaacctgcagaactgtctgagagaggatataagtatcctcagatatctgcaagtcttgttacataagaagaatgagatgtgttttgtaatgcatgtagaagctagagggaaacagacttcaacataaagcaaagcaaaacttcctcagtcaaattgtccaaagacgaaatcaaaagccttagaggttggtaaattccccacccccttggagaaaggagaatgggattcatatttggtgtgggtctaggcattgaattrcagtatgtgcttgccataaattatctcatttaatcttcataataaccaatgtgaagactggggttcagagaagtaaagtaagttgcttaaggtcacacaactactgtggattttattgaatgaaaaaagcccatgttctttctataccaacaaccaggagcctctaggcaaggatgttagcagggtgcacttagtcatggttgcctttaaggtagrtagggaagtaggcagtcctgagagctttaaatcctaagtcactcaagtgaaaaggggaggaatcaggatgtgtattaaggtgacagatgaaggtttyattcctgtgccacgccactgaagtcacatgaaatggattgtctttagctcacttaatctggataaaatttatkcttagatttttcccacggttaaatgcagttctgtagtttaaaygaatgcgtgtacatgtgcatatctgtgtgtgtgtgtgtgtgtgtgtgttgttgcatcacgtgattgtggggagaggggctgtaggagaaacrcaagggaaaaggcagtgagcatcagagactaggtctttacagtgaaattcttccttatttctcaaggcagtagtagctgaaaattacctaatcaagtgaccaggcaacagatccaagaaggaggccttctgtaagtgagaattcatgaataatgaagattgattatattccctacctatttaaagtatggccctcttttttcttcttagttgacctcatctccctcccttattcttcgtcatgactgcagaatcataggcccktggaatctcaggctgacctgccctgtcctagacttcctgaacctctcaatctctcagttgtctcagctgcaaaatggggaaaataatacatatcttgtggggttgttgggggattaaatgacatagcacctgtcccctccatagagccaccacagaggaagcaaaaaarggaaatagtatgaagagtaattcaatataggctatctagacagaggtgggcaacagcaccttgccctcctccaccaccactgtacccagaaccttagtcaggactgacttctcttgggggtggtattgtgttaggtaaaccaaataagaagtaataggactaaaaattgcctgctgtgagagaaggctcatatgctcctaaatcttgcatgtcattggaaaattctcaagaaaaaggaaggggataggttatgttataatgattggtccatgagtctgattttagtgatttgtcttcattgttttcaaaaccaaatttgttttttatgcaatcacatttagtttttctagatagtgacttccaaaacctttaacaagcattgcgggtgcaactgctatagaaaacactattgaggttcctcagaaaattaaaaatagaactaccatatgaccccaaaattccatatatccataagaattgaaagcagggtcttgaagagatatttgcacacccatgttcatagcagcacagtagccaggaggtgggaagcaagccaaatgtccatctacagatgaatgggcaaacaaaatgtrggggggggkgtgtgtgtaatattattcattatccttatgatcatatcattaccatkccaaaggaaggaaatcctatcatatgctacaacgtgaatgaaccttgagtgcatcatgctaagtgaaataagccaatcataaacaggctgttactgtatgattctatttctatgagatatttaaagtagccaaattcatacaaacaaacagaatgrcaattgccagaggctgaggggagagggggaaaggggagttgtttaatgggcatagagtttcagatttgcaaaatgaaaatttctagagatctgtttcacaacaatgtgaatatacttaacattactgaactgtacacttaaaaatcaataagatgataaattttatgttatgtgtttgtttgtttgtttgtttgtttggagatggagttttgctcttgttgcccaggctggggtgcaatctcagcttactgcaacctccgcctcctgggttcaagtgattctcctgcctcagcctcccgagtagctgggattactacacccgccaccacacccggctaattttttgtatttttagtagagacagagtttcaccatgttggcccggctggtctcgaactcctgacctcaagtgatctgcctgcctcggcctcccaaagtgctgggattacaggcgtgagccaccacgcccagcctgttgtgttttttaccacaatttttaaaaaatgaagagaaaaaaagcattggggaccccaaaaatcaaactggattgatacttagtcactagacacaacaccctaagttctgttactgccgactttggattcctgaccrtgcaggaatctgtatttaataaatatacaatcttgttctgtttgcctctccataggtgttatccacgtgaccaaggaagtgaaagaagtrgcaacgctgtcctgtggtcacaatgtttctgttgaagagctggcacaaactcgcatctactggcaaaaggagaagaaaatggtgctgactatgatgtctggggacatgaatatatggcccgagtacaagaaccggaccatctttgatatcactaataacctctccattgtgatcctggctctgcgcccatctgacgagggcacatacgagtgtgttgttctgaagtatgaaaaagacgctttcaagcgggaacacctggctgaagtgacgttatcagtcaaaggttggtgggattttctgattttactctaggccggcagattcttaatgcccttaaagacacatggctattgatttaggtgaaaattttaccaaagagggatgtatctcacttcatttcttggagttaagtctctagttgtacaataaactctaactggtttctaaagatgtcctggaaatatctgttaatgtgcatttcttgttctttgacaatccaagttcatgacaatcatcctggggcactataatgacctaaagagcctctcaatcaccaaggggcatctttgatttgatgtagccttgctactaactgcacttgacccagcaatatatgcctgtgaaagtatgctgaaaaggtaacggggctgggtatggtggcttatgcctgtaatctcagcactttgggaggccaaggcaggcggatcacttgaggtcatgagttcaagaccagcctggccaacatagcgaaactccgtccctactaaaaatacaaaaactagccagatgtggtggcgcattcctgtaatcccagctactctggaggctgaggcagagaatcgcttgaacctgggaggcggaggttgcaatgagctgagattgcaccactgcactccagcctgggtgacatagcaagactccatctcaaaaaaaaaaaaaaaaaaagaacaatggaggcataaatctttttcaggtagtatgtgaacgtctattactatggctatcttactattatattctaatattttcaaagtgataatttacttattgcatatttgaagctctaatctagcagtcagtcctgaaaaattagatgttagagaattgggccaggtgcggtggctcagcactttgggaggccaaggtgggtggatggcttgagctcaggagtttgagaccagcctgcccaacatggtgaaaccccatctctactaaaaatacaaaaattagccagggacgtgttggctactcaggaggctgaggcaggagaatcacttgaacctgggaggcggaggttgcagtgagcagagatggtgccactgcactccagccttggtgacagagcaaagactgtttcaaaaaaaaaaaaagtagactacagaggagggtgagcatttccctactggtagagactctgtcttaaaaaaaaaaaaaagttagagaattggatgcataattaattcctgccacaaggaaaaaaactaatttatgaatcaaagccctgtttatgtacctactgtggaaggcaagcatttctggtctcggaaagaaaggacccttgcttttgtaaccacccaagaggtttacctcgcctgctgcgtagatagagccaattcatcaagacaggggaattgcaatagagagagtaatttacgcacaactggctgtgcgggagaccggagttttatcattactcaaatcagtctctccaagcatctggggagcagagtttttaaggataactaggtgggtcgggggaagccagtgagctgggagtgctgattggtcagggatgataccatagggagttgaagctgtcttcttgcactgggttggggggccacaagatcagatgagtcagtttattgatctgggtggtgccagctgatccatcaagtgcaggggctgcaaaatagctcaagcactgatcttaggagcagtttagggagggtcagaatctcatagcatccagctttatgactcctaaaccataatttctaatcttgtggctaatgttagtcctacaaaggcaatctactccccaggcaagaaggaggtctgctttgggaaagggctgttaccatctttgtttaaactataaactataaactaagtttctaccaaagttagttcagcctacacccaggagtgaacaaagatagcttggaggttagaagcaagatggagtcagttaagttagatctctttcactgtctcagtcataattttgcaaagggggtttcactttaattacagtataacagaggatactgaaggagccagagccctttttgagaaattatatccctgagccattttctcacagttgaaatttgaacatatttctttttcccctgggacttgagcctctagtgaaaaccaaacttcttacttaataaaacataatgattaaccttgataatagataacttcagcagatccgtagtgaattccttactgttctttgttttaatcattagctatgaatctttacttgtgacatccagatcacacctaaagttgtggggagtaagccaaagttacatggaactatcttaaacttcactcagtgttttctctgctcttggatagaataaattattatatggtgatgtgatttgaggggtactaagaagcctacctcttccacgattttcacctgcattgactcctgaaattctcatcatcatagccattcctgctagtttctccattttcctcctaaaagatccctgytaaaatgaaaatgtgtttcctggggtggggggtggggggtggcaccacaaatatattagcctgtattagttaattacattaggtacgtagtcctctaatggactaccgagagagaagtagactcaggtcaggtgaatttggatagaaagataaagaagaaaatccaagagtgagaaaaggaaacatttcaaggggggcaggccctattagcagattaccgtaagagaccaaggacagctaaggggacaatgtgagatttctggggtactcagaaccgagggtgtgtgggtggacaaaatccagtaaagggaagacaaaaaggtcactcgcttaattttgctgagaagcattctgaattttccaattgagtcaaagcagtgtttctcaaatgcttataagcctatgagtcatttgagggtcttgttaaaaatgcagatttaagttcagtaggtctggggtttggatctgagattctgcacctctaacaagytctcaggtgatgcctgtgctgctgtggaggaccacaatttgagaagcaaggaattaagctctcatttggctagagtgaccaggtatcctctttgctcagaaccaaagggtttatttggggcacaagatttttggtgctaaaactgggaaagtctcaggcaaataggacacgttggttaccctatatttgtctaagattgcaaaatggtaatataatatcagcatagccatatgaaaacctccattaactggcatgtttgagaactagctacattcgttaacagcttaactaggttaatggatttttcctcctaaaacatgtgcacctattcctttccttgtaagacattcctaccctttcctattaagagtggtaaaaattgggttaactaattaaaatgagatacaaaggttacagtcttacaacgtctttgattgttcacaatctcacaagacctcaggagtagttaccctaaacagatcaccttagaaaaaaggtgggagatggagtttaggctgttctaagccaagaaagattttgaaactttttttttttttgagatggagtctcttactctgtcacccaggctagagtgcagtggcgtgatctcgggtctctgcagcctctgcctcctgggttcaagcgattctcctgtctcagcctccaaactagctgggactacaggcatgtgccatcatgcctggctaattttttatttttagtagagacaaggtttcactatgttgtccagggtggtctcaaactcctgacctcaagcgatcctcctgccttgacctcccaaagtgctaggattacaggcatgagccagcacacctggccttgaaaagatttttaatacagttcctggtatgagtggcattcctgtagtttatttcccagaaaagcagagcacagaaatgaacatgaatcatattaataatttaggatatgagtttttggatttattattcctagttataacacaaaacatattgatgttataagaaacacagaatattctagatatcagctgcctgtgtcatgagtcgatcttataggataaattaataagtgggaaataacaatgccaactaaaagtggctcaggaacatatcaaacttcatttagggacagggttcattgaaacaaacaaaaaaaaaaggtaacttcacctccaaccaaatccaacttttcctctttcctggcaattatcatcatttgtcatggcttccctttatcctcattattgtaggtgccacaaggcattcctggaagtgtttgcctggcaacctgatttaaatgagggggcttacctaagagaggataaattcaagacccacttaaatatagctatcattggctgggtgtggtggctcacgcctgtaatcccagcactttgggaggccgaggctggtggatcacgaggtcaggagactgagaccatcctggctaacacagtgaaaccccatctctattaaaaatacaagaaattagatggtagtggtgggctcctgtagtcccagctactctggaggctgaggcaggagaatcacttgaacccggaggttgcagtaagccaagatggtgccactgcactccagcctgggcaacagagtgagactatttagtttcctgtgtgtcaggctctgtgytaagtgatttctatgaacgatgtcatttaattcttacaaccctgggtattagtgtccctatcttatagatgagcaaactaagactaaaggtgggtaagttattgacccagggtcacaaggcagaactggttttaaaacctgcttttgatgaccatatgctacatgacatctctgtggggctcagaattctgaaaagaaagctaactctatgaggagattgaatccctacattcatgctaagaagctaatctctttatgtgtaagaataagtgacgaagccgctaggtatctttctcctatgttctctgcatttattttcctgtactttgtacttcagwatcttatggggatcaaatatataaatgaaacagtgcctcaagggtcttggaggaatgctaggaaggccttcctgtccctttaaggcatatcaaaatagtaagaaaaacaataaagtgtggtgaatgaggttataggctcaatgttgtagtttggatataggtttttctgagtaaaagactactttttttttttttaatttcamccaggtatttaattggtctggcaactgcacaatatacaaatttctgaaaggcatctcctgtttgaaagctagcatagcttcatcccagtaattaattcggacaaatatatagaacaccaagaagtcataaattatgcatggaagactcccaaaccaattaacaactaaactcagtctatacagctttctatttttcaggcttccatatgcacattaaataaataaacagcatgtctactatcaaaataattaaaaaattcaaatgaattcaaataaatttattcaaatacatttcaatgatattttcaaatgaaaacattactgatgtggttcagagtttttcttctcacctaaaataaagagctttgcccatggtctcatgaggacagaataaagaggggaaaacccatccagaaataaatatgcaaattaaaaaatactggtcatgggtgtttttttggggtatggggtgttggtgagactcagtagaagcaaaagctcatgactatagttcaatgcctgccccccactcacacgcacacaatgccccctcaaaaggcaggtcacaggtttgyaaattaggcagcattttcctttctccaagatctcctctccttgaccagatttatgttttctctctccccatctagaccctttccaacgaaagttctatgttaggcaaagccttctctatttatgtattgagtttaggtagccagaaagaaaagggaaacacaacttcatggagcccttacctgtaacagacttaagagtcaatgttcaaaggataaggccagaaaggaggacatgagaaaccattctcaagagcaaaggggtaggcccctcatgtaaaagacgaccttttaaaaagcaaggaaatgctaaccacaaatttaggatagtgatagtgattaccttaggtaagggaaagagagggacaggataggtgacatcataccagcagatttacctaagttactgtcagtgtttttggtctcaagttggatggtgggttttcaggygttcgctatagtttagtaaataaatagataacatagaagaaagccacttgygtacttcaagcatcaggaagaaaagaagagaagagaagaaagggaaaggaaagaaagaaaggcaaggtcaagaaaagataggctctggtgtcagacagatttgaattcygccattactggttagttataatttctctaaacctcagtttgattacttataaaatggaaattatattaggttaaatcatatgaaattactgatctttgacctttttagatctacaacctacctctctagggtttctgtgaggacaaaatgaggtaaggtccagacctaacaaacaagagttcagtaaacgttgtctattattcttctcttcatctcytacaattgcaagtactctggcaacatttattcacacgaacctacttctcctttctgtaataagtgccctcctatctccatcaaaagtggcaaagaattgatataaccaattcaaatcaaagttagtctttggattatacataactattaatgagtaatgggaagttgcaaattatatctcattttatcattcttgttttgttttgttgtttttgagatgaagccttgctcttttgcccaggctggagtgaagtcgtacgatctcggctaactgcaatctccaccctctgggttcaagccattctcttgccttagcctcccgagtagctgggattataggcgcctgccaccacgcctggttaatttatgtatttttggtagagatggggttttgccatgttagccaggctggtctcaaactcctgacctcaggtgttccacctgcctcggcctcccaaagtgctgggattacaggagtgagccactgcacctggcctttatcaattcttattaaagctagaaaattatttaaaaataaacctctacacacataggtttgtaactatacgtaattatatattcttgttctttctttagctgacttccctacacctagtatatctgactttgaaattccaacttctaatattagaaggataatttgctcaacctctggaggttttccagagcctcacctctcctggttggaaaatggagaagaattaaatgccatcaacacaacagtttcccaagatcctgaaactgagctctatgctgttagcagcaaactggatttcaatatgacaaccaaccacagcttcatgtgtctcatcaagtatggacatttaagagtgaatcagaccttcaactggaatacaagtaagtgacattgttctggggagtttctactatatcgaatctaaaaagacaatatagtcgtgtcatttaatgatgtggatacattttgagaaatgcatcattaggcaattctgtcattgtctgaacatcagagtgtatttacataaacctagatggtacagcctactgcacacctaggctacatggtacagcccagtgctctgaggctacacacctgtacagcatgttaccatactgaacacataggcagttgtaacacaataagtatttgtgtatctaagcgtatgtaaacataggaaaggtacagtaaaaatacggtattataattttatgggactaccatcatatatgcagaatgccattgaaaatgttacatggcacattactgtaactcagccagatacattttagaattgtcgtatttattttgatagtgttttatagtgtttttagatatacaaatgacatgtgctattatgacttattaaagtcactgtgagactgggcacagtggctcatgcctgtaatcccagcactttgggaggctgaagtgggaggatcacttgagcccaggagttcaagaccagctgggaagcatgagactctgactctacagaacatttaaaaaattagccaggcttggtgacacacatgtgtagtcctaggtacttgggagggtaaggtgggtggcttacttgagcccaggtgttcaaagttgcagtgagctatgatcatgccactagactccagcctgggcaacagagtgagaccctgtctctaaaagaaataaataacagaattgaaaaaataaatgtaaaaaataaagtcactgtgcaaggtgtgataatgggacaaacggtctttttattgatttattcaggtgtgggagacagggtctcgccctgttgcccaaggctggagggcagtgccacaatctcaggctcactgcaacctgcacccttcagggaaaagcaaaatttcggcctcaccctccgaaaagtggggatacaggcggcagcccccaccgtggctaattttctctatctttagtggagatggggtttccccatgttggtcaggctggtctcgaactcctgacctcgtgatccgcccgcctcagcctcccaaagtgctgggattacaggtgtgagccactgcacccggccttattttcttgtaataaatattctaaaatttatatatactaaaaaccattatccatcaagcattcatcttaaaaagtttttgtaacaatagtattattgaaagcattaaaatttgccctttggaactgcccttagggatttggtgctttcttttagggcatgccacccacacggttccatggtgccaaacaatttttttttgtgggcgaatgtgctttttaagaactactggttcattctgaaccaagtctgggaaaggtgagtgacaaactccttgaagacaacgcctgaaaagaggtcattttggagcaaatattttaccctactggtagtaaactcagagaattctctttccccaagaggtgaaatcatttgaaaatatacaatgaaaacgrtgggtttatatgaatatatacatcttaggcctataayggcttaagatggcttacaaggtgaactgagatgctcaaaatattaatacttgtttaaattgtacggctgatcatacagaggaccacaggtctctctccctacccctagccccactcccaaggataggttttgtgactgtatagtaagaaacaaaacactgagtttgataatacagttgcacataagtatatagcacaatatatactatatggcatgtcttaattcttcatgtctttacttgtagttgcgaagtggataatttattttagatggtctagtaattcatgctagtgtatgatttaytctagatctttcagtgttacagcagatttttttttttttttttgagacggagtctcgctctgtcacccaggctggagtgcagtggcgtgatcttggctcactgtaacctccgcctcccaggttgaagcaattctcctgtctcagcctcctgtgtagctgggactacaggtgccagccaccacacacagataatttttgtatttttagtagagatggagtttcaccacgttggtcaggctggtcttgaactctcgaccttaggtgatctgcccgcctcagcctcccaaagtgtggagattacaggcatgagccaccatgcccggctacagcagattctttattttcctcaatgagacaaaatttcctgggaaaattagttcaaatataaaccaaactttgacatgactattgatactccaaacttaccagtctcagtcatcttttatgtgttgtaaaaattttattaaaatgaggcttcaatcatatagtttattaagtctctatttttactttcttgttatagcattatttaaccaattttacattattctgattgaaggcagaaaacagtagagtactgattattaaatcagtaatactagcttggattgcattttgatttggacattatttatattggaatatggatatatgtgacattctaagacaggggttggcaaatttttttctgaatagagccagatagtaaatattttaagctttgcagtcacagtctctgttgcaacaactcaattctgctggttgtagcacaaaagcagccacagacaagacataaatgaatgacatggctatgttccaacaaaatttttcttttttttttctttttcttttttttttttttgagacagagtttcactcttgttgcccaggctggagtgcaatggtgtggtctcggctcactgcaacctctgcctcccaggttcaaacgattctcctgcctcagcctcccaagtagctgggattacaggtgcctgcctccacaactggctaatttatgtattttcttagtggagatggggtttcaccatgttggtcaggctggtctcgaactcctgatctcaggtgatccatctgcctcagcctctcaaagcgctgtgattacaggtgtgagccactacacccagccacaaaatttcatttttaaaaacaggtgcaggacaggtttggcccatgtgctatagtttgctaacttaaggtttttgtctttgtggctrgagagctttagggtataaatgtctcaaatctcattaattggactgtgtggggattctttagaataagattcaaaagcaaataatgcatttataggaggtcaagggctgactgcactaacaaatatacattaagtgtatagtacatagaaatgttacaggtcagggtgagtaaagctttgaggtgaaaatgtattagtcccttttcatgctgctgataaagacatacccgagactgggcaacttacaaaataaagaggtttaattagactcacagttccacgtggctggggaggcctcacaaatcayggcagaaggcaaggaggagcaagtcatgtyttatgtggatggcagcagccaaaaagagagcttgttataaggaaactcctgtttttaaactatcagatctcgtgagactcattaactatcacaaggacagtgcaggaaagactcgcccccataattcagtcacctcccactgggttcctcccatgacatgtggcaactgtgggagttataattcaagatgagatttgggtggggacacagccaaaccatatcagtaaataactgatttggaaaaaaaaaaaaaagcccaaatgtattaattaagcggattgcgcatatgattctttttagtgtagtctcaccaaatttgttttcccttgataaactggaaggagatacatctgagagagtcatactcatggtatctaataagctacatgtgcagatgccctcacaccgctctgtaccttggattctgggtctgcccctgtgggatgttaccaggtttctaacaggtgtcacaatagacctggcttgctgctactgaggcctccctctttccctcacacacatactctctctaggttgaatgaggcttgtggatgggtgtggagtggaagccaggaatgagctgaagcctgtgaaacttctagactcccaggataacagcaatggcttgttattttttgtgtcattctaatctgtagaggtcaactctggtaatcacttgatgtctccattcaatctggtgttttagagaaaaaagaaaaaccaactmtcctgtctttaagtggtaggtacactatgattaaataggtgtttcagaatgattactgtgacagcaatgtgcaggagttattagagcctaggaaacctgaggcaaagagaccggtttgcaggctactaggtgggagatgagaaaaatctcagctaaggcagttgctgcaagagatttgggaaaaagcagtaagttccagagatattctgaatatagaacagaaaatacatgggagcctactgggaagtgagcacaaagaaaataccacactcttatttgggtaactaaatggtattgttattcactgaaatgggagaatacagctggtagatatgatttggaaagcaggtagtaaattcagttttaatcaggtggagatgctggcatccatccaatatacaaatttagaaatcagatggcacttcttttttttttttttctttgtctttttctgagatagattctcactctgtcacccaggctggagtgcaatcttggctcattgcaacctctgtctccctggttcaagcaattctcttgcttcagcctcctgagtacctgggattggtactcgccaccgataattttttgtacttttagtagagacagggtttcactatgttggccaggctggtctcraactcctgacctcaggtgatctgcccaccttggcctcccaaagtgccagaattacaggtgtgagccactgtgcccagcctcagatggcatttcaaatctcaggtgtggaggatattacccaggaagactggggccagtaagggcaaaatgggaccacaaacagaaccatgggaacaacaataattagaggacaagaagaggaagaaaagccttcagagaaaacggagtgcaacaaacagaaacagaaggatgtggygtcacagaagtccaagaaggagaagattccaactggctaaatgctgatgagaagtccaataagcaaaagaataaaactaggccaggcgcagtggctcatgcctgtaatcccagcactgtgggaggccaagacaggagaatcacctgaggtcaggagttcgagaccagtctggccaacatggggaaaccccatctctactgaaaatacaaaaattagctgggtgtggtggcacgcccctgtaatcccagctactcgggaggctgaggcaggagaattccttgaactcgggaggcagagattgcagtgagctgagatcacatcactgcactccagcctggcctgggaaacacagtgaaagtccgtcttaaataaataaataaataaataaataaataaataaaacttaccactgggtttggtaatcagaaaagtaaaaacagggatcttggactccctggaccctctctccagcccagccttgctagctccgcctgtggtgcatgctcctgcctccgactcaatggtttgcaggaaaaatttagatagcacaacagtggcaattcacaatgaagagatctactgcaaatcctactatggaaagaaatatgggacaaaaggctatggttatggccagggtgctggcacgcttaacatggcgagaggctgggcatcaagccagagagtgttcagcctcacaggcctacaagaaatccaaatgcttctaaatttgctcagaaatatggaggtgctgagaaatgttccagatgtggggattctgtatatgctgccgagaagataattggagctggaaagccctggcacaaaaactgtttctgatgtgcaaagtgtgggaagagtcttgaatcaacaactctgactgaaaaagaaggtgaaatctattgtaatggtgctatgcaaagaactttgggcccaagggatttggctatggccaaggagcaggggctcttgttcatgcccagtaaggtgtaaacccagaactaagcatcacacattgagaatctcttcrtaatctaggcacagataatctttaacactaaactactgtgaaattctaccagcattgagtactgtatattaccctgtacttggataggctggctaactcatagtgagagagcactgtgtcgtatccttttgctttattcactagcattttgggggaacatttcttttatgttttaaataaaacttcagcatgaagaaaaaaagtaaaaacartaagttagtaaatattcatttatttgtaagccatttcagagaaaccagaaaatgagctgctataatttgtgtccctgccgtttttccagatgttgctaatgattcctcaaagcagctgaagaataaatactgcagctgctgctcctgatctggagggatggacccgcagcaccatayccaccaacacctttctcctccccaccctcatttccttgtgtacttcttgtgctctctgtgggactgaaactacagctgataaccttcagtgctctcttctaggatggtcccacctaataccaagccatatccacacttagttctttgccagacttgttctgtgtttccagtagctagagggtgaaaaacctgtatccgaaagtgaatgcaaagtggctcctgtagctttagggcagctactgtgaggtaagggtgtgtgtgatgtgtatgtgttgagagagaatatggtaggagaaagggagaaggcacgacagagctagagaaggaaaaataaagtatacctagaacacaacatcaaccagttagtagtaacacatagttataatcagctataaaagtgagatactgcaagatggcttgtaaaagatttccttagaatcttccttatgtcaacttaactcagtaaatgcagacattcaaagtatctttttcacttttaatatgtgacatctgamtattagttgcccacaagtatgtgcctgattgaagaattatgcaagaaaaatgctagcagctgcatactggagagctgaccaggcaaagaatactccacagttgcatcaatagaaaaggcacagaatgagtatcaggcagtaggaaatacattacagctgacattattcttttccctccatagccaagcaagagcattttcctgataacctgctcccatcctgggccattaccttaatctcagtaaatggaatttttgtgatatgctgcctgacctactgtaagtactatcataccatcatcctgatctcaattctggaagatcaaactttattaccatggttcggcatctctctgaggttttagcctattcgcttctcatgtttacagcaagcctatggaaacatgagcatctcctttacttgtctcaacaagttctgttcattcactggacattttccggacacctcctacgtgtgtggcactctactaggcactggaattacaatgacaagaagtcactgccctcaagacacattctagtttagtctgtttattttttccctgactttatatatttttggagactggggtttgctaactaatttgaaaacgtttctgatgctaaatgatattctaatttttttytaagggctagtcgatttggyaggtgagttgttacacactccttagtgaattccaacttccatggccaccatcctgctgatattctaattttgatttggagttagagaaaaggcaaattgacaaattttggtgccaagaatcattttcttggaggagggcaagatgcactaatacagttgagaaactacatggctacaggtgatctcaccaattctcagttcttgggctgggtggggtggctcatgcctgtaatcccagcactttgggaggccaaggcaggtggatcacttaaggtcaggagttcgagaccggcctggccaacatggtgaaactctgtctctactaaaaatacaaaaattagccaggcatggtggtgtgcacctgtagtcctagctactcaggaggctgaagcaggagaattgcttgaacccaggaacccaggaggcggagactgcagtgagccaagatcatgccattgcactccagcctgggtgacagagtgagactccatctcaaaacacaaaccaattcttagttctttttttttttttgagatggagtctcactctgccacccaggctggagtgtatgccccgatctcagctcactgcacctccgcctcccaggttcaagcaattatccggcctcagcctcctgagtagctgggactacaggtgcgtgctgccacgcctgactaatttttttttgtatttttagtagagacggggtttcaccatgttggccaggatggtcttgatctcctgacctcgtgatccgcctgccttggcttcccaaagtgctgggacttcttgtctttggaattccagtgcctagtagagtgccacacacataggtgtctggaaaatgtccattttctcagttctttagaatacatttttggatgaaagatcaggagtggctgatgaaagaagagatttctaagatattttaccctatgaatttacactttgggtgttagacatatgctgccctcaatctctatgattaaatgaagaggaactgctagttctatggtccgaaataaggccataatcactatgaaggggtaccaacccttctttgagtagaaatcatgtacactgatcaaataaaatcggaagatcaacatctgctgattttcccaggctttagcaccaaaaaaacccaaagctcagtgaattctttagagagtatgtgctgttaacaacttatcccaagggtaggataaagaggtctggtgggctcaaggatgtttctaataccaactatccagtgttacccctttaattcaggggctctcatcctcaacattattggcattttgggcaagataattctttgttttggagtgctgttctgtgcactgtaggatgtttagcagcttccttagcctctactcactacatgccagtagcaccccttgcccgttgcgacaatcaaaaatatccccaagcattgccaaatgtccccttggcaaagaggtaaagagggagcgttgtaaatcacccctggtataagaacaactgctccagttctaagccagtctgaagccttgctaaagtaaatattaacatatgggcacaattcaagggaaacttacttatcatttttattgtttgttcttgtctccaaggctttgccccaagatgcagagagagaaggaggaatgagagattgagaagggaaagtgtacgccctgtataacagtgtccgcagaagcaaggggctgaaaagatctgaaggtagcctccgtcatctcttctgggatacatggatcgtggggatcatgaggcattcttcccttaacaaatttaagctgttttacccactacctcaccttcttaaaaacctctttcagattaagctgaacagttacaagatggctggcatccctctcctttctccccatatgcaatttgcttaatgtaacctcttcttttgccatgtttccattctgccatcttgaattgtcttgtcagccaattcattatctattaaacactaatttgagttcatcttgaatattcctgtggtaacttcttattctgatcattcatttttccctctatctctcagtattgatggacatgggttggggtcactttgtattaacacggtaacattttcattggtttctctgcctcttactaacagactcatcctactgacgaatcatggagccaaatttcacaaagaattactctgtcatgtcattttcccactcaaaaactcagaagagaccccactgcctacagaaaaagcttcaaagctttttaactttccacattccagctgatctcttcagtctaaatacccttgagttctgtcaattgttcctcacatggcatggtttccagtgcctcacatgaatggggtaaacggaacccaagactttagatttggtcttaatgactctacatacaatgagataattattatctggggtctggaatgtccatcctgttaagagagcctaacacagcactagctttagtgagtcacaaatccccaggtattttcatgcaagagaaacttacatgggacattagaatccaagagactgatatcaggtccaaggtagttataagcctccctaaacagttcagctttgacttgtgaaggttagagtaacaccagtataggaattagtctacaaaattatctttaaaaataaaggaaagcaagaattgtcctgggcaggagggggaaatataaagaaaaatgaaaaataatacctgacgcttatacaacaggttgttttgcaaaaacactatttcatcttagtcttataaaaatctctatgagcaagatctatttccatgttatgggagagaaaccagaggctcccagaggttaagagatttgcttgaggtacggtcatacagatgaagaataaaaccaagattcaaactggacatcaagttcaggctcctttccctacaacctggcagcctacacatattttcccccaaggcagtgtctcaacttcctatcctgttttttcatttccactgaatgcttgctcactcctcagaatgtcttttccaggatgttgctctggctcagttctgtcattatctacaattttcttgactttctatctaaaaagtcttctgctcagtctgctgatacttcaaaatgaagccgtgtacccaatcttctacacaaggccttctgtggtcatcttgtctagctcaagcagttccacctctatagcacatctcataccaccagcataggttgattttcatgtaccacatcttccttctatcctttamtggactgtatgtaggtttattgagaaaagcaaccatgcctgagagccccacacatagaagagtggcttgatcaagcatttggtcgtttggtaatagctggtaataactaaacatttgcctgatcgatatttcatgtgacaaaaattgccagagtagttttaagttctctcataattcagctttcccttcatattcttcagctatcaaggttactgtgtacaagctgggaatacccttgatcttgagattaaaatgtaaattaagagattaaaattaagatcttatatttaaaatatatatatatacatatataattaaattatatatacatatatacatatataatttaaaaattatatatgtataatttaatatataaataaatttaagatgttttcctcctttgccaatatagggtttgatgtaatcatttctttgttttctcaggtcycacctccatttgcaattgacctcttctgggaacttcctcagatggacaagattaccccaccttgccctttacgtatctgctcttaggtgcttcttcacttcagttgctttgcaggaagtgtctagaggaatatggtgggcacagaagtagctctggtgaccttgatcaaggggttttgaaatgcagaattcttgagttctggaagggactttagagaataccagtgttattaatgacaaaggcactgaggcccagggaggtgacccgaattataaaggccagcgccagaacccagatttcctaactctggtgctctttccctttatcagtttgactgtggcctgttaactggtatatacatatatatgtcaggcaaagtgctgctggaagtagaatttgtccaataacaggtcaacttcagagactatctgatttcctaatgtcagagtagaagattttatgctgctgtttacaaaagcccaatgtaatgcataggaagtatggcatgaacatctttaggagactaatggaaatattattggtgtttacccagtattccatttttttcattgtgttctctattgctgctctctcactcccccatgaggtacagcagaaaggagaactatccaaaactaatttcctctgacatgtaagacgaatgatttaggtacgtcaaagcagtagtcaaggaggaaagggatagtccaaagacttaactggttcatattggactgataatctctttaaatggctttatgctagtttgacctcatttgtaaaatatttatgagaaagttctcatttaaaatgagatcgttgtttacagtgtatgtactaagcagtaagctatcttcaaatgtctaaggtagtaactttccatagggcctccttagatccctaagatggctttttctccttggtatttctgggtctttctgacatcagcagagaactggaaagacatagccaactgctgttcatgttactcatgactcctttctctaaaactgccttccacaattcactagaccagaagtggacgcaacttaagctgggataatcacattatcatctgaaaatctggagttgaacagcaaaagaagacaacatttctcaaatgcacatctcatggcagctaagccacatggctgggatttaaagcctttagagccagcccatggctttagctacctcactatgctgcttcacaaaccttgctcctgtgtaaaactatattctcagtgtagggcagagaggtctaacaccaacataaggtactagcagtgtttcccgtattgacaggaatacttaactcaataattcttttcttttccatttagtaacagttgtgatgactatgtttctattctaagtaattcctgtattctacagcagatactttgtcagcaatactaagggaagaaacaaagttgaaccgtttctttaataatgctgatctactttttgttgaatttgtattttatttcaagtgtcaaagaaatcatctttgtttatttagatgaaaccaaacactacacatttacactcacactgcttccaggacccaagggtttcacagaccatttgcctacctggttctttcctctcctctttccagtgatttctagaataccctttcaaaggaccacatgaatatacgaactgtaaaattcaactttaatcttttgcgaaatgttttatttactgcttaaaatctaggtgggtggatatattcatgtatgcatatattgatagattaatacaaacataagtatgtatttaaatttaaggataagtaaagtgagagtacaacagccccattcttagttaaaaagaaaagaaaaagacaagagcaagccactgccaccacaggtaccagcacttaaatttgtcagcaggctgaccaaagagtggcctgtctgttggcattcatcggacatggcagctcccttcagctctccagtgagtttcaagttcagagcactttcagtccttgtcttgtttatctattactgaagggtttctaggaaggtttagcagtgcttcaattttcttagcatcattctcaggttcatcttcctgtaaactactttcaattttctcagggaggtgctcagtaacttgtagtctgcctttcctgtaatcagataaaaaggataaatcaaatactgctccatttctttagttcttacagatttaaaacaaaaaggatagcatttgtcttttcctccctgctttggtatagcaatttagaagcaaatactgctccctgaacttcaaatacagtaactttcttctctctcctaacctcacaagccaattatgatttccacattaccataatggataccgttgtggtgacagctctgatccataagatattcctagtatgctgggtcctagagttctcacaggagtgatgtgtgggaactgacacactttgtgctaaggtgtgaaggcttgaagtctcgctgtcctcttgctcccagggctgggggaatgtaagtaccctgccactcttaaactctgtgaccagaccttttaggaactggtcaaaggctataacaatggtaatccaaggtagagaaaagtcagatagaacaaaactatagatttatatttatgaagagttaaaaactaatttccaaataatagatcagttctgtttctaaatcaagtattagtgtcttccttaagtgattatcgggattaaagtttcttctcaactcttcacagatttggtcatttgttcttctatatctctatagtcagttttctacattttctgctcattgaggcaatttttttgactctcaatttgtttgattttcctgtattattttcaagcgaagaagtaggcacatacaagacacttaaacgtttattaactctccttagaaatatctcacacacacacacacacacacacacacacacaaacacccatacgtgtatatgctatacaattttgacactttcattctgccaaagtattctttcattactatgattcaagttgtttttatccatctgtcttaaaattgatactaataattgtacatatttatgaagtacaaagtgatatttttgtacatatacaatgtgtaatgatcaaatcagggtaattagcatatgcatcacctcaaacatttatcatttcatactgctgggaccattcaaatatcctctcttccagctacttgaaaatatacaataaattattaactatagtcatcctacagtgccacagaacactagaatttatgcctccgatctagttataattttgtattcattaatcaatcccttaaatctcctcttcttatgcctttccctgtcccctcctcagcctccagtaaccataattctactctttacttctatgagcccattttttagctcccacatgagcaacagaacatgcagtatttatctttctgtgtatgacttattttacataacaatgtcctccaggctcatccatgttcccacaaatgacaggattacattctttattatggctgaatagtattctatggtggatatataccacattttctttatccatccatctgttgatggacactgacgttgattccataccttggctattaatagtgctacaataagcatgggggcgcagataactctttgatatgctggtttcttttcctttggataaatacctagtagggaagattgctggatcttacagtagttctatttttagttttctgaggaacttccatactgtttctataaaggctgtaataatttgcattcctaccaaaagtatatgagttcccttttctttctacatccttgccaaaatttattttttgtctttctgataatagacattctaattgggataaatatcactccaatttcccaaactgtccccaaaccacatttcattgtggttttgatttgcatttccctgattagttatgttgaatactttttcatatacttgttagcacttgtaggtattttttgagaaatacaagtttccccccaagctcccccgcccacttttttttttttaaagagacagggactcactttgttgcccaggctggagtgcagtagcacaatcatggctcactgctgccttgaattactgggctcaagggatccttcagcctcagtctcccaagtaactggggctataggcatgcactactgtgcctaattttcttttgtctcatgctgtcactcaggctggagtgcagtggcaccatcttggttcattgcaacctccacctcccaggctcaaacaatcctcctgcctcagcctcccacgcagttgggattacaggtgtgcaccatgacaatttttgtatttttagtagaaatggggtttcaccatgtcggtcaggctggtctcgaactcctgacctcaagtgatccgcctgcctcggcctcccaaagtcctggaattacaagtgtgagccaccgtgcctggcctccaatgccctttatttctttttcttgcctaactgctctggctaggatttctaatactatgttgaacaagactggtaagagtgggcattcctatttcattccagttctttgagggaaaagcttttcacttttccctgttcagtatgatattagctgtgagtttgacatatatggcctttactgtactgagaaatagtccttctacccctaactttttgggaggtgttaccatgaaggggtgttcaattttaccaaatgctttttctcatttactgagatgatcatatggtttttttccttccttctgtttatatgatgtaacacatttattgatttgtgtatgctgcaccatccttgcatccctaggataaatcccacttgttcatgatgtataatctttttgatgtactcttggatttggtttgctggtattttgttaaggattgttttgtagaatacattggcctgtaggttttgttgttgttgttgtttaatgagcctttgtctgtttgttgttgtataagggtaatgctagccttgtagaatgagtttggaagaactctctcatcttcaatatttcggaacagtttgagaattggtcttaattcttctttaactgtttggcagaatttagcaatgaagccatgtggtcctggacatttctttgttgggagactttttattaccagttcaatcttgttacttgttattggtctgttcaagttttctattacttcttggctcaatctcgatagattataggggctcaggaatgtatccatttcctgtagcttttccaatttcttggcatacagttgtttcataataatctctaatgatatgactatgtccgtggtatcagttgtaatgtctccttttttgttttttaccttaattgggtcttttttctaacttgtggtttcttgattttgttttcaagaaaccaacttttcatttagttcttcttttgtgtttttttgtttgtttttaagtctctatttcacttagctctgctctgatctttttatttatttccttctgattttgggtttagtttgttcttgcttttcgagttccctgaggtgcagtgttaggttgtttatttgaaacatttctactttttgatggaggcatttattgctataaacttccctgttagtgatgcttttgctgtatcccataggttttggtatgttgtgtttctgttttcatttgtttcaagaaatttttaaatttccttcttaattttttcattgacctattggttgttccagagcatattatttaatttctgtgtatttgcacagtttccaaagtccttcctgttactgatttctagttttattctgctgtggtctgaaaaaatatttgatgttattttgatctttaaaaatttgttgagacttgttttgtagcctaacatatggtttatcctgaagaacacttcaagataagaaaaacgtgtattttgcagctgttggatgtgatgttctgtaaatgtctgctagatccatttgatctatagtacagtttaagtctgatatttctttgttgattttctgtctagatgatctgtccagtgctgggagtgtggtgttgaagtccccagctattattacattagggtttatctctccctttagctctaatattatttgtttagatatatatatatatggatgctctggtgttgg

SEQ ID NO: 96553 - DNA, 12622 bp, Homo sapiens
ggttgttgtgaggatccaatgagttgatttaggtaagcacctagcacatgccgtggcaccaagtaagcactcaataaatcactcaactcctttccctatgttgtttctttgcattgtctgaaaggatcaatggagtcaaagatccagcttttcactggtggttattttttatttttcaattaagattcaaatttatggaagtggaaatttaaaaacctcgttttcccttaggctgtgacattcaacttacaaatctctttttctgttgatgaacctagtattaaacaatagtttttagagggacttttacaaacttagttaattagattttcttaaacatcttaaagtagatttataaatgtaatatattctattttcctttttctttaaatacttcaacatatatttcagttatctattgctgtgtaatatcaatccctaaaatagtgacttaaaattgtcctaataatatgtggtgctcatgagtgcgggacctgactgggctcagctaggcggttctcactcagggtttctcatgttgtttcagtcagatagtggctcagtctagaatcatctgtaaggcttctttactcacctgtctgggaagactcaaacagatgagggctgaaacagctgggaatccttgggcatctctccctctcaatagttttttcatttttgttgttgtgtgctctttgtatgactataccacaatttatttatccaatctacaattgatgggcatttggatagtttccaccttggggcaattacaaatagtgctgctataaacactcttgtacctgtcttttggtatacatatgtatacttttcttggatatatacctaggaatggaattactcaggcattgggtatgtaaatacgaccaatttttctaagtgattgtaccaatttacatctccacaagcactgtatgagagttccagatgcttctcatcctcagcaatagttggcattatctttttttttttaattttagttatttgggcatgtttagcagcatttttattttcctgatgggttgagtagcttttctttcttttcttcttcttcaatttttttttttttttggccatatggatatcttctattgtgaagtatctattcttgtttctttttttttgtccattgctctttctttttttttttttttttttttttttttagacagagtctggctctgtcctgaggctggatggagtgcagtggtgcgatcttggctcacctctgcctacctggttcaagtgattctcatgcctcagccacccaagtagctgggattacaggtgtgcatcaccatgcccagctaatctttgtatttttagtagagatgggattttgctatgttggccaggctggtctcgaactcctggcctcaagtgatccacctgccttggcctcccaaagtgctgggattacaggcatgagccactgtgcccagcctgtatgctttttcttattgacttaaaggagttattcaaataatcaggttaaaagtccttctgttacttattgagattttatatatatatgtatatattctcctacttttgtgggtattgtttttctctaaatagtatcttttgatgaacatagtttttaatttcaatgtaatggtttatcaatctttctgtctctgatttgtgctttctgtgtcgtgtttaagaaatcttttcctcccctgaaggtactctcccaataaccttctagatttcttattgttttacatttcaaagttagacctacaatcaacctggatttggtttttgtatatatgactaagggccaagattcattattttccatgtggctatccaattgactgagcactccctattgaaatgattatcctatccctactagtgttcagcttatcctttgtgacaaatcaaattttcctatagatgtaggtctgtttctgaattttctattgtctgatggttctatttttctaccctttggcagtaccatctggttgtaattattgtagctttacagtaagttttgatatctggtagtcttcaaactttcttcttcagctccattataatcttatgggaccaccatatgtggtccattgtttaccaaaatgtcattatatggtgcatgcctgtatattctgaattcgactcacaatctctactgccaccgctaatttcaagccaccactacttcattctaaattaacttcaatggacttacaaccagtccttctgcctcataacctacacacagtaaagaggtcatttaaacatatacaagatcttatcactctctggctcaaaatttgaaatgacttcctatcccacttagaataaaatccagacttcttaccatgtgatattagtcaggattgacttattattacttaaaagcacaaagttttatttctctcttactcaaaatctgagtctccatgactcataatgggcactccagcctgggcaacagagcaagactccatcttaaaaaaaaaaaaagtacactatacattgtaaattgagattcaacataacctggatgtggtgccactccccaacctggaggatcaccaaggcagggctgtcattacacacctgtggtgtatagcagtggtttctcaagatgaggacctcttttaatcccttttccccaccaaagaatcagaccttacgtagtggaagttgtgcttttattatctaatggtgtatgtaaggcaaaagacatttggatttcaataggatttttagataaatttataggttttaaaaattagccacaacagtctctttatatgtttgaaaaatagcattacatatatgtataaagcaaaaacccgtgagagatcctggggagaagaattgcctggagggggaaattgagtccatctccaatgttcagcacctcttctctttctatttttgaccccctggtttcctgtagacatccacacaaatcttgaggtagaagtgaaaacaatgctgtcagcagtttcacgtctgtcaccattgaattcatgccctgacatgtgcctcctactcagaaagttatctggtgattatatcacttctgtgatatcatccttcctgaaagtgtccttacccagcacatgaccaccaactgtcacatgattgcatcactgccacaggggagcccaggacacagcacacaaatcggattagtccagcctgtaaactaagcctttgcttaatagcctggaattgccctccacccctcagccctcaggcctgaaatcctattcagccctcaaacctagtacacatgtcctctccctacgcacactctcctggccttcacctcgccctcagcattgaacaatccccttcaggactcgcagagccctctgggatcgcccccctcagctctcatccctcgctaggcacttgagggctggggaagtcttacttattgctgtggccccagcaccccacacaaggccacatgtgtgacatttagttggtaattcttttttttttttttttttttttgagacggagtctcgctctgtcgcccaggctggagtgcagtggcacggtcttggctcactctgcctcccgggttcacaccattctcccgcgtcagcgtctcgagtagctgggactacaaggcgcccgccactacgcccgactaattttttgtatttttagtagagacaggatttcaccatgttagccaggatgtagttggtaattcttaaatgttggttaaactcagctgttacctgctagtaggacaattcatgtgccccattctggcaagggtaaggttaacacttgtggttttagagacttctagttccactttccagtttacttttgcttctctccctattcaaaccagcaggaaaagagagtagtagttcaggagttgttgccaaaatccagagccttatcgggggaatacacaggaagggacagacctcagatgcattttaagatattgagagacagagtctgagtataaatcatatactgggggaaggaggcaaatggcttaaaatacttttttttttttttttagcactgtgatgttctgagtcaaagatgactcaggcttcaagcctggatgattggatcatggtggcagctattaccgtaaaaagaggaggaacaactttggggaagatgttgatttgcttttggatggattgagtttagactgttgtcaggacactaagtggacacataatgcaaacagttgctttcatagatgagggtgaatgctaaggatcagagaggattccaaggccttcctggggcctaggaagactcaggcactgggatactctcatcacccccatactcttcttaaggggaagaaacctacctcctctgagatggtggggcagaggggagttgtgatggtcatcccagggcttggggtgtgcccaagagtgagatcagagatgtgtttgaggctgtggggagcagcgtatgtcactttcagaatgtcagacttgggaccactcaacaaggagatcaagggctgggtgagaattcagcaattatggaagatttatgtttcaatataatatcctttttcctatagagatttaaaacttttaaaatgtaatattgacacataaaattttaaaacaagatgagtatgtgaaggccattcctgacacttatgaaaagacattaagctctcctttaaagttaagcctctctgtgcctgaccttctctccctgcctttgtctatgccactaagattactgcctttagttcaattcaaggagcttttattgcatgcttacaatgaattatagtgttttggggacacagcgaaagagaaaatatagcccctgcttttaaagaccttacaatctcatcatagaggcctgacatacatgcagtaagctattaaccaccattgcaaggcagcatagttactgactgatagaacatacgggtgaccagtttccctggggaagatagaactggaagtggaccctgaatcattggtagaatataaaagtgggggtgggtgggaaggagaaggagcaaaaaggcatggaggtgacattgaccatagtatgttttaggggaatgctggcttcagcacactggggaaaatggcagataatttttgttaggcagagtagggccagactgaggagccctatttagctaatacgtcttagttgcaagtgctaagaaccaacgtgagcaggctaaactgtataacatggtggttagagctcagattctgaagtcagatggccttggtgtgaatcctgattttatctattgctgactgtagtggacaagttacttaatttctttgtccctgtttcctcatatgtaaaatgaagtaatacatggattcactgggaggattaaataagataatttgtgtaagctaattggaactttacttggcacatagtaaatgttcaggaagttttatcttttttgttgataatgttgacaatgttgataattatgatgacaaagcaaaggagaatttataaggacacaggggtgtcttatggaattcaaagtcagaaatgccactagattttaatatgggactagatcagaaagccatcagggaaagcaggaagctgtcagggacccagtcaccatcttctgtttctgtttctcttaggagaactgcaacatgtttctgttttccaacagagcagtcttccctgtttctctgttctcatggtggaatatgtttgccctcagctcctgagttcacatggaacaattccaacaaccagaagacaagtacggctgcctcttagtcataatttcagactttcaggaaggaaatctaccttgtccagattcagtcagctgtctacttctggtccattaagctgggtctgaggacagggtcatgcagtacaattggggctgcccatcttctagatgggggtcagttcttagagaaagggatgactcttaagttcaaaagatatctcaagctctttccctttcgtgtgccactgaagattctggtgtcaccatgggccgctgccccacccagtgttaccattattgtaagaacaacacaaagcctctcttctggcsaggtgttgctgatgccgagattcccatctttgacctggggtggaagaaggtaaaagtggatgagtttccactctgtggccacatggtgtcagatgaatatgagcagctctcctctgaagccctggaggctgcctgaatttgtgccaataagtacatgatgaaaagttgcggcgaggatggctttcatatccaagtgcggctccaccccttccacgttatgcacatcaacaagacgtcctgtgctgggctgacaggctccaaacaggtatatgaggtgcctttgaaaagccccagggcactgtggccagggttcacattggtcacgtcatcgtgtccatcggcaccaagctgcagaacaaggagcatgtgattgaggccctgcrcagggccaaggccaagttccctggccaccagaagatccacatctcaaagaagtggggcattaccaagttcaatgtgaagacatggtggctgagaaacggctcattccagatgactgcggggtcaagtacatccccagtcgtggccctctggacaagtggtgggccctgcactcatgagggcttccactgtgctgcccctcctaaggcccaacaataaatcctactttctgtccacctgaaaaaaaaaaagacacctcaaactgactaggaatctactacagcagtggtccccaacatttttggcaccagggactggttttgtggaagacaatttttccacagaccagtacagtgctgggacagtggtgagggggatgattttcaggatgaaactgttccacctcacatcatcaggcgttagttaggttctcataaggagagcacagtctggatcccttgcatgcacggttcacaatagggttcacactcctggaatccagtgccacagctgacctgacaggagatggagctcaggtttaatgttcactcacccaggggttgaggactcctgtactagagcactctagccttctgacctgaggaatatgatttttaaggcaatggtattcatttaggaattccaacgtctggtaaacgaccactgaggtctcaggatatgagtgagaaaatgagtgtattctataccttaggctctattgaggataatgttaaggaaaattccactccaaatttgtctctgaaatagatctttgtggtccaagagtgaagataagttatgcatatgtagcagaatatcattttgatatattcaccaatgtaaatttttccaagaattgtctgtgaccctgtgactctatcctttttgggcaataggtcatgaaagatctgctgcctcaaggaagatcgacagagcagaagcaaaaacaaaagggtcaaggcagatttgtggctttagctgtttttaaaaatgatgtagaataatatctgatcgagaaagacaataaagattagagtagcaattatcacactagagactggaaaaccaaagttggttcctcaaaaagatcaatgaaattgccaaatctttatctagacttaccaagaaaaaaagagagaagacttaaattactaaaatcaggaataagagaggaggcatcattactgaccttatagaaataaaaagaattataagagaatactgcaaacaattgtgtaccaacaaattagataaataaaatggacagctcttagaaaggtacaaattactgaaatagattcaagagaaaaagaaaatctgaatatatctataacaagtgaagagattaaattagtgaaaaactactcgcaaagaaaagccaacactgagatggcttcagtggttaattctgccaataattaagccttagaagtgaaaatacttcctgggaccatttatttattcattttctaacaaatattcgagaacctactgtgtgctagggacttggagtacaacagcagacaagacaaagtccctgttggtcaagggcttgatttgtcatgagatttgtaatcaaggcacagttttgtgagctgctggcaagggaaactattgtgaactcacagagtccacataggactttatggaacgctgggtttgtgtgccaaacaactgtttatctgactgcagtcacctccatccatgcttccatctcctctcctctcccctgtccttctactcccacctttttctcgctctattgaagcagccagccctgctattcagaagtgggtacgcatgtcctctttgctgttaaccactctgcagttgctagagaatctcacacctgtaggacacaggagtagaaggtctttcctacgtctattctcaaagtgtggatcatcagacctcgaaagaggctaggaagtcatcttctcccttatcaacccatcccagtctctctctgacatcttgtgctccagatgttggggacagcattccaaaatgctgctggagttgggctctctcctacctgtcaccaagctgtgcagtgggaaccaagctcccatagcctctagtgtagaggaaccttcaacaacattcatctgaaaatctagtgatggttaatacaggcatgtcccctggggtctgaatattttcatttcttttttttttcttttcttttctttttttttttttccttcgagacggagttttgctcttgttgcccaggctggagtgcaatggcacagtcttgtctcactgcaacctccacctcccaggttcaagcaattctcctgcctcagcctcccaagtagctaggattacaggtgcccgccaccatgcctggctaatttttgtatttttagtagacaaggtttcaccatgttggccaggctggtctcaaactccagacctcaggtgatccacccgcctcagtctcccaaagtactgggattacaggcgtgagccaccgcacctggctgggtctgaatattttctgtaagaaacactagcatccctctcaaaggccctatgacctttttttcatccttcacaactttcttccttagccaactgaggtttgtctgggttcacagtcagctgcactacacaagctcggctggaatgcccggctctgggaattgacagctggctcacctggctgcaaggccagtttcctgggcatgcgacctgtacacctgggcacagggctccactcaggccccacacttggtttcatgctctgctgtcaccatcttgaaattctcaactttttaaataaggagcctgcatttttattttgcactgaaccctgtaaattatgtatccagtcccacagggttgcattgtggacctttaggggctacttctgtgtcatgtttctgagtctggttagagtggtgattaatcacctggctctggggcggacagctggcatttgaatcctggctcctttacttactagacctgtgatcttgaaggttcctcagcctcttgatttctttatctataaagtgggataataatagcatgtatctcataggcttgctgagaggataaaatatgttaatacatatgaaacactcagaatggtgcctggaacatagtaaaaagctgtgcaatgttggatgtttttgttgcgtgcctattccaaggtcacattgttctgtatcttacggcagtgtatcttgcacttggtggtgaatctgcctgttgaatttaattagttctgtaatagtctctgttcatgaaaagactgcagcagagtgagcaaagtgggtgtggaagggagacccaagttctgcttttgttctgccatggagcagagttccgtgttagctctccctttccctgaccccacagacatcccatctacttaaagccatgtttcccaaagtgtgggccacgtgcccctggacaggatgattttaggtaccacatagacccagcattaaacaacattccatctcatagacagttatgcatttttttatatcctttccatccagtgattacatatagaaaaatgtttccattcagtgttaataattttttttttttgagacagagttttgctcttgtttcccaggctggagtgcagtggctcgatctcggctcactgcaacctccacccctccgggttcaagcgattctcctgcctcaacctcccgagtagctgggattacaggcgcctgccaccacgctcggctaatgttttgtatttttagtagagacagggtttcaccatgttggccaggcttgtcttgaactccagaccacaggtgatctgcctgccttggcctcccaaagtgctggacaacaccgtgcctggccagtgctgataaatttttaacatctctcacatacttgcaaatttcccctttgtagtaaagaaaaaattttgcctcctgaacatgaaaggaaaaaaaaaaaaaaaaggaaaaaacaggcccaggacttaagcctgcatcagaccacagtatctagttggaatgttaaacattataatgttctcattgtatttgtttctaggattaatttatgagtagagaaactggtttttccatgtaaggtaataatccaaaatttctgacggagcaaagtaacatgtgagaaagtctaacagtgtttaaaaataagaaaatattcgcaaagaaacccagggctatggccaaaagcagaatggaatttgaggccactgaaaaacagattgagtgagtttaacaccagttagcatcaacatcacaaaacatgatttcttgttgttgttgtttttgagatggggtctcactgtgtctcttaggctggagtacagtggcatgatctcagctcactgcaacctctgcctcctgggttcaagcaattcttgtgcctcagcctcctgagtagctgggattacaggcatgtgccgccacactgactaatttccagctaattttttttttttttttgcatgtttagtagagatggagtttcatcatgttggccaggctggtcttgaactcctgacctcaagtgatccacccagcttggcctcccaaagtgctgggattacaagtgtgaaccaccgcgcccggccgacaatatgattttcatcacagaaatgtgatacacatttggaaaaaaaagcaacgagcagtggggaaaactaaggaagaagtatgtgctaagcagtgtctcccaagatggcaaatggaagtgcagcgtaatacagctcagggtaagactgtctctagggaggaacctgggtggagtaaagagaaggaaaaggaaaggagggtttttggtttgaggcaaaatagaaaattgcaagcctacatagcagggaacatgtgtattctttagacatgactgtgatcatgcagacagttaaacatcttcgtgagcctcacctgtccttttggttgcatttccaaggcctggacaaaggccgaagctctctcagtgccctggctgacttggcccagatgaagtaattgcagcctgttgcttacatcattctccctgtcttcattgtggagagtgaatcagcaagtcagcagtttccttttaaagctcatttatttatgttttttaaaaagtgaatttaaagaataaaagaatccgaggcaacctggatttgggaaagtggtgaaggcgtgtgccatatctgttagttccgcacccccttcccatccactctccaaccttctctgtcctgctgtatgccccgggcctggttaggccatgtcaatgtgttatttgtcctctggcttctgttgggggtccttaatggggagcactagcaggaaaatgggagaggaagaagagtgaagtcagagaacctgtgcttctgctccctccctgcggggttgctgctggctggctgtgtccctgcactgcaggtctgcagccttctggtgcttcccctccttctctggcctcttcacaggtagggtagtagcagcttctactgccagtagcttcagggaactgcattatccctgtggttgccccacaaaagactatggcaaattgtccttttcttaaattctcctcaaataacccagattgagcgcaccatctgttttttgctgggctgcggctgatacaaggttatttacaaagatcaaagtttgggaaacactaacccagaggaaatctacctgtattccccaagatctctctgatccctcaaaccttccagatatccagaggaggtaatggtaagggttggtaaatggtgccatcttcctccctacccttcatcccctctctttttccaagtacttcttttagttgctattttaataccgataatgcaatactgttttctccaatcccacagagtataaatctcaactttttgtaggtaacagaattccattcaagtaaaacaattaaatgattcagatactccatgaagttttatttttaaaaaattgtttaccctgtacatgtttctattgaatcctaagtacgaatgcccaaggagataaagcaagtgcagttaagtatgcatgggaaagctaaaatgggtatgtacataagatcggcaaaggaaaccaagttctgtaaaatgagttctccctcccctccagggtagctgattatgaggaaaataagaaagagctttgcttttctccttagtagtaatggtctacaataagctgcacacacacatccctcatc

SEQ ID NO: 96554 - DNA, 14679 bp, Homo sapiens
tgcccggtgctgtggggtaccattctcatctggtcccgctatgaggcagctttatgtagtccctaaacacttacttgatcctcaacattgtagctgggtgtggagggtgaggaaattggatttcccgtcccaatataagggtccctgggctccccaggggctgggttctgcaggcctgtccatggggcagaatgctcagtggcatgacatgagagcgtggtgaacatttatagcagcggaaagtgcccaaggaatgagaatggagccaaaggctagcgtgcagcccaaggggtgggcgcgagggatgggccactgttgcccagcagcatgggcagcctgcctgagagcctggacaaggatgctgggaggagggcaggaaggcagcacctggcagagggtccccaagctgctggccagccttgctttccctcctctgtcgcctgagaatgtggcaggtgtcagacacacaacagtgaaggtgacccactcccagccctccggctgctcacctatctatgggtgacagccacagagacggctgaaaaggactccccttcattcagcacattctctgtagccagcaccattctaagcactttatttaatttaatctccaccacaatcttatgaggcttatactcccatcatgctccttgtacagatgtggaaactgaggcacagaatggttaagaaccttgcccagggtaacacagcaagttagtggagagtggagtatgaacccaggaggtcctgttcaaaggctgtggtcttagtgctcctcagaataaggcagcacagcacaaggtgctgtgaggatgttcgggatgccagtggtgggtagaggccaggcagggtcagggatggctttaccaagcaggtggcatttccgttaaagttcaccagcaatagaagatttttagtccccagctgggccagggtggtgccagtggcctggggttgggcaagcgagtgggctggccatcagtggcaggtgaagggggtgactggtggctcctgcctgtacacactctcttgactcagtgtgctctctcccctgcctgggccacagctgcagcatcctcaagagtctccccgtaccagccactccctgctgatttgtcctgcctcctgcagtcctaaaggcagatctgaccctaccaccaccctgtttctagcccttgcctggctccctactgctcacaggatgaggtccatgcctgggaactgcctccctctgtggcctcatctcctagcccgccctccccgtgagctgtggcctgatgtcatgggtctgcctatggttgcaagtgtgctgtgcttttctggcttctgggcctttgctcacgccattctgcctgccaggagtgctctcctttcctcacctcccacctctgtacccctcacatccctgttgaggtagaagtccatcctggaagctttcctagagcccccaggctggccttgatggttctgctgccaccaccctggctctccttcacagcacccacctgctgcaccgtcactgtttgtggggtcccctatccgtctcaccagcagccaggcccagggcatctcagggtgcatggtgggataggctgagctgaacctaagtggtctgagggaaatgagcagtggaaaaggggaggtgaggccagtgggccccaaggccccatctggtgggtcagaccatagtgggagcttgggaaatgccagatcatcagagaggatccccctcatcagcacagactctgtgaggtggggctccaggggaccctgtttgttttgttttgagacagggtgtcactctgttgcccatgctggagtgcagtggtgcaatcataactcactgaagcctcaacctccctgggcttagatgatcctcctacctcagtctcccaagcaactgggactataggcacatagcatcacccctagctaatttttgtattttttgtagaccagcttttgtcacattgcccaggctggtcttgaactcctgggctcaagcgatcctgccacctcagcctcccaaagtgctgggattacaggcttgagccactgcacctgcctccagggccctttgagtgtgcctcagaatagaggcctctcctcacagggcctctcccagggcttacaccagcaccacggctctctggacagtggctttccatagtggatactctcctcacaatcatgatcctgagaggtcacagtcactcagcaggaaagtggcagtggagctccactccccaccaatcctgtctttgtgcctagccccaggaactagcaacttgccttcataggatctgcagagtgatggctctgttctggattttgtttttttgtgggcttgtaagatggttttttcatttaaattcttcagactatatatagttgtcccttggtattcatggaggattgactccaggaccccctgcagatagcaaaatctgaggatgctcgagtccttgatataaaatggtgtggtatttgcatgtaatctatgcacatcctcccatgtgacttaaattatctctaaattataatacctaatacaatgtaaatgttgagtaaatagctcttatactgtattttttgtgtgtttctattgctatattgttattttttaatgttttttaaaaaatattttcaatccacagttggttgaatccacaaatgtggaacccatggatacagagggctaactgtatacttaatgatttgtatacttttctacacatatgttgtactccaataaaatgttcatttaaaaaaatagaagaaattccttcaagtcacctgggagtggagccttcattttgtgaccctgaggaggaaagctgcagctaaggctagaagggcagagagaaggatcctgggtccgtggggtcaccgtccagccttggaatgcgagcttagcctttctcagtgaaggcattgtgacctgggatctgtgctgtatgcagccaggacccttgtctcttctgagcagctgccatatccccagtggctagctcggtgcctggcacagaataagcacttggtaaatatctgctaaatgaatatgttcattgaaaccttaaaagaaatgagcaaaagttatgctccgagggtgatgatgatagctaaccttggaaagattctgggaaacccacagtcaggggagaaaacatccgtcccacagtgacaggtgtggctgctggaaggcagtgagaaatggtgggacttgagttctggtcctgctgctgcccccgcctcattgtgtgccacagggaagtccctcttccctgtgcctctgctgtcgtgggagggtgatagttctcacaggcttgttttggagataaggaggaaatgcctggcccatggtgggcctggatataggttggcttcctacaccctctgccttggtttcctcattttgcagaggagagctggctgtgtgaacactaaggaccccccgctcccttgtagtcacccatgcctttcttgtcttcccaggagagctcctcagagcagcttccctggagttaccaagagaaaacccactttggccacctgggccaggacctaattaaagagctggtcagctgctgtcggagaaagccattcgcactggtctgtggctcggctgagttcaccaaagacatagccaggtgcttactgtgcgcaggcctcactgaggactcctatttcctcttctagccctggcctctcttccaaagcctaggccatgagcctgctactgggacccaggaaggagcacagactggaatcagaagacacggagtccaggcctggtcctgctgctcatttgccaggtgaccttgggcaagtgtctttactgctcagaacctctacttctcatctgccccatgaggttaatcactcctcctggcctcctactatgtagaaggaggatgggctgtaggggccctgaggaggtgagcaaccagcctgggagtcagggaggactcttcagaggaagccaagtccaggctgagccccaggaggagtaggagttgggcaggggaagagtcgggaggagcttccctggcccctccgattagaggatctaatgggggctccaactgtggcctcagcaccatctcggattaggggctcctgagtgtgtagggaaggacacgggagaggcttagagctctttggaggaggattctgcctttcctccagtgccatgagcctgacacatgaaggtcttgggttctatgacttgaccacatcctgagagcaaggtggggccctcgactgtcttgtattggccccaagcctttcttgctgtgaacagcttcattctcagtcccctttcctggctcaaaaatcgagcctagcaaaagaagaggcacgggaaggaaacgcccctccctcctcctgcaggcagccactcagcctgtgccttcagcttggtgccctggtgatggttgctatggagatctaaagatagagcaggagtcaggagacctgggtccctctcccagcttgtcccactgagcggctgccgatcacggtccacccaccccaggaacctggcacccctatcccaggaacccagtgcccctgggcagcgcactgcagttaatgaattctgccttcaacagcctgggctctagcgtgctgcaccagcttgggctagctacaggcagtcccagaattggaatattaagccatggaatcttagagttagacttttatagtcatagaaatgtactcttcaccatatcaaagctgaaagttcaggactctaagaaacatacagtgtgacagacttatcgtatacacgggaaactgaagcccagtgagactaaatgacttgcccagggtaaaacagtccatggcagagccagcactagaagcctcctagcttcaacctcatgtgccaattctgcatcagtgattttcgaactgcgctctacaggaagcaagggttctttgcatagcagcagtgaaaggacagctccagatggatccccagtacccccttcaaccagagcagctgcatttttatcccattcatatattggggttttgaattatttttatttgtacaaaaggattttcctagccactaaaaaaaatggcaacaaatctctctgctgtgtcacatttaataaataattgtgacacatagctggggggtggtgctggaggtttcagaccgcctcacaggcagagttccagggtcagagagcatggagtactgtgtgtgaccttcttccagaagcacgggcacaggagcatgttaaaggccctgaaaagaccagtggcaaagaaactcctttcattttgtttaatccagagtttttcaagcttatttaactatagaacacttttctgtgggtttcgtagcctctttctagcacagtatagtgagtgggaaaggccctgactgagagtcaaagattctgagcaggaaccatgatctcttcctgcctagtatgtgacttgagcaagacacttttcctctccccaggcctctgaggtctgcgagttttcctccaccctttcctctccctcagtttgcacatcctattgactcagctccaaatagcgggggcctgtcaggagcctgactctgttcagacaccagggaaacaacagcacaccaggcagatgcagttatgtccatcggggaacttacagcctagcaaggaaggcagcaattcaacctgtaagtctaaaagtgatgggtgtcatgaaaaggtaagtgcagggtgctgggagagtggttggcaggggctttagcctagtctagggagagcccaggggcacaccactgccagcggggatagaggcttcaaaagctttgaagtcactcatattaagagtgttgccggacacggtggctcatgcctgtaatcccagcactttgggaggctgcggcaggcagattgcctgagcccagaagttcgaggccagcctggccaacatgacaaaaccctgtctctacaaaaaaaaaaaaaaaaaaaaaaagattaaccttatgtggtggtatgcgcctgtagtcccagctactttggaggctgaggtgggagtattgcttgagccaaggaggtcgaggctacaatgagctgtgattgagccactgcactccaatctgtgtgacagagcaagaccctgtctcaaaataataataataaaatcaaaaagagtgttaagggggtctccacttaaggagtagagagtccggggcagttctcgtatctctgtccttgtctcattttagatgtttagatatttagatattatacaaggccacccagtggtaaccaacctagaatgtgytggcctcctcttcccctcactccgtgtaggttctgtgcagcctggctgctggtggcatctcttatcatgggacattggtggggacccagccgtgcccttggtgccaagaagcctaaagggctcctgtcgcctggaaacttgagagtgcagggycgggtgctgtgccccacaaggtgctgagcaagcccaagaagaagagtgtggggtgtggtgtgtgagttcagacctcttggagctgtgggggcatggttcccatcagctgctgttcctctgatgatgyccactgcgtgttgtgggaggcgtggccaccgtgtgatgttgtagtaggagaagggagacttaggagctagacatgatacgcaggcatcaagaggtcaaccaggtgtccacaatctgtgagccacacagagctctctttgtgcatatgcatcccaagcttcaggaaggcaacagctactagagggcctgaggacagattcttggtcgcagaagcgrcattggctttagttcagccctcaccatgtttaccracgtcacttctgtgttcccctcatgggtctcccagctcccagtctccatgccacctccacgctgagaccagaccagttttccccacacacaaatccaagcctgtcactcccctgcttgraatccttccctgtctccctgtggccttggggtagggcctctctgctctgccacctctccagactttttgtatgccaccgcccactcacacccacctctcaggctccaaacatgttctcttgcgtcagctcatcccttacactcgctgcttcctctgcctggccagcctcccaccttccgatctcccactcaccttttttgcctcctcatcttttgaggtctcagctcagtgtcacttcctcccgggagcctcgcctgtctcttccactccagcttggtcagtgagcagagaggcttgtgtgcttttctgtcgctgtacccataagtgtcatctgcatgtgagcatgagggccggcccattgtacccctaacaggggaggatgctcagcacttcctggatgtcgaatacctgagcgataaacaactaatgttcaggaagtgctttccaggtggcaaaaggtgtttcctctactttgaagcaagaatcttcaccaatatacatgctattttattaccccaatttactgatgaggaaactaagcttctgagacttcaagcgattttccaaggtcatgtagggatacacaagttccagcatgtgattgtggtaaaggttgtgtgtgacacatgagtgcaaccagagatgtgtataaagattgttactgggccgggcgcggtggctcacacctgtaatcccagcactttgggaggccgaggcaggtggatcacgaggtcaggagattgagaccatcctggctaacacggtgaaacyccgtctgtactaaaaatacaaaaaattagccaggcgtggcatgcgcctatagtcccagctactcgggaggctgaggcaggagaatggtgtgaacccgggaggcggagcttgcagggagccaagattgtgccactgcgctccagcctgggcgacagagcgagactccatcttaaaaaaaataataaaaggattgttattgatgaccaggtgcggtggctcatgcctgtaatcccaacactttgggaggctgaggtgggcagatcacctgaggtcaggagtttgagaccatgctggccaacatggtgaaaccctgtctctactacagatagaaaaattagctgggcatggtggtgcgcacctgtaatcccagctacttgggaggctgaggcaggagaattgcttaaacccaggaggcggaggttgcagtgagcccagatggcaccactgcactccagcctgggtgacagagcgmgactcagtgccccccaaaaaaagatttttattgctgcattctctgaaatagcaaggaattaaaaactgcctgtagatacagcaattaaagtgaactccatccgcatgtaccaatatagacgaagtcctaaaaacataataactaagtgaaatgtacattgtgaaaggatagctacagtgagatacctgtacttggaaactgtaaaaacccaaaataatgctaaatgctcaggaagagacagagacacaccagcttcaaggatagtggtggcctgtggtgataggtggaagggaatgggatggggtgatggggtttttagccatatctgtatttgtattttactataaaaatacttgacataaacatgacaaaatatgaacccctggtaaatctgggcaatgagttccccaatgtctactatattattttctacctttttctgtttttcaaatagttccataattaaacatttaaaaaaaaatccaatgtgcttgttcaatgctctctagaaactaggggcttagaaacattcactttctctctcctacctcagaatggactatgcctctttatccccccacacattttagccattcactgaagattatttctgagcatgaactgtgttccaggccccattctaggtgcaggagacacagcagtaaatcatataaatcattcctggtattcatagctgatgggctgttccctctacttgtccctcttcctcataaactcaaaccagaatgacttgccaagcaccacactgttggcctatttttttctttctttttttgtcgttttgttttcctttgtcaaggaagcagacctaggtttgagtctcttactgatcctgtgacctagggcaagtaacttgggctctgtgaacctcagtttgctcatctataaaatgggaatggtaacactgtctcctggggttgtgtgaggatgagggaaatgtgtaaaccccaaacacagcacctggcacggagtgggtgtaagaccccgttcccccttctttctccctccccaacagtgccctgactcatggttgacctctgaggacagcatttatttccagactttcactatcaagaactctcctttttattatttttcccatgctttgggagattttgatcccaaattgcatgttttaagtcattattaatttatctcccattttttattaatcaaagacacagatagctgcccctcagagcttctgatctgtacatccagctgggagctgcagtggttgacataattccagccagaggcaaaggagctcagcagtgtgtgtggcccaggtggcccaaggaggggaaacgtaggtgcatcttactctgtttcttttttttaatggaccatgagtcatggaagctgctggggttgcccaggtaggtgctgctttcacaggggatcactgactgatgggctggaggctgaggtttgggtgccagggtctaatgtggggccccacgtgggcctcatcctgcagggctcactccaaacagatgtcatgcaccagtgccacgcagaagagcgtgggttcacatagtgggaggtgggaaagctgtctgcatgcaggtcccacaggctctggctggagaccaccacatcgtcctgcccctggctcccaatgctaatagagcagactaacttgtagcggggcaaggtgacacccttgacctggtcccagcactcaaaatcatggccaggtgggcacaatgggccggctggtgggcctcaccagccagcttagaaggcaggtgagccatatcagctcctctgcccagatgcaggggaacttcacctccagcctggtggaccccaagggaacctggaaggagagggaggtggtggtggtggaggaggaggggtgtatttgcaacaagcagagcatttggcacattaggcttgaagcctaatgtgttgaacacagaaccctgagttggaacatatgatttggaacaatgggagggaaaatgggatgtaggccctggaacacaagaaaacaactttataaactgtagagtgtgtgtatatgacagagattaacctagcttccaagtggctgaggctacagacccatgaggctacaggctgaggcccgtggccctcagtcccctccctcttgctgcatccccaggccacaggcccatacttgctcctggaagatgctgatgagccaccggtgactcagctagagctgcaaccgtgttctcaaagctgtctgtttctataaaaatgaaaatgagtgtcaaggtagacagcatttgctaagtgtctactgggtaccaggctgtaaaatgttactgttttaggctgggtttgccccaaagctgacgctgaacaaggatgtgggtgcaagaagtttatgtggaggtgcttcagggaagcatggtgaggaagtcatggggaaagacaatgaagggcatgtggatggacaggctactcctggtggcacccggagctctttctgctggggccttgccaagagactgtgtggaacatgcctcagtgatcccaccgagggatggagaagctggggcatttatgcaccgacaaccagactccttattggccgagaacatgaactcctggcacttcagcttcctctgggtgggccaagtgtttggcagccagagaagcccccaggcagagacacacaggaagccatcagtgcacatagaaaagttcccgcagttacctccagttgggcgggggatatggataagcacatcaacagtgtctgctatgtcactttgctttattctcacaatccttagggatcagcagcttctttattttataggcaaagaaattgataagcaagaggtaaaggagctagtggagaaagtggtgttcttgtatgagggcagggctcgatactgtatcccctccccaccccatgaccacatctagtgtgatgtctggctggccactgtgtggaggcagtgtctgttgaaggaaggggtgagctggtggaagccgtgtgaccgtgagttggtgaccactcttctgtcagatgaagatgctggttctttcctcccggggctgctttgcggagtagaggagattgtgtgaaccaagtggtcagctcagtgcctagcccacaggggagtgtcagtgaatgttaattcccttctcctgcttccctctaaggggatgatatggtttggctgtgtccccttccaaatcttaacttgaattgcatctcccagaattcccatgtgttgtgggaggaacccagggggaggtaattgaatcatgggggccagtctttcccatgctgttctcatggtagataataactctcacaagatctgatggttttatcagggatttccacttttgcgtcttcctcattttctcttgccaccactatgtaagaagtacctttcgcctcccgccatgattctgaggcctccccagccatgtgggactgtaagtccaattaaagcttttcttccccgtctcaggtatgtctttatcagcagcgtgaaaatggactaatacagtaaaatggtaccaatagaggggggcgttgctgaaaagatacccgaaaatgcggaagtgactttggaactgggtaacaggcagaggctggaacagtttggaggcctcagaagaagacaggaaaatgtgggaaagtttggaacttcctagagatttgttgaatggctttgcccaaaatgctgatagcgatatgaacaataaggtccaggctgaggtggtctcagatggagatgaggaacttgttgggaactggagcaaaggtgactcttgttatgttttagcagagaaactggcggcattttgcccctgccctagagatttgtggaactttgaacttgagtgagatgatttagggtatctggtggaagaaatttctaagcagaaaagctttcaagaggtgacttgggtactgttaaaagcatcccattttaaaagggaaacagagcagaaaagtttggaaaatttgcaccctgatgatgcagtagaaaaaaaaattttttttttttgaaatggagtcttgctctgttgcccaggctggagcgcagtggcgcaatctaggctcactgcaacctccacctcttgggttcaagcgattctcctgcctcacaattttttgtatttttagtagagacggggtttcaccatgttaaccaggatggtctcgatctcctgacctcgtgatccaccttcctcggcctcccaaagtgctgggattacaggcgtcagccaccacttccggccaaaaaaccattttttaggagaaattcaagccatggaaatttgcataagtagcaaggagcctaatgttaatccccaagaccttggggaaaatgtctccaggccatgtcagagaacttcacggcagcctctcccatcacaggaccggaagcccaggaggaaaaagtggtttcatgggccgggcccagggtgctcgtgcagtgtgcaatctagagacatggtgccctacccaactgctccagccatggctgaaaggggccaatggacagcttgggctatggtttcagagaatggaagccccacttggcagcttccacgtggtgttgagcctgtgggtgcacagaagtcacgagttgaggtttgggaacctccacctagatttcagaggatatatggaaacgcctggatgcgcaagcaaaagtttgctgccggggcggggccctcatggagaacctctgctagggcagtgtggaagggaaatgtggagttggagcccccaccgagtccctactgggggtaccgcctagtggaactgtgagaagagaagagctaccgccgtcctccagacccagaatggtagatccaccgacagcttgcgccgtgtacctggacaagctgcagacacgacaacacacaactccagctcttgaaagcagccgggaaggaggctgtaccctgcaaagccacaggggcggagctgccccagaccattgtaacccacctcttgcatcagtgtgacctggatgtgagacctagagtcaaaggagattattttggagctttaaaatgtgtctgccctgctggatttcagacttccatgggccctgtaatgcctttttttttttttttttggcattttctcccatttggaacacctgtatttacccaatgcctgtacccctgttgtatctaggaagtaactagcttgcttttgattttacaggctcatagacagaagggacttgccttgtcttagatgagactttggactgtggacttttgggttaatgctgaaatgagttaagactttgagggactattgggaaggttttgaagtgtgaggacatgagatttggaggccaggggcagaatgatatggtttggctgtgtcccattcaaatttcaacttgaattatatctcccagaattctcacgtgttgtgggagggactcggggaggtaattgaatcatgggggccattctttcaaaccctgctgttgtcgtgatagtgaataagtctcacgagatctgatgggtttattaggagtttccgcttttgcttcttccccatttcttttgccagtaccttttgcctcctgccatgattctgaggcctccccagccatgtggaactgtaagtccaattaaacctctttttttggccggacgcgttggctcacgcctgtaatcccagcactttgggaggccgaggtgggtggatcacctgaggttaggagtttgagaccagcctggccaacgtggtaaaaacccatctctactaaaaaaatacaaaaattagctggctttgtgtaatcccagctacccaggaggctgaggcaggagaatcactggaacccgggaggcagaggctgcagtgagccaagatcgtgccactgcactccagcctgggcaacagagcaagactcagtctcataaataaataaataaataaataacacctctttttctcccagtctttggtatgtctttatcagcagcatgaaaacggactaatacaggggagctggggtctttggcaaggagcaaaccttcttgcccagttcagtgatccctggccctctggataaatggatcttttcctccagggaatctccagaatatctctactggctctgtccagccaactctgaagcctgtccaagttcccccatggtaatgccacaaagcccagcaccagcctgccttactctgggttcctccagggaagaatgcctcgcccctgccccctcatatttcccaccttgccttgaagagctgcttacaacttgcagcgcctgcttcctcccctcccttcattcctcaacccactgcagcctggtgtccactccccatctccaccccatgtgctcccgataaggtccctgctatccagagctcatttctcagcagcatttgaggcaacggtcaattgcttcctttctgggctgcagtttcctcaataggatagtaattcctacctagttgattgttctgggaactaaataag

SEQ ID NO: 96555 - DNA, 14121 bp, Homo sapiens
aaacaattctaaagttcatatggaactaaaaatgagcccgaatagccaaaaatatcccaagtaaaaagaacaaagctggtgttatcacattttctgacttcaaaatatactacaaggctatagtagccaaaacagcataatactcatagtgtctataaaaacagacacatagggccaggtgcggtgcctcatgcctgtaatcccagcactttgggaggccaagacaggcggatcatgaggtcaggagttcaagaccagctttaccaacatggtgaaactccgtctctactaaaaatacaaaaattagccaggtgtggtggcgtgcgcctgtaatcctagctactcaggagtctgaggcaggacaatcgcttgaacccggggggcggaggttgcaatgaactgagattgcacaactgcactccagcctgggcaacagagcaagactctacctcaataaataaataaatagacacatagatccatggaacagcatacataacccagaaataaacccacatgcttaaagccaactgatttttgacaaagtcgacaacatttactggggaaaggatacccttttcagtaaaaggtgctgggaaaattggattgccatatgcagaagaatgaaactggatccctgtatctcaccatataaaaaaatcaatttggccagacacggtggctcacacctataatcccagcactttgggaggcctaggcgggcggatcaactgaggtcgagagtttgaggccagcctgaccaacatggagaaaccctgtctctactaaacacacaaaaaattcgcggggcatggtggcgcatgcctgtaatcccagctacttgggaggataaggtaggagaatcgcttgaacccaggaggcggaggctgcagtgagccgagatcgcgccattgcactccagcctggacaacaaaagcgaaactccatcttaaaaaaaaaagaaagaaaaaaataaattcaagatggattaaagacttgaatgtaaggatgaaactctaaaaatactgaagaaaacctaggggaaactcttctagacattgatctaggcaaagaattcatgactgagacctcaaaagcacgggcaacaaaaacaaaaataggcaaatggaacttcattaaactaaaaagcttctgcatagcaaaagaaatgatcaacagagtgaacggataacctgaggaatggaagaaaatatctgcaaactacatatccaacaggggactaatatccagaatttgtaagcaactcaaacaactcaacaacaaaaaacaaataatcccattaacaaatgggctaaggacatgagtaggcatttttcaaaagacaaacaagcatatcaaaaatgttcaccatcagccgggcacagtggctcacgcctgtaatcccagcactttggaaggctgaggtgagtggatcagctgaggtccggagtttgagacaagcctggccaacatggtgaaacccccgtctctgctaaaaatacaaaaattagccaggcgtggtggcacacacctgtagtcccagctactgtggaggctgatgcagaacaatccttgaacccaggaggtggaggttgcagtgagctgagatcttgccatcgaactccagcctgggtgacagaacaagactttgtcacaaaattaaataaattaattaatattatgaatcctggatttatttatttatttatttatttatttatttatttatttatttatttttgagccagagttttgctgttgtcgcccaggctggagtacaatgggcaatctcggctcactcctgacctcaggtgatccacccacttcagcctcccaaagtggtaggattacaggcataagccaccacgcccagcctgattcctaaacttaatccaataacagatttcttctcaaacattggcagtatgctgtaatcattttaaattcataaccagaaaatgagttgaacaaaaaattcaagactctagggaaacaaaaatagtttgtatattgctagaattgtctattaagagtcatgttttcatgccttttaatcttccctgaaaatttctgtgtactgccatgagtaaaatttttaaaaaatgttcaacatcaccaatcatcagagaaatacaaattaaaaaccacaatgagatatcatcttacacacaacagaatggctattaaaaagacaaaaaaatcacaggatgttggtgaggaagctgagaaaagggaactcttcttatacactgttggtgggaatgtaaatcagtgcaccttctatggaaaacagtatggagatttctcacagaactaaaaatagaactaccggaagatgcagcaatcccactactgtgcatctacccaaaggaaaagaaatcattacatcaaaaagacacctgcactcatatgtttatcacggcactattcataaaagcaaagatatgaaatcaacctaagtgcccatcaatggagcactaaataaacaaaatatggcatatatacaaaatggaatactattcagccataaaaaagaatgaaattatgtcttttgcagcaacatggatagaactgggggccattatcttaagtgaaatcactcaggcacagaaaaacaaatattgcctgttctcccttataagttggtggtaaataatgcgtacatatggaagcagagtgtggagtgatgggcaatggagacttggagggttggggatgtagagggaaggggatggactacaggaggttgcttgctgggtacaatgtgtcttgtgccagtgatggatgcactgaaggccctgacttcaccccaatacaatatatcaatgtagcaaaactgcacttgtacccccatgaatatatgccaaaacaaaatcataactggctggggcacagggggctcatgcctgtaatcccagcactttgagaggcccaggtggctggattctgtgagctgaggagttcaagaccagtgtgggcaacatggcaaaaccccatgtcttcaaaaaatacaaaaattagccaggcatggtggcacacacttctggtttcagctacttgggaggctgaggtggaaggattgcttgagcccagagaggcagaggttgcagtgaactgggattgcgccactgcactccagcctggatgaaagagcaagacatgtctcaatacttaaataaataaaaaatatagagagagagtatactgctatacgacagaaaaacacaactcaaacttttttattggtcacttttatcttgctacaaaatgtactactagaagcttaaaaagagcatggcttttgaattttaataaattttagtgaactttagttagattgaagttatacagataaatgggttgatggaataaagatctatatactcattaggcgtccatcagttaaactgtttactattaaattaatttgttggttgggcatggtggctcaccacaccatttaattgcagagttttgggaggccaaggcaggagagaggaatgcttgaggtggggagttctgggaaacacagcaagaccctgtctctacaaaaaataaagaaataaaaaaattagccaggcatggtagcatgagcctgtactcccagctacttgggagactgacgtgggaagatcacttgagcccaggaggtcgaggatgcagtgatctgtgatctcaccaccgcactccagcctcggtgacagagtgagaccaccccatgtccataataataataataaagttaattttggtccccaccactctcacttttctgccccctcccctgagtagactggctgatgatctaaaaggtgaaaattacctatgtgatgtatgtgaaccttttttttttccagtggggtgggggggcatgatagggtctcgctctgttacccaggctggagtgcagtggcacaatagcggatcactgcagcttcaacctcctaggactcaagccatcccacctcagcctcccaagcaactgggactacaggcgcacgccaccaagcccggctaattttttttgtatttttggtagaaatggggcttcacgatgttgcccaggctggtcttcaactcctgggctcaagcaatcgtcccacctaggtcattttattcaataaatattcaaatgagcaattcccaagcattaagttaaacactaaagacaatgtccagaaaggtgaatttttggccaggacagaactactgtatttaataaagtggataggctggagtcctccgaccttaattgtatcactaagccttaatggcaacgtgctaccttgattaagtctatcacttgtatctacagaagaaacgaaatgtagtgaattgaatttccacagaataaacaaacaaaaaaactgtctgtgtgtgtctccattcatcaaggaggatagaagctgagaagataccacactcgtcagcttgggatgtcacagaacatgtcaaagagacagcgaggagtagcagctacaagagggtgaatggaaatcacaggtccaggctacccgttaggctatgatttaatgagtcctaaagctcttttaagattctgtatcctacgccaggcgcggtggctcacgcatgaaatcccagcacttcgggaggcagaggcaggcggatcacttgagcccaggaatttgagaccagcctggccaacatggtgaaacccgtctttactaaaaatacaaaaaaattagccgggcatgtggcacatgcctgtaatctcggctactctagaaagctgaggcaagagaatcgcttgaacccgcgaggcagaggttgtggtgaaccaagatcgcgccactgcactccagcctgggcgacagagcgagactgtctcaaaaaaaaaaaaaaaaatcctgcatcctgcaactaatttcaagattcatagtgggccgcgcgcataatcatagagattacgtctgtaatctcaacactttgggaggccgaggcgggaggataacttgaggtcaggaattcgagaccagcctggccaatatggcgaaaccccgtctctactaaaaatacaaaaattagttgggcgtggtggcgcatgcctataatcccagctactcggaaggctgaagcaggaaaatctcctgaacacgggaggaggaggttgcagtgagccgagatcgcgccactgcagtccagcctgggcgagacagcgagactccgtctcaaaaaaaagagaaaaaaagaaaaaaggaaaaaaaagattcatagtggattaccattcccaaattcagagggagtaaagaaagttctataacactgtagtaaagctaaatttcatcctctaaataaaattctgcaacaggtaactgtacaagggcatcttttattgtacatgaagtgtcaagttattcaaagcagcgggctaaagtcctttctgaaatgtggcttggtgtgcattttcgaagttacttaaacttggcggacgaaaggacaggagtaaagaggccccaaacgcgagccgcgggacgcgcaggagcgggaccccacggcgcacggagccctcggtcacaacaacgcacgggacagaggcgaccctgggcggccagagcggggcaggccggccgcaggcccacggaacggggttgcagggaggcgagcaaagccaccgctaaggggtcagcagagacttcagaccctaattgctctcctcagggcgcccgaggaggcaagctggggcagggatccctttagccacccagaccgaatctcggagggtacctgactgcgggcggccagtccacagccccctcccgccgccccggccggagaagaggcaggttctgcgcagagctgccaccctcgccagcgtcgccagcatcgcgtgcgtctcagatggcatcggtcccggtgcaagcggcgaactccgtgcggcgccacccgccgccactggggggcgcccacggacgccgcagaccccgcccccgccgggcggggctgagcactagtcgcctgctgggccagcttctagtctgtcggtcagaccaagggcactcagactggaaaggttgttgctgggcttgggtgtccgtccttycctgtctccttttcttcctcttttcacttaaatccactgagtctctcgccaagtcagtgatttaggtaatcccgccgcccctggcggaacctttgtgacgccggaactgatgtgccgtagggtggctgcggtcggaggactgttttggtaaaggactagcagttctctgcggagggccggttgatacagttccggtgggagaacgcggctgcgaggttttcggctttggctcctgatatgcagcgacagaattttcggcccccaactcctccttaccctggtccgggtggaggaggttggggtagcggaagcagcttccggggaaccccgggcgggggcggaccacggccgccctcccctcgagacgggtacgggagtccgcaccacacgccgccgtacgggccccggtctaggccgtacgggagcagtcactctccgcgacacggcggcagcttcccggggggccggttcgggtctccgtcccctggcggctaccctggctcctactccaggtcccccgcggggtcccagcagcaattcggctactccccagggcagcagcagacccacccccaggtaataataatagccagcgtttgccgagctcttactttatggcaggcacggtactaatattccctttacgtggattattttgtctaatcctctctgaggtactattgttagcccaattttgcagatgagcgaactgaggcttagagargttgagtgacttccggaagattatccgaaagagtggcagagccgtacgttctgttttcgagccctcgtgcttttaaccaatacactgccacccgtacacagattttcctaattctccatttcctcctgtttgccaaaggccttgccagtttgtttcaagaaatagttctttttcttttttttttttttttttttatctttctttcgagctacactggcttctgctccaacttccctgaaaagaaaatcggtggtagtggaagttttccattcctttagtgagagtaaatacaaaagacagagagagtatctctagcatgtctgggatttctgtggtttacaacttgcaactacgtggttttccaacttgctgtattctacaccaaccccctaccccttttgagcctggagctaaggagtaaagaaaatgttcatgagctagaaaggttctagaaactttaaaactatagtattgttttctcctgaaaaaagtgaaaatttcgagggaaaattgaatataattacttgatttcatcactgcttgtatttaattactgcaaagttactacattagacacaaaagtatttgagatgacagtggtcatggaattataaataaatgagaataacgaattgctttaagtactttttttaaaaaataggaacacttgattaaaggaagcatggactttgtaattgaacattatttaggttcaagtcacaacttttaagcagcaatgtgattcccgctaacctttagctaaaggaagaagtaccaattatctttactaagtgtttttttaactgattttttttctaaagggttctccaaggacatctacaccatttggatcagggcgtgttagagaaaaaagaatgtctaatgagttggaaaattatttcaagccttcaatgcttgaagatccttgggctggcctagaaccagtatctgtagtggatataagccaacaatacagcaatactcaaacattcacaggcaaaaaaggaagatacttttgttaacatttctgaaattcaactggaagcttcatgtgtcaggaacatcttggacaaaactttaagttgtgttgatataaatttacccaaagatgatgactttgattggataattagtaaggtctttttgttatttttcatcgtatcaggtattgttgmtattagagaaaaaagtaggataacttgcaacatttagctctggaagtacctaccacattttagagatttaccrtttccatatatttaacattcctggttacataatggacatttgtcttttaatgttttttcaatgttttaaaataaaacattttgtcttctagctattgtggttttgtggtatgataaagaagtagacttactacagtaatgctttgtagtcacttagagttcataggtaaatgttttgcaaattatttttgaaaatgaaataggtaaaccatcctttgagctgtagacagctctgtatttgttcgtaaataatgaggatgagaataacagagttctgttcatactcattttatctaatgcttctgttaaaatgcattaaaacttgaagccccagaaacccatttaagcataactttatactcatttaactggaaaaggcaagaatagaccatgcattgctaaatcaaagtgttctatctgaatttctctatacctcttagcattatggagttagtttctcttgaggccaaagaagatagctaccagcagcctcaaatcacttccattgcaaaaagaacatctctcatctccatcaatccaagagaagacaaatttgccatacttagatcatgtttctgtattattgaaccaattaactgtggccaaggccacagtgagacctaattaacttgaatcatggacacatcaccataatgagacaggattctgtgaccttgaacaccactgggcctacctggagtagagaagtggttttccaaattaagggatgctatggatatatacctatagttctggagagaaaaatatggaagaattgttaccccaactattttttaaaaatcaagtggttttttgtttgttttttgagatggagtctgttgcccaagctggagtgcagtggtgcaatcttggctcactgcaaccttcggctcctgagtagctgggactacaggcacatgtcaccatgcctggctaatttttgtatttttagtagagaccatgttttgttttttttgtttgttttgttttgtttttgaaatagggtctcactctgttgcccacgctggagtgcagtggcgcaatcttggctcactgcaacgtccgcctcccaggttcatacgagtctcccgcctcgacctcctgagtagctgggaatacaggcacgcgcctggctcatttttgtattttgaatagagatggggtttcaccgtgttggccaggctggtctcgattgaactcctggtctcaagtgatcccctaccttggcttcccaaagtgctgggatttcaggcatgagccaccgtgcccagcccagaacatgtatttttagtatttttagtatttttagtttcaccatgttgaccaggctggtctcgaactcatgatctcaaatgatccacccatctcagcctcccacagtgctgagtttacaggcgtgagccaccatgcccggccaaaatcaggtgttttaacatgtaacacagactctaggcattttgaagttacaaaatacgaagatagagctagtaaaacttttgtttcaacattcccagaaagaaacgtgtaaaaacaaaatggtcacacctcctatttgaaccatacccacagaaatttgttcattaggtatttcacagagactagaaaataagaatggaaggcttttagattaataaaagctccatgaaagccaggattttggaaatgctgtttctacaagttactagctggatgagttcacttctctatgcctcaattttctcatgtgtaagatgagaaaattaatagtacctgtgtcatagaggtgttgtgttggaggattaaatgaatttatgtatgaaactcttaagccagagcctggcacatagtaagcactcaataagtggtagctgttactttctcatttacccccatttccttagtttttagaatagtgtctgcaagatagtaggtacttaagtgataaatggatgtagaaattctgattgtaactactatattgttctacctacaccctgtatataaaagggataacttagtaatttttccccagtattttaaagaaaaagtccttattcccaacattatgtctttccagatatgttgaggtcatgatgtataatggaaattaaagcaaagggaatacttttttaaatactttattgaactttataggtaagaaatgttgtctttaggaaatgacatttggagataatttactgaagcatctcttagatcattgggttattagtaaagacgaaaacagaagttaggattttgtgccagtgtatttatatcatatttggaagacattcaaactgtaactcttctaatggtctacgtacattttatttcactgtaagtgtaacataaaacaaaggtaaaatttcttgctaacgcttaccaacatctacttctagagacctggcctgagttttttaagaaaaatttttgtcctcaggaaagatgcatacactgtaagtagtgtattcagttatcaaaattcttgtggcattggccatttggtttgttaccgttactctatttttatttatctgagtaaaaggaattgattattctttaaaatgaaagggattgttttttaatgttctaggatacacattttacctctataaaaatgctgaataactttttagaaaaacttacaattaagtatacatcttaaaaattcatatgcttaaaggatggaagtgtagtctatagtagagtcttcaaacaagggtctacatactcctgggaatattaaactttctaagggatatgcaggcataaatagctttaagggaatgcaaattcagatcccagtgcccatgtaaatcctttattaaaattgacctacataaaaacatatccatatcaagggatcatgccagttctttttccctgctgccttttggtaatcactggtctcccattttacaaaagaaacctatggcaagttgtgttttgcagaaatgaccccaacaatatttaaagtctcatacccttctcgaaccttgccactacccttatcaagatgtggagttacgtcccttccctttgaacattaacagactttttttttttttcaaagagttagagggtctccttataggggcctccctgtattacccaggctggtctctaactcttaggcttaaggggtcctccagcctcggcctcccaaagtgctggaattacaggtgtgagccaccacgcttggccccttagccaacttctgactgccataattaagagaatatgatggaagttaatctattttcattgtgggtaaagtgtggtgttaaaaatgagttataggccaggcactatggctcacacctgtaatcccagcactttgggagcccaggtgggcagatcacttgaggttcggagtttgagaccagcctggccaatatggtaaagcctcgtctccactaaaaacacaaaaataagctgggcatggtggcgcgcgcctgtaataccagctactggggaggctgaggcagaagaatcacttgaacccaggaggcagaggttgcagtgagccgagatagtgccactgcactccagcctgggtgacagagtgatactccatctcaaaaaaaaaaaaaaataagttatattggcccgtgtggagatgttcagaattcagatgtattatcaagttgggaaataatgatgaaagtgttcagtgaccttgcctttttgtttctggactattcaaaaaatcatttcctttgtgggtacattgtgtgaaaggaaagcaaagagcatgagtttaacatgaaggaaaagataccttatttttaggcaaaaagcaaatggtgaggctctttgcctcatctacctaagaattaaaatattcaagattagtaaaaaagcatgattagttttggtgaatctcctgtgaagcaaactctgtatttccaccattcttttttttttttttttttttttgagacgaagtcttgttctgtcacccatgctggagtgcagtggcacgatctcagctcactacaacctctgcctcccaagttcaagcaattctcctgcctcagcctcccgagtagttgggactacaggcatgtgccaccacacccagctaattttttgtatttttagtagaggcagggtttcaccctgttagccaggatggtctcaatctcctgacctcatgatctgcccagcctcagcctcccaaagtgctgggattacaggcgtgagccaccgcgcccggccctccaccattcttgataattataaagagcctgatgaagatatctcaattcctgtctcagtagcatagtttgcatgatatcaaggaggaggaagttaaaagtttcatgtttacttctgacatactaacattacatcttcaagttaaaaacattttagaagtaagttcatgaatttatattttctgaaacattttcagattcttaagagaaacattttcattaacccttgccagtacatttattattaggttctataaattccatattaattgttttacataggccaaagtctcctgctattgtcactcaaccatttctctgtatcattcattcctaccatatacttaggtttaagttaacagaaatatgttgtagtttttactgtaaataagacacataatcgcctggttggaaggtagtgagttatcttaattgattgttcagtcagttacagatcgaactctttgttctcgtcttccccccgcttctcactgctgcacttgactagtctgaaaaaaaaaaatacatagtagtcatcagtacacctgatataagccctgaacttcctaatgacctctttttttgtgtgtgtgtgacagagtcttactgtgttgcccaggctggagtgcagtggtgtgatctcggctcactgcaacctccgcctcctgggttcaagcagttctcctgccttagcctcctgagtagatgggattacaggtgcaagccaccatgcctggctaatttttatatttttagtagagatggagtttcgccatgttggccaggctggttttgaacagctgacctcaggtgatccgcccacctcagcctcccaaagtgctgggcttacatgggtgaggcagtgcacccagcctgaattacctcttttattttgctcataatttccataatttatcatctaatttaagatgctttgagattcactattattttatatgccacttagtaaaaatactgccagttaagctgtgacatgtcattgattataagatacatcttaatttcagagatgttaaatacatgtcttagtttgataaaataccatacaatacttttcttttttttgagaccgatcctgctatgttgcccaggctggtctccaactcctgcctcagcctcccaagtagctgggattacaggtgtgtgacactacacccagctcacatacaatactgttttttgtttgtttgtttgttttttgagacagagtcttgccctgtcgcccaggctgcagtgcagtggcgtgatctcgcctcactgcaacctccacctcccgggttcaagcaattcttctgcctcagcctcccaagtaactgggacaacaggcacgcaccaccacaccctgctaattttttatatttggtagagatggggtttcaccatattggcaaggctggtctcgaactcctgacctcgtgatctgcccacctcggcctcccaaagtgctgagattacaggcctaagccaccgttcctggcctatagtactcttaaaagcagaacatatacttagatataagtaggtatatagaagtaaatgtctccaaaaggtagtgtaggacaatacatttgaaaattggctttaacccatcctggctaacacagtgaaaccccgtctctactaaaaataaaaaaaaaaaaatagccaggcatggtggcgggcgcctgtagtcccagctagtcgggaggctgaggcaggagaatggcatgaacccgggaggcagaggttgcagtgagttaagatggcgccactgcactccagcctgggcgacagagcgagactctgtctcaaaataaaaaaaaaaaaaagaaaatcggctttatttaattagggttaactcttctcagatacttgtatttgttcaaattc

SEQ ID NO: 96556 - DNA, 13362 bp, Homo sapiens
cctcatttaattgttttgattagatattgagaatattcatataatatatatgtgatgtgtaaggaattacaatattggccaggcatggtggttcatacctgtaatcccagagcttctgaaggccaaggcaggaggattgcttgaggccaggatttcaagaccagcctgagcaacatagtgagacctcatctctacaaaaaataaataaattagtcaggtgtggtgcacacctgcagtcccagctactcaggaggctgaggtgggaggattgcttgagcccaggggcttggggccgtagtgaaccttgatcacgtcattgcattccagcctgggtgacagagcaagaccctgtctctaaaatataaaaagaattacagaagagtgaacacctgtgttcagcattacctttggatgccctgtagaatctgtcttcttcccttctcagatgtagctattctcctgaagtttattgttcactttcttttttttttaagacagagttttactcttgttgcccaggctgaagtacaatggagcgatctcggctcactgcaacctccgcctcccaggctcaagcaattctcctgcctcagcctcctgagtagctgggattacaggcatgtgccaccacgcctggctttgtatttttagtagagacggggtttctccatgttggtcaggctggtctcgaactcccaacctcaggtgatctgcccgtctcggcctcccaaagtggtgggattacaggcgtgagcctctgcacctggccttgttcactttttttctaaaatgcttttttacattttgctatattccaaaacgacatgttgtttagttttgaatgttgttggactttaaacaaatggaatcatactgtatgaattttctgcaacttgtgtgttttactcagacatttgatcttgagtttcatccgtgtagttgtgtttcactgtaattaattcctataataagaattatatggcgctagagcatataaatacaccacagtgtggtttattcattcagatgtggatgaatgtttgcattgtttccatttttaaaacacgatctagacaagactttttcgatcattcttgtatgagtccctttgtgcacacgtacaggagctctagggtataatcctgcatgcggacctgctggattacaggacacatgcatcttcattcttgctagattatttctaattatttttcaagtggttgtaccagttgacactctcaccagcagtgtgagtgttctggtttttccatcatagccaacacctgattttgtcagactttcaaacttttgccagtctggtaggtatgaaatagtatcttattgtggtttgttctttttatctgattatgaatgaggttgagaatattttctttcttttttttttagacagagtctgctctgttgcccaggctggagtgcaatggcgcgatctcagctcactgcaaactcaacctcccgggttcaagcgattctcttgcctcagcctccagagtagctgggattacaggcacctaccaacatgctgggctaatttttgtagttttagtagacatggggtttcaccatgttggccaggctggtcttgaactcccaacctcaggtgatccacctgcctcagcctcacaaagtgctgggattacaggcttgagccactgcacccggcaaagcatattttcatatggatatggatacttatgtttcttctactctaaagagataaagtcttgccaatattaatgatttttaaaataatttcaatttctattttagattcaaggggtacgtgtgcaagtttgttccatgggtatattatgcgctgctgcagtttggagtacaatcgatcctgtcacccatgtagtgagcatagtacccaatagttagtttttcaatccttccctccccctcccacctctagcagtctccagtgtctgttgttgccacctttgtgtccacatgtacccagtgtttagctcccacttataagtgagaacatgcgatattcggttttctgtttctgcattaatttgcttaggataatggcctccagctgcatccatgttgccacaaaggacatgattttgttcttttttatggctgcacctatctttttctattaagatgtctttttcttatagacttatatgacttctttatgtattttgatactacctcatttgtatgttgcaacaaatagcttctccatttttaattgttttttaaattctctaacagtttcttttggtgaacatatgttccaattttagcttagccaaacttatcaaacatttcctttatagtttatatttttgtataaactatttatacaacaactttgtatgcaatctttcttactgaatgttataatcacattgcctatattatcttctaaaagttttatagtttagcctttcatgtttaggcctacagtctatgtgaaactgatgtttgtgttcaataggatagatccaatagaaataggatcatatttctttttttttttttcctgtgtgaatactcagtactctcagcaccgtgaatttccacactgtgagcaatggcagctttgtcataaatgtacatatacatatgggtctgtttctggaacctattctatttcattgttcagtatacctctgtgcctccactatcttaattcctagagctttttaataattcttgatacttgatagggcaaggcctcttgtcttattctcctttgagtgtgtcttggctattcttggtcccttgcacttctctgtaaactttgggttaacccatcaaatttcccccaaaccccttgttgtgttttcttctcattgcgttttgaggtctctcttttgagagtggccctaatgcaagattgtcactctttaggagaggcctgccctgaggagagctaggatcaggtatgtcagccaggtgagacacggaggaggtggcacagcaaaacatatgaaataacagaagcagtttttaattacttaaagatcacagagagaagagggcatcataaaaccagcaggggccaggcgcggtggctcatgcctgtaatcccagcactttgggaggctgaggtggacggatcacttgaggtcaggagttcaagaccagcctggccaacatgatgaaaccccgtctctactaaaaatacaaaaattaaccgggcatggtgctgggcgcctgtaatcccagctactcgggaggctgaggcatgagaatcgcttgaacctaggaggcggaggttgcagtgaggcgagatcgcaccactgcattccagccttggcgacagagtgagactccatctcaaaaacaaacaaagaaaaaaaccccaagcaggtccaacaggaagaggggcactgactgggacctgcaggggcaaccagagggtggaaagcaaaagagagagggtgagggagggacctgagggccaaagccttttttggtgtccagggcattgcccaagcaggttttccacagggagttctaactggtgggtttaaagcaagcaggcatgagttccatggggtcatgctgtgactgagaggtggtcactgcagcatatctgcacagacaatgtaagacgtgggggttagtggggcaagtcaagtaggttacctctagttgtcttatagggaggtggtcgccaggaggtggttgtataaggaagatatctggattaaccacactgcagaactaggaggaggtggagaactggaaattgtgtcaaaggcaactaaactctacttctggtatgaggaagtccaacttatatttaaaacggatgccaaggcaacatagaattataagaattcacagcccagtgtggtggctcatgtctgtaatcccagcactttgggaggctgaggagggtgaatcacctgaggtcaggagtttgagaccagcctagtcaacatggtgaaaccctgtctctactaaaaatacaaaacttatctgggcaaggtggctcacgcctgtagtcccagctatttgggaggttgagggatgagaatcgcttgaatctgggaggtggaggtttcagtgagctgagatcatgctactgcacttcagcctgggtgacagagtgaaactccatcttaaaaaaaaaaaaaaaaaaagaattcactacacccctgatctaattgaaactttactacagcaatcctgttggaggattattggagattgatcccttgatgaattttaggatagggttttttttttttttaatatttctgccccaaaaaatgctgttgggattttaatagcgattgtattcaagctgtagattactttgggtagtcttgtcatcttaacaatgttaagtctgccaatccatgagaaaaggatgtcttttcatttatttatatcttccagcaatgtttcatagttttcagtgtgcaagtcttttgcttccttggttaaatttatttctaagttggtttcttgttgttgttgttgagacagggtcttgctctgttgcctagactggagtgcaacacattgaataacctagatgaaatgaaaaattcctagaaacacataatctaccaaaactgactaatacagaaatggaaaattttactagacctataattattaagtagattgaatcaataattaaaattgttgacatacaattattcataatactgccttgtagtcatctttatttctgtaatatcactagtaatgttcccagcatcgttttgtattttagtaacttgagtcttttctctcgaatttttagtcagtctcatcaaagatttgttaattttgttgatcttttcaaagaacaaacttatggttttgttgattttctttattgtttttctattctctattttcattattttcattcaatcttccttttctcttagttactacttcctcaggaagagagtatgtaggaagtgggggcttaaaacacaaggtgcaaggtacagcctttttttggagatgtatgaaaatgggtctgactaggcatagaggaaaagccgagctcagccgctgcctttgctgtggaactctaagctggaatttaggcagtgtgctactcggagatcttcataaggctggaagttattgacacttagcttatcaataggagggagtccaagaaaggtccttttctaaggcagaataaggaaaactagaatgagattaagtggaactaggtaatagtagttcagcaaattaacccagagtcaggaattcagcagggctttttgtgtgaaaatataacaccccatatcagaactcaagcatgagaaactaattcttggggagcttttttccatgtttgtcttttttccatgtttcctttgtgaagggagtagtctccctaccttttcccagggtaggaaatgtgtgataaaaaggtaaaggagaggtagctacaagtgagttcttattaactaggaaggtaattcacttgcacgtagatgctttgtagttccttccatctttttttgtaaatggtatttccctttttcatatgttcttttaaaaaaaagcattatatatttatagagaaagggtctcacagtgttgcccaggctagtcttgaactcctgggctcaaggatcctcccacctcagcctcccaaggtgttgggattacacatatgagtccattttttatatgttctaattagaaaatatatagtttatttttgacattttaatagtatatttatacataaaatgcatgtagactagactatatgctacttcagtctctctacctatccatagttgggaaaatcaggtgggtccctatggccataataaaaggacccactgcttcacgtcaggtacctactagaaaataagcaacctcccacttaccggctttgcaaatccaaatctattaagtggctccactgtcacagtaagtatttcattgttgattagaccaggcattcttaaagacataactattttaatattattaagttgcttaaagagtcactgaggtacatggttctgggtgggggtctggagagtgcagcagccatggccagccacattgtgctcaacaatggcaccaagatgcccatcctggggctaggcacctggaattcccctccaggccaggtaactgaggctgtgaaggtggccattaatgttgggtactgccacatcgactgtgcccacgtgtaccagaatgagaatgacgtgggggtggccattcgggagaagctcagggagcaggtggtgaagtgtgaggagctcttcatcaccagcaagctgtggtgagcgtaccatgagaagggcctggtgaaaggagcctgccagaagatgctcattgacctgaagctggactacctggacctctaccttattcgctggccaaccagcttcaagcctgggaaggaatttttcccattggatgagccaggtaatggtaatgtggttcccagtaacagtaacattctggacacatgggcgggcatggaagagctggtggatgaagggctggtgaaagctattggcatctccaacttcaaccatctccaggttgagaggatcttaaacaaacctgacttaaagtataagtaggtggttaatcagattgagtgccacccgtacctcactcaggagaagttaatccagtactgccagtccaaaggcatcatggtgactgcctacagctccttcagctcccccgacaggccctgggccaagcctgaggacccttccctcctggaagatcccaggatcaaggcgatcacagccaaacacaataaaactacagcccaggttctgatctggttccccatgcagaggaacttggtggtgatccccaagtctgtgacaccagaatgcattgctgagaactttaaggtcttcaactttgaactgaacagccaggatatgaccaccttattcagttacaacagaactggagggtctgtgccttggtgagctgtgcctcccacaaggattaccccttccatgaagagttttgaagctgtggatgcctgcttgtccccaagtgacctataccgtgttttctgtctcatttttttttttccttgcaaaggtagtatggcctgtgtcactcagcagtgggagagcaacctatagagtggccagcgagggtgtgtctagcttgatgttggatctgaagagccctgtcaatagagtagctttgctttgcccttctttttgcccagctggggaaagtacaacctgaatacccttttctgaccaaagagaagcaaaatctaccaggtcaaaatagtgccactaacagctgagttttgactgcttggaaatgtcatcctttcagcaagacttctctttacctcaaataaatgtgctttttgtggaaaaaaaaaaactcactgaaraaaaattacgaagatctataaatatgtagcaaagtagaatagcctttgtactaatttcaaatcatgtctctatcacttaccaactgggcaactttgagtagtgtatatatcttcactgcttttctcaggtcatgtttgggtgcaacaattagatacttactcaagctagtacatataaaagggaactttattaaaaagatatggatcttacagcatccaaagagcagatgaacaactgcatccattcttggtaacatttatgggaaactgagacttaggtaagttaagtctcttaactactaaaccttatgggagaggaaatccataaatgtactgagaactgcttaggaatgaatcaattatgtgttttgtacttacatgaatctactatttttctaatgtatgtaaatgctactctgagtagacaagttcaagtatattttaaagtgtggcttttatcatgttctttctcagccaagagacagtcaatatacatgggagtatccataaactttttactttaaaaatagttccttttaaaaaaagttatatatgtacatagtttaaagagtcaaatagtaaaagcgaagagcttgatgggagtcccccttccattcccaactttgccctctatttcctgcccttcagaaatacttataattttttggaatttacctacatatctctaaataacatgcttgtcttgctctttcttgacttttttggtagtaggaataatctacttatttcccactaaggaagagagggatttagttttctttatacatttcactttcacatgtggttagttaacattcagtgtttgcattcttatgacctatgtaaatgctattcacaactgagccgtgtagtatactatgattattatttctttcctgtaaagccttttgtttttttctgaaggtaatatttgccttttctagagcccacatagtgaaagcaagagtaagtaagcaagcaaacaaacaaacccacaaaactcaaaaacaaatctagagacatcacacattacctgacttcaaactatactacaaaactattgttactgaaacaacatggtactggcataaaagtgggtgtgtagacctatggaacagaaaagagaacccagaaataaagccaaatacagccaactgatcttcagcaaagcaaacaaaaacataaagtgggacaaaggacaccctaacaaatggtgctgggataattggcaagccacatgtagaagaatgaagctggctcctcatctcttaccttatataaaaatcaacttaagatggataaagacttaaatctaatacctgaagtcacaaaaattctatatgacaatattggaaaaactcttctagacattggcttaggcaaggacttcatgaacccaaaagcaaatgcaatgaaaacaaagataaatagatgggacctaattaaacgagaaagctactgcacagcaaaagaaataatcaacagagtaaacagacaactcagagaatgggagaaaatattcacaaactgtgcatctgagaaaggactaatatccagaatctacaaggaactcaaacaaatcagcaagaaaaaaaccaaataatcccatcaaaaagtgggcaaagaacatgaatagacaattctcaacaaatatatatatactaatgcccaacacgaaaaaatgctcaacaactgtaattatcagggaaatgcaaatcaaaatcacaatgtgacaccaacttactcctgcatttgaatggccatgatttaaaaataaaaaaaaaataacagatattggcatggatgtggtgaaaggagaacacttttatactgctggtgagaatgtaaactagtacaaccactatggaaaacagtatagagattttttaaagaactgaaagtattgtagaactattgtttgatccagcaatcccactactgggtatctacccagaggaaaataagtcattatatgaaaaagacacttgcacatgcaggtttatagcagcataattcacaattgtaaaaatatggaaccagcctaaatgcccatcaaccaacaaatggataaagaaaatgtggtgtatacatataccatgaaatactatttagccataaaaaggaacaaaataatggcattcaaaacaatctggatggagttggagaccattattctaagtgaagtaactcaggaatggaaaaccaaacatcctatgttctcacttatgagcaggagcttgcagggaagggtgggagggaggcaaaggataaaaaactgcatattgggtacagtgtacactgctcggatgaagggtggaccaaaatctcagaaatcactactaaagaacttttccatgcacccagacaccacctcttcccccaaaactattgaaataaaaattaaaaaaataaaaacaacaatgacgacaacaaaaagctattccaactggtaaaataaaaagttaaacattcgccttttctgtttggtagttagttttctttgtacttactactaatttatttccctaacttgctcccaagatataaatctgccttcagtacttaaacacattaggtatttccaacaatttcatcttcttgatgattccagaaccttctgacttgctccaggctgggctacttatgctctatgcctactgcacagctgccatcttaagggtttccttcaccattatcctagaaattccctttgccttccttgtttttgatcccctgtattccgtatccattgtctttctctttcttagtgagtctctcattttggtgactggtactattatttggtgtaggtactagtacctagtatctccctgataaaggttgcatgagaagtgttttgagatcttatatacctaaaaatgtctttattctgcctacacactcaattacagtttgactctacaaaattttggattagaaaacactttctctgcctcattatcttctaatttccagtgttgctgctaattcaatgtctttctgattctttatacttttgttgaaactcccttctccgtctttctcctctttctgaaagcttgtaggattttctctttggttgtctaaagtttcacagagtatttttgtgttttcatctgttgtgctgagagttcagagggccctttcaatctggaaactcatgttttccatccagggatatctcaattatttctttgtcgatgtcttgtttttcatgtagagagtagagaacaactctattgaaattttttgttcagatgttggacctcctgaactgatcatgtttcttttttctttttttttttttctttctgttttctctctctgcctttggctctatttctgagtgatttcttccattttaacatcttgcccttgagatattcatcttgtcatcttttttaatttctaagaacgccatttttgaggttcctttttgtcttttcataagctctgtttcctccaagttgttgttttctgtttatttattttggcctctgtctttcattgtaaaggttttcctcaaatgccgcaatgagtctcagcccattgtatttgagtggtgtctccatagagtccattggaaactctgagcatgttgggtgtgacttgtcaaatgtgggttttactaggctggtctggctgaagaacttctttgacaaatctctttatgtcagtatctctaggtcatttgtattgggatctgattctgcaaggaaggctcctccagtgttccatctagatggtaaaagtctggctgacaatgtctagggactgagtgtactatggtttagatatttgacccctgcaaacctcatgctgaaatttgatcaccagtgctggaggtggagtctaatgggagatgtttgggtcatgagggtggattcctcaggaagggattggtgtcgtcctcatggtaatgagtgagttcttgctctgttagttcctgagagagctggttgttaaaaagagcctggaactttccccccctctctctttcttcctctctggccacatgagctttgcacagaccagctcctgtttgccatttgccatgattggagacagcctgaggctctcaccagatgcccagtgttccagtcagcagaattgtgtgttaaataagccttttcttttctttatacccagccttaggtattcctttctagcaacacaaacggacaaagacagagtgaacataagcctggggtggatgttggtggggagtgtctcgaaatcagtctgtaaatcttcaacagattccttgctcatgtttttaatatgttatccctaccctcagctgtgcctagaatcctgacattttaccccaataagagagtaaacatctagtcttcagccaagtgctgagggaatgacgggctggggagtatctaactatatcttaaatagactttgagtcagaccccttatatttggcccccactttcatccatactcccaaaggtacctgggctggtttaggattcagccttctaagtcagtgatcagccactcatccatctgctttccagtttccgttaccattgtaaaccaaaaagtatctgacacaagcctccaccaatrtagaggtttattttgccaaggttgaagacatgcctgggaaaaggagacataagccaccgtaggatctgtagcctgtgctttttctgaagaggatttcaagggcttcaatatttaaagcggaaaagtgggcaaaaggggaaagggcaaagcgaaaaaaggaggtcgcattcttctgaatccacatgttacacatgaaaaggaggggtaggccagtaatcccagcacttttgggagcccaaggtgggtggatcatgaggtcaggagatcgagaccatcctggctaacatggtgaaaccttgtctctactaaaaatacaaaaattagccaggcatggtggtgcatgcctataatcccagctacttgggagactgaggcaggagaatcgcttgaaccagggagtcggaggttgcagtggccacagcctgatgacagagcgagactctgtctcaaaaaaaaaaaagaaaaggaggggtagagggaacagttaattatgtattcaccttgtgtttaatgaatctgcactttacataagataaacacagagtagagaaagcagtcaaatatgcattcatcttggggtagatgaggacaattctagtctcctcttttcccataccatgaggataggctgttaatttacattgtcagggtgagggaggcccccagtggaaacatatggcctctatctgtggctctcagtttaggaacaaaagaaaatgcaattgttttctttgtttttttgtaacttggcttccaagcttaatttttccctgttggcatagtgaatttggggtcctgaaattttattttcctttcataccatgttgcttttgtctttgtccttttcactttgttctggggatttaggctttacccaagtctttttccggttttgatggtttttttggagagattggaggctgagtgtgtttagtcttccatctttaaccagaaccctgacatttcttgaagtaaaaaaggcatcattacagggaaaagaccggaaatcattgcttagtgattcctaatcagttctcttactttcttctacccttttgaaaaccttttcctttcctgtttctttttcacaggtttctactatgtcttgattaatctgattgtgtgtattgactaattgagtggtacaaataataatcagacacatgacaaatttctccttgctcttgagaatacaataagaagagcccaaagcgtgttggatacctcctcactggctccctttaagagaagtaaattgtgcttcttttgaaaacagtgctattgcatatagttggcatcatgagagaaaaaaagaattgtcattcttatgagcccattattttgttattgattggttggctttttaaaggtgacaggaatcatttttcttttctcggaagatg

SEQ ID NO: 96557 - DNA, 24420 bp, Homo sapiens
ggatggcttctctgctgctcccggtgtcctatggtcatctttctggccaaggtgggtagactgggaggggatagggtatagctccagtctgatggcagagttactggcaaactgtagcaacgaggaccctctccagatagtttcataggctcaccagggatgacaggagatgctgtagtaggtgggactggggtggttggggcagagtgggtgaagggttgcactccatgctggaggaaaagaatgacgccaatgccggttccagtgcctaaaggaccatggctaaaggagatagtacctggggagctgagaggggggttgcaaattggagtggtgtggatccaggtgaggttcatagctggccattgtgtgaggtgccaaggctgctttggttttaaagctagatgtcctagctgtgtctggtccatcttttccataggagatgcaggagaggaagcagctgaatcactgtggtggcttggaaaatgctagagaggggagaaatgagaaaaaaagaaatgtggagaaagcattcagatgagctccacctggttacttaaacctttgcattccttgggaactcagtttgcaatgcaaacatacctcgttttatgcaacagatatgatcttgccaggccatgattaagtaaaagttttggtaactaaattatactttcatttattaaacaaataaatggcctactatggaccacatactatattagacactggatatccagagatgaagaaaaaacaaacagttccataggttctcactatttataaaataatcccttttagaatttctttgaagtctatttttaattggaatcatcatttcccaaattctgtatttaaattcgaatattctatcttgagttctttaagaagtgtaaattaatattcaggcaagatcctcctactgtttttttaaaattttatatttgagacagggtctcactctgtcaacgaggctggcacaatcatggcttactgcagcctcgacctcccaagctcaagagatcctcccacctcagcctcccacccagcctcagctgggactacaggtgcacgccaccatgcccacctactttttgtattttttgtagatagcagccttcaccatgttgcccaggctggtctcaaactcctgggctcaagcaatcctcctgctttggcctcccaaagtgctaagattacagtgagccactgtgcctggcctacttattttttaatagattagtcacagcaataataaccatggctgattgaaaattaggactggtgattatctacaggagactctccttctccgtcatttgaatgccctctacataccctattatttgaggacagaaaataggtcactttttttttttttttttagatggagtttcgctcttgtctcccaggctggagtgcaatggcacgatctcggctcaccgcaacctctgcctcccgggttcgagcaattctcctgcctcagcctcccgagtagctgagactacaggcgtgcgccaccatgcctggcaaatttttgtatttttagtaaagacggggtttcaccatcttggccaggctggtctcgaactcctgacctcatgatccacccgcctcggcctctcaaagtgctgggattacaggtgtgagccaccgctcccggctgaaaataggtcacttctataccaggtctaagaatctatcaacactgctgctattggtgcccccctcccctacttccagtgaggtacctcttatgaccagtccttgaaacccagtgtagactcaaaaactgtcaaagggtttggcacaaggatacgtgggcagaaatgaaaagaaggagaagggaagggtttgggggcagtagggaaaaaagagtttgcagagagaagctgaggtgtattcccgcatgaatcatttggccaggtaaaaagccttttgtatctacgcagaaagcagataagctgtggcatgagggataggattaaacttcatggagttcctcccagtgattcaaacaaaacaacaacaacaacaacaacaacaaaacatgtaggaatcaagacaatgcagaaagtttaggaatttccttccctgaaaagaaacttgaagaaaagactcaaaagaaaatggcaaaaggggccatttctgcatgcacatttcattttcttggctattttcccacctcttcctcgtgttcttaagttcttaccttggtcagctgatgcttgccaccacccaatgatgacttctgggcagctatttgtggaaaccaagtctttaacatcccttctacctgtagcaaggttcctaggtaacgttccctgtgaaaatgacgttgctttaaaaaaccagcaacaggattggagaaatctcctttttatgaagacccaagcaaagaaccagcgggacttaccccatctgtggcttctgcaaaacacctacaatacgctggatcctgtccattgccacactctgctgaaaactgcttaatcctggggacagggacagagagagattaaggattgagattcaagcatgtagtcaggtaaaggaagaacagaagggggttaaaattgattgatctaaaaaaattaagtcgggccaggcaaggtggcttacgcctgtaatcccagcactttgggaggctgaggtgggtggatcacctgaggtcaggagtttgagaccagcctggccaacatagcgaaaccccatctctactaaaaataacaaaaattagctgggcatggtggtgggcgcctgtaatcccagcgactggggaggctgaggcaggagaatcgcttgaacccaggaggtggaagttgcagtgagccgagatcgcgccattgcactccagcctgggcaacaagagcaaaactccgtctcaaaataataataataataataataataataaagtcatagtagcaaaaaaggagtaatataggccccaaacaagaacttcagagaaatacacgtcaaaagagggaaagagaaagagaaatgaacctagcccaaatgaatgcaacaataagattacctctctcaaaacgacccatcttcagcccattgagtaggtctgtgagaggaggtataaatccttggagttctttacactgtaggaaaataggacaaaggctgtaagaagacaaaaaactgcccacaccagcagtggctcttccttcacctccaaatctgggagtcaatactgtcctcacagggtccttatcaaccagctgggtgctaaggcactccaggagaatctcctttcacctgctttctcttaccttctgggcaaacagcaggtctccctctgtggtacaaccttgggtgtttagactggtctccagttcaccatctcttgatcttttcgccccagatcctgccataggagaagccgaaccccgctgtttcggatgagatggtgtatgctggttaccggaaaccttcgatcgatgcctgcagcggataggacccgggctgggccgtgaacctcccctctgcccaacagtgtctggcctgggcccatgggcccccttgtcctccctctcactatcagaggggaagccaaagtcactgttcactggggaggtgggaaaagacgaagagagagagtaggaggaataggaagaaacgctagatggagaatccataggtccagaagcaggggctatagaacagctcctggagtacccaaagatcggaacctgcaactgaagagcaaagcgagggagtttgaaaccagagtttaaggattaggaaatgaactgggagattggggtgtactgcgtgggataatacttgttctccccctccccaatattaccggtctcaaacacaatagaaaaagacatttctacccccacccccgcccattaagagcttgggattccctctctggccgccgcagagcagctctcggtctgacgcggcctccgttcttttcttccctcagttcagagtaaataccgacttgaaagacaccttcccctccgcccgttgttcgccagggctattcgccagcctgagtccgcagcaagcctctccacctgaggccatgccacccacaagcagtcaatctgggcacgcgaacccacctggtgatcctacgggaaccgcccccatagagactggcctcctgccctctcccaatctttcaagatcaggatccctgcgccggtctctctgggctcgcacctgccacgtgatgcaaaccctcccaataccaagatctgcattcagcccccaaatccactcccaaatactccctaacagctcgctttgtcctccgaatctccttacctgttgtcagccggctcagccctggctcggtttccagctccttcgccgtctctccgggtctatctacccacctccgcctctctcagtgggccccgccccttccccccctcccagacacgtgcggcccggcacgtgcctccccctgcttacacagatctcgcgccctcattggttgtgtcgccggtaacacgtgactctagttactgaagtccatagcccatttgctacagtacaaaggggctcagccagtagagaggcagccaggtgatgattggctgtaagggaagcattccgtgctcctcccctacatgcggctgctggagaggacccggtgatgagaaaaggaggaggatggaaaaagagtggaaaagaagggaggggaggaaaagggcggagcccgtggccttaaataggatggtgatgcgccagagatgcgcggtttgagtgttcagagattggttgtgctactgaaggcggcggacgtgggacccccggttccgtctcgggaagtaactcatctgccccctctttgaacacctccgctcacgagcgcagcacgtggaaaccgtcagtgatttgtgtctgcaacgtgtgtgagagaatggaggtgtgtgacacggtatattctcctgctctcggcggcccagccctcgtgactctccggtctctgtttcacctcccccacccctttctcctccaagttgggtgcctcctgccctgctgggtgaggagggtggggattgcaaccgagaacaccgcgtcctttctggctcccgctggggcggctcctccatcccttttcttacataacctaccacgcacgttaccagctcagatgccagcccgccacgacgctagaggtcaaaacgaaactcagtttttcctgacttttttatccaggcttctcgggcccggcgtcctaaattatctgattccaagcacggggaacagaatggggtaggtccctgatctcctaggttatggttttgtccagcttcagtcccttcatttgtccgctggagaagattcgaaagactttgaaggaggggagggaggcaagtccagagtttagagagtctcagaagtaactgggacgttactattgtcgttgcgccttgcattttgagagtacaatggagaggagagcagggcccaaggactgtgagctggttgaagataggacgtcggagagaccgcaagggggcagcccaattctaattagggtcccgaggatagcgaattaaaaaaaaatttaagtgagtttgtccctgccataattaccaactgcaaaaggcacattgttggacagaggtgtgggtaggggtgggtaggtgtgaatattttaagtctattctaagtagtttttgatattttaccttatgttttaacaatgtgcttattcttataaaaagaaaaaaagattctaaaacctcaacctcgtttccccaagcacactgtttcaacaccatacttaataaaataaaacaagagaattaccaatatggactgtgaataaacctgttgtctgtgggtgcccttctccagtcttctccaaactgcaggtttattcagtccataatgccctctaattcaattgtcacccacctccccttccaatctacgcttgctgcctctaaatcctggcgctctctttagttgtgactttagaacagactcatgaaggagtagatggtaaccagattatttcacttattatttattttatcttccaatttcctcttgccagactcccatccaaagagtcatagcagccttcttccacctaaaaaagcagagaaagaaagaaaataaaaggagtcaggagacccgagaaaccccttcatgccccccacactctatggaaactccccagatattctgagctgggattgctctgtgatagctcctgggaaagatgtgtgtgtacccctctcctccacagtcctttcacctcctgctgaatctctctatgatcaatggttatttagcatcccaatttaaaaattcttttcctataatacggctttctcttcccttctctcccmccgccctgccatacatcagagaaccgccatccgttctgcctctgaactttgcctcttgactctaccaggttgtaagacccacccactttgccctctggcattcgccatgacttgaaacgtggccaggctggaactagctttgattgttcagacattttggaagcttggagaagtattcccccaaccccatcatctatctgctctaggagatcctgaagtcctcttagttcagaaaaagtaatgactcatcacaaaagtctgcctcagcatctcctaaacttctttaagactgaataagaagatttttctaaatgtgatccctcttctttcattttacttgttattttttgagacagtctcactgtgttgcccagtggcaacagtacagtggccagatcatggctcactgcagcctccaattcttgggcttaagggatccttccaccccatcccccccaatagctgggactgcaggcctgtgctaccacacccaactaatttttatttttaatttttttaacgtcttgtagaggagttcttatttatttatttttaatttttttgtagagacaaggtctgttgctcagcctggacttaaactatgttgctcagcctggtctggaactcctgggctcaagcgatcctcccacgtcaycatcccaaagtgctgggattatagggatgagcctaaatctcttccttcagtggctgataattgaccaggctggaaacactaactagagatactggtaagaattacttcggtttagtgtgggaagttaaaaaatattatttcacagactcccccaaagccagtggctgcactcttaccttctacatgaaatacatccccacctgaacaaaggcacacgacaggaggaggggaataggacttcgcaaactggacacggcatcgttcagatctggactctgctaaaataccgacatccccacacagtaggctggtgtcattcctcctaccacttctctgtccccctccagaaagactgccacctctttacaacaacctctgtcttcctttcctttgggcttagagaaagatccatcyttccccatcactgtaaggagtccttctgtgcctttcagctatccctgaccataccagggaggccaattcaattcaattgtttctattttttatctattatgtgcattatactatactagtcactgtgctaggtgctatagaaagggacataaatatgaataagacaagattcctgtcctcaaggaatttacaatctaaagagagtctactctatattttatttatttgtttgtttatttattattatttttatatccaccaggctggaatgcagtggtgcaatctcagctcgctgtaacctctacctccagggttcaaacagttctcctgcctgcctcccaagtagctgagattacaggcacccgccaccatgcctggctaatttttgtatttttagtagagacacagttttgccatgttggccaggctggtctcaaactcctgacctcaggtgatccgcccacctcagctcccaaagtgctgggattacaggcgtgagccactgcgcccagcctactgtatacttcaaaaagaattaactgcccttattgtcaatctttcacttccattcttactggcttctttcatctgtgctcaactatatgcaggctgctctttggtcctattcccctttccagccgttgcttctctttttcattaccagattttttagatggttggtctgtactcacctccctttcctcataatgtactcactctttaactccacaaaaatctagcttttctccaagcactcagttaaaactactttcttgagagttacaagtgacctcctcctccttggcctcttggtagcttttgatggattatattaaactttctcttctagactctataatacaaacttggctatctgcctacttctccagtcaaatccttctccattccattcattaatttctyttcctcccactcactacaggcacagtcactggccttctgagcttgtgtgtactggctctgttgagctcatttactttcatatctgtgactttgcacttagaactctagccctgatctagttcagtgacctttaggacaccctcatagggctgtcaccataaactcagcttggccattaccaaattaataacttctgtcctaaaccactctggcctcccatagttcccactttggtcaaccattttcccagacatccatgtttaaaacccatgagttattttaactcactcctcatttatacttcatataaaattatcactcaagcaaggtattttcttcataatatttatttttctcctctccattcataatgccagagtacagattgtttctggaacaacgcaaatctcatgagttgctttccactaaattatttacatcctgcatacaacctgaagagtggtttttcttttttctttttttgagatggagtttcactcttgtttcccaggctggagtgcaatagcgcgatttcggctcactgcaacctccgcctcccaggttcaagcgattctcctgcctcagcctcccaggtagctgggattacaggcatgtgccaccacacccagctaattctgtatttttactatagacagggtttctccatgttggtcaggctggtctcgaactcccgacttcaggtgatcagctcacttcagcctcccaaagtgctgagattacagtcgtgagccaccacacctggccggtttttctaaaatatcacttttcatcgtgtttttaccataatgaagaacttactaggctccttgttgattatgagtccagacttcagcctgacacctgagactctctgaaatttgcccctatgttgccacatgtgaaattactaagcaagtattaggagccttgtaaattttatatttttcttaattcccactgttcccttccatataccctctccttcaatcataccctatttgctaaacatattatgcttgttctattcccccctcctgtgcagctctttcactcttttttttttttttttttttttttttttagatagagtctcactctgtcgcccaggctggagtagagtggcgtgatctcggctcactgcaacctctgcctcccgggttcaagtgattctcatgcctcagcttcccaagtagctgggattacaggcacgcaccaccacgcctggctaacttttgtatttttagtagagatggggtttccaccatgttggccattgaactagccttgaactgctgacctcaagtgatccgaccaccttggcctccccaaagtgctgggattacaggcataagccgccatacctggcctctttcactcttggaataactattcttcctcctaattgcttctgtccttccataactacccaccaatcaaaagctcatctattcttcagggtgtatctcaagcacaaatgcctcttgaaagcttttcagacaactctagcctgtactaatctctcttcttacattggctaaagcactgccagtatcttctgctttcaaatttatatataatttaacatcataacataccttttcattttgttctaagtgtttcgtaaacttgaattttataaatccttgaggacagtaacatagatttcttttttatcagcatcagttaccttagcagccttaggcatagattacatacctattgaatactactgaactgaaatttaactgtaccatatcttcccagtgttctgtaaacagggttagtattaaatcttagtgaaacatggccaagttgagatgaatacctgcaatgaagtactaattatttggttctcccatccaccaaagcctggtattccagccctctatktattccacgtcactagggatgtcctgtctccccccagcccccaatccccaatcaactcacaggttccgttgttactggtttcacagttacaggcttcggatggtctgcacgtgctgtttcaagactaatggtagtctctattgcttctgttatgtccttatccaacctgttctaccctcagtaggatttgggaaacacagagttatcagtttttccatccaacatcttcatagattctctacttaaagttctccccttcaccacctccacccagcccaaagacttaagytcagggattcccccctaccctatgcttgcatagatttgtacccatctcattcaaaagtcccttgatgcccctcctcagtgtcttagcaaacttactgaggacaatttataaagttctggcttttttctccyccccagataggttaacaaatctgttttgggcctactacttagtttctcctcatcaaactcatttttattcttgttaatcagatacatttcaacattgcccagtttcttttcttttcttttttcttttttttttgagatgaagtctggatctgtcacccaggctggagtgcagtggaacgatcttggctcactgcgtcctccatctcccggattcaagtgattctcctacctcagccttctgagtagctgggattataggcatatgctaccatgtccaactaatgtttttgtatttttagtagagacggggtttcaccattttggccaggctggtctcaaactcttgacctcaaatgatccactcgccttggcctcccaaagtgctgggattataggcatgagccactgcgcccggccagtttctttttaattgttacttatcctaacccttttagatgtagagttcactcaccagcctgtcctctgactcaaatatggagtaatcaatggtgaaatctgcactaaagtcatctgcagaggagaaagaaaatcagtaataattaaagaaaaatgtaactctagatctggaaatgaaaagggaagaaattactcagaatagtttaacttaagttgtaacatttattggtataatccaattttatttaactaatgttaaaaatgactgtgaatgtgtatgcatttatattttcaatgtaggtatctaaaataatttacaaatttgaaaaattttcaagttcttctttttttagagtcagggtctcactgtgttaacaggctggagtacagttggttcaatcatagctcactgccacctccagctcctgagctcaagtgatcctcctgcctcagcctcctgagtagctgggactacagccatgtgccaccatgcccagctaattaaaaaaaaaaaaattttggccgggcacgatggctcaagcctgtaatcccagcactttgggaggctgaggtgggcagatcacgagatcaggagttcaagaccagcgtggccaacatggtgacaccttgtctctactaaagatacaaaattagccgggcatggtagcacacgcctgtagtcccagctacctaggaggctgaggcaagagaatagctggaagccgagaggcagaggttgcagtgagctgagattgtgccactgcactctagcctgggtgacagcatgagatttggtctcaaaaaaaaaaaaatttttttttctatagagacaaggtcttgctatgatgtccagggtggtcttgaactcctgggctcaagcaatcctcccatctaaaaatcactatctggaaaaataacatcatcatgagtctttttttttttttttgtgacgtagtctcattctgtcgcccaggctggagtgcagtggtgtgatctcagttcaccacaacctctgcctcccaggttcaagcgattctcctgcctcagcctcctgaataactgggactacaggcaggtgccaccatgcccagctaatttttgtatttttagtagagacagggtttcaccatgttggccaggctggtctcaaactcctgaccgcaggtgatccacccacctcagcctcccaaagtgctgggattacaggcatgagtcactgcgcccagcccatcataaatcttttttcattttttttttttttgagatggagtcttgctctgtcacccaggctggagtgcagtggcacgatctcagctcactgcaacctctgcctcccgggttcatgccattctcctgcctcagcctcccaagtagctgggactgcaggcacccgccaccacacccggctaattttttgtatttttagtagagacagggtttcactgtgttagccaggatggtctcgatctcctgacctcgtgatccgcccgcctcagcctcccaaagtgctgggattacaggtgtgagccaccacgcccggccccatcatgagtcttgataggttttgttcatagccagatttttctctgaccccattgctctgcttcaaagtgaagagcaaagtctcagaactaaatatcctgaagcctctctccagttggctaagggcaagagcctttcatgtactcaccataactgggggtgactgtataataatagaccacctgataatattcatcctctcccagtctttcttcatcctcatattcttgtcctatggggacaaggactagaggtcaagggacatctggaacaccttactaacaaaaggacacctggagatgacctcagcgctcccagctttcttgctctttctttcttttctctctctctctctctcctccaatagtcatactcctttcttgcctgtgcacctctacacccctctcagtcttctgggatccatatctgtaatgaggcctgttactccgtgccctttcaatccaggaactcctaaaacagaaaacagtccccttcacatactataaacccaaagggagaaccagacctaaaaaaggtaggaaaagtagagaccaggaattaaaaacgccaagtcttctatttagtatgctccagatcttactgtatttgtgagacatcttttcttatcagtatctcttacaaataactaacatacacccttaggctttggatttgagctttagttccaccttcactgctaacagaataaccctgaacaatccacttaacatccgctttcttaaaatgagtcagctggactaaaatgacccatctctgttagtttttcttccctttcagaactaaaaatatgtggctttgatatgactggatcaagaactccaggcctcctgctaaacacttccctgagctccttgaatgctttcccttcaactccaagctaatgacacaagaatctagaggaaaaggaaacaatgagacacacctggtagactggggaacaaaggagggaaggagccaagctactcttgggaccctgtccctgaagacagccagttttccactaccctaaaggtcaccccacttctgtgtctttactaatagcaggtttttttctccaattctctgggaaaggagataccctaactactagtttcagactgtgacaccttccaataatccctccttcacccttactttagcccctgtcatcttgttcaacttccgtggtgatggagaactgagctcagtgttgctagggcctccttgtgtctggagctccatcctccttgtttgacaggactctgcttttttccccctttcctggctctgccttccagatctccattctgccctcaacaccggaccccagcacgatgagaaaactctatcgctccccactgaaatgtacctctcacccactcctcattttttttctcccaccccatttatggtagaagacctggcacaaaagctcagagagaggagtggacttacccaggataagtggcacagcaaagatggctacaaagaggacatccattctggattctgcactattgctgtgaaagtaaaaaaggaaattacagagtttcccaccaaacttaccccgcctcccctcctcctccaaagcagggaaggagctgcagcaactcttctcctcccagggggcagaactccccgcctactggctgactgactagatctccggttactgccggtccccagccagagctgcccagattgagaggcaaaagggggttttgatgcaaacatgtttcttaagctccccctgccctagattagatccattcaagactcccactgtcactaccaaaataaaaataaaaaataagcctaccaagaagtttcccctctcccggctttccttccttcctccaaggcctcataaaaagttcaccctccctctcactgtctctgacttaccatcaccacccagagttgcctttctctctgaggcttcatcagtctcttttcgtcacagtggaaatgttctgaggaaggggtgagcatttttctagactgaaaagaatccctttcttctgtctgtctggagctatagagaataggaacaatatttacccatcattgtctgacttaaagcacctgctgcatggcttcagctaaaagtctctcagccatggtcagttatttcctttctggtaacactgacctcacctcacctctttgttttttttttgagacagaatcttgctttgtcacccaggttggagtgcagtggcgcgatctcggctcactgcaacctctgcctcccgggttccagtgattctcctgcctcagcctccctggtagctgggactacaggcgcgtgccaccatgcccagctaagttttgtatttttagtagagacggggtttcaccatgttggcccaggctggtctcgaactcctgacctcagatgatccacctgtcttggcctcccaaagtactgggattacaggcatgagccaccgtgcccggcctcacctcatctctttctcaacttccaggatgcaggttggaagaagggagaaagcagatagtctctttccctgctacaggtgccacaccttccctcccacattcagtcacttggtatgttcccttcattccgtcctacaggtgtagagtttttatcctttcctctgcttttatgtttcccatgttcattcaattcagaaacccttagcaacatacgtgctaggcacagtgtgctaggcctagtgtgataggcaattgagagcttataggcaagggaataagaaaagacagttttgctttgttcttaagggaagttaataagtatctgctcaacatctactatgagtcaggcactatgcaagtgtctgtggaaacacccatgaacaagataggtttacagcctcctgtcaatggtcagaagatgctgtggtaacagctcaatggagagatgaagctggccacagtggctcacgcctgtaatcccagtactttgggaggcttaggcggacagatcacctgaggtcaggagatcagcctggccaacatggtgaaaccttgtctctactaaaaatacaaaaattagctgggcttggtggcaggcgccagtaatcccagctactagggaggctgaagcaggagaatcacttgaacctgggaggcagaggttgcagtgagccgagatagcaccactgtactccagtctaggcaacagagtgagactccatctcaaaaaaaaaagacatgagaattgtctcattcctatccaccttactctgcctgctgggctcagaagcaggacatactggagtcttgaacacaggtcatgataacgctaccctcttaatttttttttttttttttttttgagacggagtctcactctgttgcccaggctggagtgcagtggcacgatctcggctcactgcaagctccgcctcctgggttcacgccattctcctgcctcagcctcctgagtagctgggactacaggcgcccgccaccacgcctggctaattttttgtatttttagtagaaacggggtttcatcgtgttagccaggatggtctcgatctcctgacctcgtgatctgcctgcctcgacctcccaaagtgctgggattacaggcgtgagccactgcgcccagctaccctcttagtctcattagggaataatttgcctggtgactttccatgtaaatattttctttcttttttttcagagacagagtcttgctctgtcgcccaggttggagtgcagtggtgggatctcagctcactgtaacctccacctctcagattcaagctattctcgtggctcagcctcctgagtagctgggactacaggtgcgcaccaccatgcctggctaattttttgtatttttagtagagatggggttttaccacactggccaggctagtctcaaactcctgacctcaagtgatccagccgccttggcctccgaaagtgctgggattacaggcatgagccactgtgaccagcctccgtgtaaatctatacaatctattcctcagctcctttccagaatatcctggaagacatgtaaaacatgtatgtgagtgtgcacatatggattaaataataaatcacttccaggaaggaaaggaagtttggttatctttaaacaatttctgtggggtttttttttggtactttgattatgctttcaaaaacaatattccagatttctttcctcttttccatcctcagattcctttgcctaacatcttccctaaggactaacctctccccatccaaatgagattacaataccctcctctcctacttaactttctttttcttttttgagacagaacctcactccgttgcccaggctgtagtgcagtagcgcaatctcagctcactgccacctctgcctcttgggttcaagctatatttgcccytcagcctcccaggtagctgggattacaggcgtgcgccaccacatctggctaatttttgtatttttagtagagatggggtttcgccatgttggccaggctggtctcaaactcctggcctcccaaagtgctgggattacaggggtgagccacsgcgctcagcctactttaactttcattcactctaatatacaacccctctcagcctcaggaaaacgcaccactgaggttcatttttcagaaaataaatagaggaagtatgacataaaaggaatttatggcgggggtggggtgggggtgtcgttttccttcaaccccatcgctctaattgcttttaaactcccggactctttcaaaatgccttcctaacatttctctccaggctccttttgcttctctccgattctcttgtcattacagatgaaggcttcattagcgatatactgtattccatgtttattatactagtctgtccgaagagctcctactttttaatgtaatcttcatctcttaggcagcagctctagcccatttcctctcattcaagtaagaacaatacccgtccctatctccctgcgccccatcctgtgctctctttgtatttgtcccttagattcaaacaggatctaccccctctgcagcccttcaagaagaggtatgattgctaccacttttccccacaaagtgacgaaaggaaacagcgacggaagcgcaaccgaaccctggaattggtgtctcgactggtccattcccggcccacccccattaaccggctcgagccactcccaggacgaagtcaaggcctcggaaggcgactacaactcccagcaggtcgagcagctccgcccgcgctgattctccattggccttccgggggtggggattagatgggaggtggccgtggggctgcggccgggatttgtcccctcttcggcttccgtagaggaagtggcgcggaccttcatttggggtttcggttcccccccttccccttccccggggtctgggggtgacattgcaccgcgcccctcgtggggtcgcgttgccaccccacgcggactccccagctggcgcgcccctcccatttgcctgtcctggtcaggcccccacccmccttcccacctgaccagccatgggggctgcggtgtttttcggctgcactttcgtcgcgttcggcccggccttcgcgcttttcttgatcactgtggctggggacccgcttcgcgttatcatcctggtcgcagggtgagtagagggcccgggagacgcgggagagcgtcgaagagagaggtgcggaaggggctggaggaactggggcaagcctgggagcctgaattggggacgataagtcggaggtgaagtttgggcggaggtgaggggttgggtctgggagatttgtcctttcccgcagttggtttccaccttccaaggatctcacagattcctcctatattcctcccagcgacgtcagagaaggcccaaggccgagactcgtgagggggctgtgctgacctaggcaggccgagtcaggtgccttaggggaggatccaggaacggatacctcgcccttccgtgctcgcacactctggctgtcatcgctctgaagactctttaattagatttctcccctttccagtgcgttcacttttctacagatgagtctcttggtggagacagttaccctacctggtccatgtctccctaaccatccggaaggctaacttccacttttcaagcagctttggctggtttccctccttgatttctctggctcccactactattgcttgtctcactgcccctgtcttttctcagggcatttttctggctggtctccctgctcctggcctctgtggtctggttcatcttggtccatgtgaccgaccggtcagatgcccggctccagtacggcctcctgatttttggtgctgctgtctctgtccttctacaggaggtgttccgctttgcctactacaagctgcttaagtaagaagatggagtggtctggaggggagaggggcaaaggactgcactatgggaagtggggcagcccctgggtgctggtttggaagaggaggcactaagggaggacattagagggaaaggagcatccctgccctccctcatgtttcccctaccccaccccaccccaggaaggcagatgaggggttagcatcgctgagtgaggacggaagatcacccatctccatccgccagatggcctatggtgagccaagggagagggactggaggagggagttggacagccccctcctctagggaagtctctaaatatccacatgttctaagtggcttcttactttccttcatccgtcacttccaaagaaagttggtctggagggagagtagatgtgaaagaattgtaaccgggaatggggaggggtcagtggtgaacaggcaatagtgtgatctctgacattgatgagatcctcccttcccccagtttctggtctctccttcggtatcatcagtggtgtcttctctgttatcaatattttggctgatgcacttgggccaggtgtggttgggatccatggagactcaccctattacttcctgacttcaggtaagatccaccttctatctagcctttaccccccatccatccttgtccctgatctgatttattggccttccctgagagacttctttggctcaacatctcaggagcctgggagaagatcagggatgtatctcctccccatctccctccctgcagcctttctgacagcagccattatcctgctccataccttttggggagttgtgttctttgatgcctgtgagaggagacggtactgggctttgggcctggtggttgggagtcacctactgacatcgggactggtgagttggagacaggggcctgagttagggagaaaagcatttaatggtgagtgggatgtgggggaaagggtatcctcacttcttaacatttttaacttacctgggaggaggaggaaaggtgagtctttcaaggtctctcacctcagcatcatttctatcacctgctctggggaggaggttgaaaggattagtcaaactgtaatgcagagggcctgaggtgagcaggagcggcagaaacctttgagtttctgaggagctgaaaatcaaaagtccccttaaccacaagatgttggtgctctgaagggaaagactggagaatttgagagagatatctgggagtcagaaaggtacagagagaatatggggattaggtcgagggagaatctaatctctttcctactcttaccctccttcctagacattcctgaacccctggtatgaggccagcctgctgcccatctatgcagtcactgtttccatggggctctgggccttcatcacagctggagggtccctccgaagtattcagcgcagcctcttgtgtaaggactgactacctggactgatcgcctgacagatcccacctgcctgtccactgcccatgactgagcccagccccagcccgggtccattgcccacattctctgtctccttctcgtcggtctaccccactacctccagggttttgctttgtccttttgtgaccgttagtctctaagctttaccaggagcagcctgggttcagccagtcagtgactggtgggtttgaatctgcacttatccccaccacctggggacccccttgttgtgtccaggactccccctgtgtcagtgctctgctctcaccctgcccaagactcacctcccttcccctctgcaggccgacggcaggaggacagtcgggtgatggtgtattctgccctgcgcatcccacccgaggactgagggaacctaggggggacccctgggcctggggtgccctcctgatgtcctcgccctgtatttctccatctccagttctggacagtgcaggttgccaagaaaagggacctagtttagccattgccctggagatgaaattaatggaggctcaaggatagatgagctctgagtttctcagtactccctcaagactggacatcttggtctttttctcaggcctgagggggaaccatttttggtgtgataaataccctaaactgcctttttttcttttttgaggtggggggagggaggaggtatattggaactcttctaacctccttgggctatattttctctcctcgagttgctcctcatggctgggctcatttcggtccctttctccttggtcccagaccttgggggaaaggaaggaagtgcatgtttgggaactggcattactggaactaatggttttaacctccttaaccaccagcatccctcctctccccaaggtgaagtggagggtgctgtggtgagctggccactccagagctgcagtgccactggaggagtcagactaccatgacatcgtagggaaggaggggagatttttttgtagtttttaattggggtgtgggaggggcggggaggttttctataaactgtatcattttctgctgagggtggagtgtcccatccttttaatcaaggtgattgtgattttgactaataaaaaagaatttgtaattgtgggggaacttggcttttaagggaggggatagcatgttaattgagatttctgtcctcagatctctcatccagccactttcctaacctggcaaccactgatttccaagcatagccttggtgcaagggcagaaatctgggctagtggtttaacatgtctgaaactttgggttaagtgtcttcccagaagcttatctttccttccaggggtgggataaaaggagttaatcacccatgcttcttttccccatcctttgcccatctttaccacctgagggattcaggaacttgcccaccctcaagagcctcaaaggataggccagaattaaagtcagaaactttaatttccaaatatattgatcaaaaatatacaacttcaacagcaactctttatcctaaggagagatcccgcagtatatctagggaaagggccataaaagtgagggggtagaggactttggggtatatcccaaacttcccctgcaactaaacagagtttgttctctgcattaacaacacagcgatttcctcatttcctcctacatgtttggagaggctgaaggctctgcagttcttcctggaatgacagcctgggtccattcctctctaggagatgtccaggggaaggaggacatctgcttactactcctacagtgtttctggccagatcctacaccccattttagaggcttcctgataggcatgaagggaagtcatccacatccatggtatctgagaaggaatttatgcctcagtcgtggcttgtgctgaggtgaagaccacactctttcggttttccagcctcttcttcctggaaaggggaatggctcatgagaatgactgctatctaagtgaagcagattagaggtgaaataggagaatgctttttaacagaaaagagggctgggcaaggtgtttcacacctataatcccagcactttgggaggctgaggcgggcggatcacttgaggtcaggagttggagaccagcctgggcaatgtagtgaaaacccgtctctgctaaaaatacaaaaattatctgggcatggtggcacatgcctgtagtcccacctactcaggaggctgaggtgggaggaccacttgagcccgggaggtggaggttgcagtgagctgtgataaagccatgcactccagcctcgacaacagtgagaacctgtctcaaaaagcgggtggctcatgcctataatcccagtactttgggaggctgaggcaggcgaattgcctgaggtcaggagtttgagaccagcctggccaatatggtgaaaccttgtctctactaaaagtacaaaaattagctgggtgtgatggtgcgtgcctgtagtcccagctactcgggaggctgaggcaggagaattgcttgaacccagaaggcagaggttgcagtgagctgagattgcacaccactgcactccagactgagtaacagagcaagactccgtctcccacctaccaaaaaaaaaaaaaaaaaagaagaagggactggaggaatggaaagtagggcctcaccgaatctttctagcaatgaaataaacagccaggagaaggcagagacagccaaccaagattcctacacctagactcagcatttcacctgggggagataaaggtaaaaggtgtcagcctaggactaacatagattttgagcctttcccccactcggtgaggacacctcccctccccgcattatcttataaggctggcttacctgtggtatacgaggatcctgctgtaagagaagaaaatgggtcagtgggacttcagatccccatcccagctgggagcagcactctctgctgctgtgcctgggagaatcccccgggggcaccctggggtgggggttggttcccagtccaagcaagtcccagaaaccccctccccttttagccttttcttcccattggctccctagttcctgccattgtgtccccctcagtttcccatctcttctgagccgtgcagaatcaccttggatgaaagaagcaaagaccatgcgctgattgagaggctgaagggctcggtagttctgtaccagaagcttagagggctcctcttctgtggagaacaatgtcccctgaagcttttccagctgaggagcagaagcgtgggagaggtgttactttggggagtgggaaggggtctgaagttacaactgtgtctcacctcacctcgtttctccaccacttacctgttccattgaaatctgggaccttctataaaaaactgtccagagcacactctggtagcaagggggagttgtgagcgagccattgtagcggaagtactgccccagctgtttggggagcagctctcttaggttgaagggaggcactgaggtcttctgatctggggagaacagactgggactcatcttcctttcagtgtgccctagcttacctagatagggctcccagaagcaaaattccttggctctatgtaattgcttcatcccaaggcttttaaggatagtttttgaaagtctaatcttacttcctgctatagatttttaaggctcacctttatgcctgacttcatgcaagtgactcagaatgtgttcataagctatattcttagtctcacccacctggaagagaaggaaagggagagagtttggaatgagtccatgtttggaataagaaatttatgtacagaataaatggtcagggtgggctgctgcctgccataggaaggaggccagcaacagaaataggtttgagggttgcagaggaagtggagagaaacctggaagggactgggggctactgacctcaattaggatgcccaggacagccaggccctgaggcctctcagcagcctcactcaagctgtcataggaatcagagtcataatgtacaatgtggagctaaaggaaggaa

SEQ ID NO: 96558 - DNA, 16554 bp, Homo sapiens
cacagacgtgtgcatcatcagttgatgctaataacttacactaacacttaagcccacctcagagtaagccaggtccaaagtaacgaaatagaactagattgggacattattatgcttgtcaacaaactttcactgaatgactactctgtgtcagatactgttgataccactctagtgcctcctggaccactaggaccacataaaagatactaaaacaaagtagtatataataaatgcaaaataaattatatgggctggacgcggtggctcacacctgtaatcccagcactttgggaggccaaggcaggcggatcacttgagcccagaagttcgagaccagcctgggcaacaaagcaaaactccgtctttacaaaaaatatagaaattagccgggtgtagtggcatggcctgttgtcctagctacttgggaggctgagggggaggatcacctgagcctggaaggtcaaggctgcagcgagctttgatcacaccactgcaccctggcctgggcaatagagtgagaccctgtctcaaaaaattaaaaatgaataaataaataaatagggccaggcgcggtggcgcacgcctgtaatcccagcactttgggaggctgaggcgggtagatcacctgaggtcaggagtttgagaccagcctggccaacatggtgaaaccctgtctctactaaaaatacaaaattagccaggcgtggtgccacatgcctgtaatcccagctgcttgggaggctgaggcaggagaatcacatgaacctgggaggcggaggtggcagtgagccgagatcgcaccattgcactccagcctgggcaacaagagtgaaactccatttcaaaaaataaataaacaaacaaataataaataaaatatgccacagcataatgtggtgaaaggcactggcttcaaagttgggagatctggattctatcccaattctaatactcatcaggcctatgaccttgaagaagtcatttaaaaccaggggtctggagactacagtttacaggtcaaatcctgctccacctgtttttgtaaataaggctgttgacctacagtcatgcttatttgactgtgtgttatgtatggctgctttgggctacgatggccgaattgggtagttgcaatagagacataaagcctacaaagcctaaaatatttactatctggcccttgccagactcactctatttcctcatctctaaaatgggactaattttgccctgttcagtctcacgaaatttgtcatgggaatcaaatagaataaaatatgaagatatgccgggcacggtggctcacgcctgtaatcccagcactttgggaggctgaggcgggtggatcacgaggtcaggagatcgagaccatcctggctaacacagtgaaaccccgtctctactaaaaatacaaaagatcagctgggcgtggcggcgctcgcctgtagtctcagctacttgggaggctgaggcaagagaatcacttgaaccctggaggtggaggttgcagtgagctgagatggtgccactgcactccagcctgggtgacagagcgagactctgtctccaaaaaaaaaaaaaaaaaaaagagaaaaaaaatatgaagatactttgaaagaaaggaagggagacaggaactgatgttaataagttctgttaaccactaccattggatcagctggagagtaacatttttgagagcctactatatactaaaccctgtactaggtgggtgttttttatttttgtttttgtttttctgaaacagagtctcactcttgttgcccaggctagaatgcagtggcaccatcatagctcactgtagcctggacctcctgagctcaggtgatccttccacctcagcctcccgagtagctgggattacagggacatgccactacgcctagctaattttttgtatttttagtagagactaattttttgtatttttaatagtttcactatgttgtccaggctggtctcccaaagtgctaggattacaagtgtgagccaccccaccaggccccaaaccctgcactaggtattttatgtacatgattccatttaatggagtaaacggccaaacactgagtgtatagatcatgtttaacagaaagaatgataggatggacttgagttagtcgttgaaagagggcagggtttagataacagaagcaggaaaggtttggcaaggtgaacagcatgaacaagagcttaggggcaaaaaggtgtagtgttcaggagtcaaaacaaaacaaaacaaaaacctgcaacagagagatcatgcaggggagcacagggaaaaatagagactgtgactaaagattttggactttcttctcaaagcattcgagagccattgaagaatttgaataggatatgatatgcaaagcactgttctaggaaaattaacttggttatcagcgaaaagggattagaagagagactactggtacagtgaagtctagaccagactggtggcaatggaatggataggaagaaatggattttaagagatattccaaataaagaataaaaaggatctggtgaccagatggcaccaaattttaagcctagttatccaggaaaaaacaaaacaaaacaaaaaactatggtacttagtgataccacagatagcactaacagaagaggagactgtaaaaagtggtagctggctggcacagtggctcacgcctgtaatcccagcaggcgtgggattgggaggccgaagtgggtggatcatgaggtcaggagttcaagatcagcctggccaacatggtgaaagcccatctctactaaaaatacaaaaaatagctggatgtggtagtgggtgcctgtaatcccagctactcaggaggctgaggcagaatcatttgaacttaggaggcggaggttgcagtgagccgggatcgcaccattgtactccagcctgggtgacatgtgagactctgtctcaaaaaaaaagaaaaaaaagtggtagcaggacatgttttcaggaaagaataatttgattggtgattactggaaaacacatcagactggaaaccgagttctgtccacatattgtgttgtcctagataagtctcctaagtttcgtttcttttttttttttttttttgagacggagtttcactcttgttgcccaggccagagtgcaatggcttaatcttggatcaccgcaacctccgcctcccaggttcaagggattctcctgcctcagcctccagagtagctgggattaaaggcatgcaccaccatgcccagctaattttttttttttttgtatttttagtacagatggggtttctccatgttggtcaggctggtcttgaactcccgacctcaggtggtccacctgccttggcctcccaaagtgctgggattataggtgtgagccactgcacctggccctaagtttctttatgtatcaaatgaggaggttgggttgaactggatatacaagaggcatttttttttttttttgagagggagtcttactctgtcacccaggctggtgtgcagtggcgcatctcagctcactgcaacctccgcctcccgcgttcaagcaattctggtgcatcagcctcctgagtagctgggactacaggtgtgcaccaccacgcccagctaatttttgtatttttaatagagacagggtttccctatgttggccacgctggtcttgaactcctgacctccagggatctgcctgcctctggtgtgggattacaggcgtgagccacagcgcccggccaagaggcttatgttggctctaaaacactgaaagtttcaataatgtttaagtaccagcaatatgtaaataaaactgtccaacagaaatttaaacagtatgccatcccaggggaaagattgggactagagataaagctgtagcagtcttctaagttgaagcaataattaaagccatgaaaggatatagtcagagaaaagggccaaggcctgagtctaggggaacacccacactttggagtaggttgaagtggggcccttaagagacctagacattgctgccagataggtaagaggaggattagggtagtgtgctgtcatgggatctgagggcggagagtttcagtaggcagcatcgagtgtcaaatgatacagagagcataatgtacgtagcctttgtaaagggtatagctgttgattaggtggaagctagattataatactggttctgtgggctcattagtgacctcggaaggtgcaacaaggtgaaagcagcagaagctaggctgcaaggggttaaggactgagtggcagaaaggaatcagaaagagtataaatagactacattgtcaagaagtatggagaaaataagaggacaatcagccttaagagatgttttcaaggaggaaggatctgatcatatttgtgatcaaaccattccattgccaccactctggtctgatcatacttgtgatacttggacaaataattattgttgggacaaactgaagttacaagataaagaggggatatgtgacacagcaaaagttccagaggtgaaggtaatcagaagcacaaatggataggtttgcctttaaaaggaggtcatactctctgaaaataaggcgagacaattattcactgagaacagaagacttgagaaatgggggaaagatgtgtaactacttatgagaaacacactaaagagccaataagcaatgactaagttgtcagagaagcctgatgccctacacaggattaggatgggagaggaaatggttttggtggaaagtgagacacatcagaaagaggataaaatacaaagaagggcagttatagatccattcatggtcttcatttttgcctccttctaactctgagttgcctcccttagtctagcatacatctagcacctgcagctttttttttttttgagacagagtctcattttgtcacccaggctggagggcagtaaacctccacttcccaggttcaagtgattctcctgcctcagcctcccgagtaccttggattacagacacccaccaccatgtccggttcatttttttatatttttagtagagacagggttttaccatgttggccatggcttgtctcaaactcctaaccacaagtgatctgcccacctcagcctcccaaagtgctgggattacaggcatgagctactgcgcctgacctaactgcagctttttgagtaagtatgaagcctagtgtcttgaggtgttcccatgtctgacaattctaaggagccctttcctctttaaaactggcaaccacagtggctgttttggctcttgtgttcttcctctggcagcagaaacctacatatgcatttaccacgggcatcaacagctcccatcaaagcaaagagctagcccggagcagaagaacctgcaagtctgggccagctggaagattacaaaggtgtcaaaacaaggggaaaggtagagtctctgagcctgaatgaaaacataaacctggctgcacgtggtggctcacgcctgtaatcccagcactttgggaggctgaggtaggtggatcacttgaggtcaggagtttgagacctgcctggccaacgtgtagtgaaaccccgtatctacaaaaatataaaaattagctgggcatggtggcatgggctgtaacctcagctactcaggaggctgaggcctgagaatcacttgaacccaggaggcggaggttgcagtgagctgagatcgtgtcattgcactctagcctgggaaacagagcgagactgcatctcaaaacacaacaacaaaaaaaccccataaacccaactctgaactctgtaactgtttcaaggatgtcccaggaaaacagcagcacagtccccttctcctataagtcttatattgtcatccagactctaacttggtagagctcatgttcacaaacatccccatcccttttctacttttctgcagctcagaggataaggattggttttggaagcagaaagttttcaatttcccccaatcagcaaactgtttaggtataaaaaaatttctttaatcagaaaggatttatcttccctcaacacaaatgcacacattaatagtaaaaatacatatatacataaatatttacacaaaktagaagtcacagtggacagctgtatgccctgggctagaggttgagaagatgagcatcagcagcaactggaggatggcttctctgctgctcccggtgtcctatggtcatctttctggccaaggtgggtagactgggaggggatagggtatagctccagtctgatggcagagttactggcaaactgtagcaacgaggaccctctccagatagtttcataggctcaccagggatgacaggagatgctgtagtaggtgggactggggtggttggggcagagtgggtgaagggttgcactccatgctggaggaaaagaatgacgccaatgccggttccagtgcctaaaggaccatggctaaaggagatagtacctggggagctgagaggggggttgcaaattggagtggtgtggatccaggtgaggttcatagctggccattgtgtgaggtgccaaggctgctttggttttaaagctagatgtcctagctgtgtctggtccatcttttccataggagatgcaggagaggaagcagctgaatcactgtggtggcttggaaaatgctasagaggggagaaatgagaaaaaaagaaatgtggagaaagcattcagatgagctccacctggttacttaaacctttgcattccttgggaactcagtttgcaatgcaaacatacctcgttttatgcaacagatatgatcttgccaggccatgattaagtaaaagttttggtaactaaattatactttcatttattaaacaaataaatggcctactatggaccacatactatattagacactggatatccagagatgaagaaaaaacaaacagttccataggttctcactatttataaaataatcccttttagaatttctttraagtctatttttaattggaatcatcatttcccaaattctgtatttaaattcgaatattctatcttgagttctttaagaagtgtaaattaatattcaggcaagatcctcctactgtttttttaaaattttatatttgagacagggtctcactctgtcaacgaggctggcacaatcatggcttactgcagcctcgacctcccaagctcaagagatcctcccacctcagcctcccacccagcctcagctgggactacaggtgcacgccaccatgcccacctactttttgtattttttgtagatagcagccttcaccatgttgcccaggctggtctcaaactcctgggctcaagcaatcctcctgctttggcctcccaaagtgctaagattacagtgagccactgtgcctggcctacttattttttaatagattagtcacagcaataataaccatggctgattgaaaattaggactggtgattatctacaggagactctccttctccgtcatttgaatgccctctacataccctattatttgaggacagaaaataggtcactttttttttttttttttagatggagtttcgctcttgtctcccaggctggagtgcaatggcacgatctcggctcaccgcaacctctgcctcccgggttcgagcaattctcctgcctcagcctcccgagtagctgagactacaggcgtgcgccaccatgcctggcaaatttttgtatttttagtaaagacggggtttcaccatcttggccaggctggtctcgaactcctgacctcatgatccacccgcctcggcctctcaaagtgctgggattacaggtgtgagccaccgctcccggctgaaaataggtcacttctataccaggtctaagaatctatcaacactgctgctattggtgcccccctcccctacttccagtgaggtacctcttatgaccagtccttgaaacccagtgtagactcaaaaactgtcaaagggtttggcacaaggatacgtgggcagaaatgaaaagaaggagaagggaagggtttgggggcagtagggaaaaaagagtttgcagagagaagctgaggtgtattcccgcatgaatcatttggccaggtaaaaagccttttgtatctacgcagaaagcagataagctgtggcatgagggataggattaaacttcatggagttyctcccagtgattcaaacaaaacaacaacaacaacaacaacaacaaaacatgtaggaatcaagacaaygcagaaagtttaggaatttccttccctgaaaagaaacttgaagaaaagactcaaaagaaaatggcaaaaggggccatttctgcatgcacatttcattttcttggctattttcccacctcttcctcgtgttcttaagttcttaccttggtcagctgatgcttgccaccacccaatgatgacttctgggcagctatttgtggaaaccaagtctttaacatcccttctacctgtagcaaggttcctaggtaacgttccctgtgaaaatgacgttgctttaaaaaaccagcaacaggattggagaaatctcctttttatgaagacccaagcaaagaaccagcgggacttaccccatctgtggcttctgcaaaacacctacaatacgctggatcctgtccattgccacactctgctgaaaactgcttaatcctggggacagggacagagagakattaaggattgagattcaagcatgtagtcaggtaaaggaagaacagaagggggttaaaattgattgatctaaaaaaattaagtcgggccaggcaaggtggcttacgcctgtaatcccagcactttgggaggctgaggtgggtggatcacctgaggtcaggagtttgagaccagcctggccaacatagcgaaaccccatctctactaaaaataacaaaaattagctgggcatggtggtgggcgcctgtaatcccagcgactggggaggctgaggcaggagaatcgcttgaacccaggaggtggaagttgcagtgagccgagatcgcgccattgcactccagcctgggcaacaagagcaaaactccgtctcaaaataataataataataataataataataaagtcatagtagcaaaaaaggagtaatataggccccaaacaagaacttcagagaaatacacgtcaaaagagggaaagagaaagagaaatgaacctagcccaaatgaatgcaacaataagattacctctctcaaaacgacccatcttcagcccattgagtaggtctgtgagaggaggtataaatccttggagttctttacactgtaggaaaataggacaaaggctgtaagaagacaaaaaactgcccacaccagcagtggctcttccttcacctccaaatctgggagtcaatactgtcctcacagggtccttatcaaccagctgggtgctaaggcactccaggagaatctcctttcacctgctttctcttaccttctgggcaaacagcaggtctccctctgtggtacaaccytgggtgtttagactggtctccagttcaccatctcttgatcttttcgccccagatcctgccataggagaagccgaaccccgctgtttcggatgagatggtgtatgctggttaccggaaaccttcgatcgatgcctgcagcggataggacccgggctgggccgtgaacctcccctctgcccaacagtgtctggcctgggcccatgggcccccttgtcctccctctcactatcagaggggaagccaaagtcactgttcactggggaggtgggaaaagacgaagagagagagtaggaggaataggaagaaacgctagatggagaatccataggtccagaagcaggggctatagaacagctcctggagtacccaaagatcggaacctgcaactgaagagcaaagcgagggagtttgaaaccrgagtttaaggattaggaaatgaactgggagattggggtgtactgcgtgggataatacttgttctccccctccccaatattaccggtctcaaacacaatagaaaaagacatttctacccccacccccgcccattaagagcttgggattccctctctggccgccgcagagcagctctcggtctgacgcggcctccgttcttttcttccctcagttcagagtaaataccgacttgaaagacaccttcccctccgcccgttgttcgccagggctattcgccagcctgagtccgcagcaagcctctccacctgaggccatgccacccacaagcagtcaatctgggcacgcgaacccacctggtgatcctacgggaaccgcccccatagagactggcctcctgccctctcccaatctttcaagatcaggatccctgcgccggtctctctgggctcgcacctgccacgtgatgcaaaccctcccaataccaagatctgcattcagcccccaaatccactcccaaatactccctaacagctcgctttgtcctccgaatctccttacctgttgtcagccggctcagccctggctcggtttccagctccttcgccgtctctcsgggtctatctacccacctccgcctctctcagtgggccccgccccttccccccctcccagacacgtgcggcccggcacgtgcctccccctgcttacacagatctcgcgccctcattggttgtgtcgccggtaacacgtgactctagttactgaagtccatagcccatttgctacagtacaaaggggctcagccagtagagaggcagccaggtgatgattggctgtaagggaagcattccgtgctcctcccctacatgcggctgctggagaggacccggtgatgagaaaaggaggaggatggaaaaagagtggaaaagaagggaggggaggaaaagggcggagcccgtggccttaaataggatggtgatgcgccagagatgcgcggtttgagtgttcagagattggttgtgctactgaaggcggcggacgtgggacccccggttccgtctcgggaagtaactcatctgccccctctttgaacacctccgctcacgagcgcagcacgtggaaaccgtcagtgatttgtgtctgcaacgtgtgtgagagaatggaggtgtgtgacacggtatattctcctgctctcggcggcccagccctcgtgactctccggtctctgtttcacctcccccacccctttctcctccaagttgggtgcctcctgccctgctgggtgaggagggtggggattgcaaccgagaacaccgcgtcctttctggctcccgctggggcggctcctccatcccttttcttacataacctaccacgcacgttaccagctcagatgccagcccgccacgacgctagaggtcaaaacgaaactcagtttttcctgacttttttatccaggcttctcgggcccggcgtcctaaattatctgattccaagcacggggaacagaatggggtaggtccctgatctcctaggttatggttttgtccagcttcagtcccttcatttgtccgctggagaagattcgaaagactttgaaggaggggagggaggcaagtccagagtttagagagtctcagaagtaactgggacgttactattgtcgttgcgccttgcattttgagagtacaatggagaggagagcagggcccaaggactgtgagctggttgaagataggacgtcggagagaccgcaagggggcagcccaattctaattagggtcccgaggatagcgaattaaaaaaaaatttaagtgagtttgtccctgccataattaccaactgcaaaaggcacattgttggacagaggtgtgggtaggggtgggtaggtgtgaatattttaagtctattctaagtagtttttgatattttaccttatgttttaacaatgtgcttattcttataaaaagaaaaaaagattctaaaacctcaacctcgtttccccaagcacactgtttcaacaccatacttaataaaataaaacaagagaattaccaatatggactgtgaataaacctgttgtctgtgggtgcccttctccagtcttctccaaactgcaggtttattcagtccataatgccctctaattcaattgtcacccacctccccttccaatctacgcttgctgcctctaaatcctggcgctctctttagttgtgactttagaacagactcatgaaggagtagatggtaaccagattatttcacttattatttattttatcttccaatttcctcttgccagactcccatccaaagagtcatagcagccttcttccacctaaaaaagcagagaaagaaagaaaataaaaggagtcaggagacccgagaaaccccttcatgccccccacactctatggaaactccccagatattctgagctgggattgctctgtgatagctcctgggaaagatgtgtgtgtacccctctcctccacagtcctttcacctcctgctgaatctctctatgatcaatggttatttagcatcccaatttaaaaattcttttcctataatacggctttctcttcccttctctcccaccgccctgccatacatcagagaaccgccatccgttctgcctctgaactttgcctcttgactctaccaggttgtaagacccacccactttgccctctggcattcgccatgacttgaaacgtggccaggctggaactagctttgattgttcagacattttggaagcttggagaagtattcccccaaccccatcatctatctgctctaggagatcctgaagtcctcttagttcagaaaaagtaatgactcatcacaaaagtctgcctcagcatctcctaaacttctttaagactgaataagaagatttttctaaatgtgatccctcttctttcattttacttgttattttttgagacagtctcactgtgttgcccagtggcaacagtacagtggccagatcatggctcactgcagcctccaattcttgggcttaagggatccttccaccccatcccccccaatagctgggactgcaggcctgtgctaccacacccaactaatttttatttttaatttttttaacgtcttgtagaggagttcttatttatttatttttaatttttttgtagagacaaggtctgttgctcagcctggacttaaactatgttgctcagcctggtctggaactcctgggctcaagcgatcctcccacgtcaccatcccaaagtgctgggattatagggatgagcctaaatctcttccttcagtggctgataattgaccaggctggaaacactaactagagatactggtaagaattacttcggtttagtgtgggaagttaaaaaatattatttcacagactcccccaaagccagtggctgcactcttaccttctacatgaaatacatccccacctgaacaaaggcacacgacaggaggaggggaataggacttcgcaaactggacacggcatcgttcagatctggactctgctaaaataccgacatccccacacagtaggctggtgtcattcctcctaccacttctctgtccccctccagaaagactgccacctctttacaacaacctctgtcttcctttcctttgggcttagagaaagatccatccttccccatcactgtaaggagtccttctgtgcctttcagctatccctgaccataccagggaggccaattcaattcaattgtttctattttttatctattatgtgcattatactatactagtcactgtgctaggtgctatagaaagggacataaatatgaataagacaagattcctgtcctcaaggaatttacaatctaaagagagtctactctatattttatttatttgtttgtttatttattattatttttatatccaccaggctggaatgcagtggtgcaatctcagctcgctgtaacctctacctccagggttcaaacagttctcctgcctgcctcccaagtagctgagattacaggcacccgccaccatgcctggctaatttttgtatttttagtagagacacagttttgccatgttggccaggctggtctcaaactcctgacctcaggtgatccgcccacctcagctcccaaagtgctgggattacaggcgtgagccactgcgcccagcctactgtatacttcaaaaagaattaactgcccttattgtcaatctttcacttccattcttactggcttctttcatctgtgctcaactatatgcaggctgctctttggtcctattcccctttccagccgttgcttctctttttcattaccagattttttagatggttggtctgtactcacctccctttcctcataatgtactcactctttaactccacaaaaatctagcttttctccaagcactcagttaaaactactttcttgagagttacaagtgacctcctcctccttggcctcttggtagcttttgatggattatattaaactttctcttctagactctataatacaaacttggctatctgcctacttctccagtcaaatccttctccattccattcattaatttctcttcctcccactcactacaggcacagtcactggccttctgagcttgtgtgtactggctctgttgagctcatttactttcatatctgtgactttgcacttagaactctagccctgatctagttcagtgacctttaggacaccctcatagggctgtcaccataaactcagcttggccattaccaaattaataacttctgtcctaaaccactctggcctcccatagttcccactttggtcaaccattttcccagacatccatgtttaaaacccatgagttattttaactcactcctcatttatacttcatataaaattatcactcaagcaaggtattttcttcataatatttatttttctcctctccattcataatgccagagtacagattgtttctggaacaacgcaaatctcatgagttgctttccactaaattatttacatcctgcatacaacctgaagagtggtttttcttttttctttttttgagatggagtttcactcttgtttcccaggctggagtgcaatagcgcgatttcggctcactgcaacctccgcctcccaggttcaagcgattctcctgcctcagcctcccaggtagctgggattacaggcatgtgccaccacacccagctaattctgtatttttactatagacagggtttctccatgttggtcaggctggtctcgaactcccgacttcaggtgatcagctcacttcagcctcccaaagtgctgagattacagtcgtgagccaccacacctggccggtttttctaaaatatcacttttcatcgtgtttttaccataatgaagaacttactaggctccttgttgattatgagtccagacttcagcctgacacctgagactctctgaaatttgcccctatgttgccacatgtgaaattactaagcaagtattaggagccttgtaaattttatatttttcttaattcccactgttcccttccatataccctctccttcaatcataccctatttgctaaacatattatgcttgttctattcccccctcctgtgcagctctttcactcttttttttttttttttttttttttttttagatagagtctcactctgtcgcccaggctggagtagagtggcgtgatctcggctcactgcaacctctgcctcccgggttcaagtgattctcatgcctcagcttcccaagtagctgggattacaggcacgcaccaccacgcctggctaacttttgtatttttagtagagatggggtttccaccatgttggccattgaactagccttgaactgctgacctcaagtgatccgaccaccttggcctccccaaagtgctgggattacaggcataagccgccatacctggcctctttcactcttggaataactattcttcctcctaattgcttctgtccttccataactacccaccaatcaaaagctcatctattcttcagggtgtatctcaagcacaaatgcctcttgaaagcttttcagacaactctagcctgtactaatctctcttcttacattggctaaagcactgccagtatcttctgctttcaaatttatatataatttaacatcataacataccttttcattttgttctaagtgtttcgtaaacttgaattttataaatccttgaggacagtaacatagatttcttttttatcagcatcagttaccttagcagccttaggcatagattacatacctattgaatactactgaactgaaatttaactgtaccatatcttcccagtgttctgtaaacagggttagtattaaatcttagtgaaacatggccaagttgagatgaatacctgcaatgaagtactaattatttggttctcccatccaccaaagcctggtattccagccctctatgtattccacgtcactagggatgtcctgtctccccccagcccccaatccccaatcaactcacaggttccgttgttactggtttcacagttacaggcttcggatggtctgcacgtgctgtttcaagactaatggtagtctctattgcttctg

SEQ ID NO: 96559 - DNA, 40210 bp, Homo sapiens
gattttagttatttcttgccttctgctagcttttgaatgtgtttgctcttgcttttctagttcttttaattgtgatgttagggtgtcaattttggatctttcctgctttctcttgtgggcatttagtgctataaatttccctctacacactgctttgaatgcgtcccagagattctggtatgttgtgtctttgttctcgttggtttcaaagaacatctttatttctgccttcatttcgttatgtacccagtagtcattcaggagcaggttgttcagtttccatgtagttgagcggctttgagtgagattcttaatcctgagttctagtttgattgcactgtggtctgagagatagtttgttataatttctgttcttttacatttgctgaggagagctttacttccaactatgtggtcaattttggaataggtgtggtgtggtgctgaaaaaaatgtatattctgttgatttggggtggagagttctgtagatgtctattaggtctgcttggtgcagagctgagttcaattcctgggtatccttgttgactttctgtctcgttgatctgtctaatgttgacagtggggtgttaaagtctcccattattaatgtgtgggagtctaagtctctttgtaggtcactcaggacttgctttatgaatctgggtgctcctgtattgggtgcatatatatttaggatagttagctcctcttgttgaattgatccctttaccattatgtaatggccttctttatctcttttgatctttgttggtttaaagtctgttttatcagagactaggattgcaacccctgcctttttcagttttccatttgcttggtaagatcttcctccatctttttattttgagcctatgtgtgtctctgcacatgagatgggtttcctgaatacagcacactgatgggtcttgactctttatccaacttgccagtctgtgtcttttaattggagaatttagtccatttacatttaaagttaatattgttatgtgtgaatttgatcctgtcattatgatgttagctggtgattttgctcgttagttgatgcagtttcttcctagtctcgatggtctttacattttggcatgattttgcagcggctggtaccggttgttcctttccatgtttagcgcttccttcaggagctgttttagggcaggcttggtggtgacaaaatctctcagcatttgcttgtctgtaaagtattttatttctccttcacttatgaagcttagtttggctggatatgaaattctgggttgaaaattcttttctttaagaatgttgaatattggcccccactctcttctggcttgtagggtttctgccgagagatccgctgttagtctgatgggcttccctttgagggtaacccgacctttctttctggctgcccttaacattttttccttcatttcaactttggtgaatctgacaattatgtgtcttggagttgctcttctcgaggagtatctttgtggcgttctctgtatttcctgaatctgaacgttggcctgccttgctagattggggaagttctcctggataatatcctgcagagtgttttccaacttggttccattctccgcatcactttcaggtacaccaatcagacgtagatttggtcttttcacatagtcccatatttcttggaggctttgctcatttctttttattcttttttctctaaacttcccttctcgcttcatttcattcatttcatcttccattgctgataccctttcttccagttgatcgcatcggctcctgaggcttctgcattcttcacgtagttctcgagccttggttttcagctccatcagctcctttaagcacttctctgtattggttattctagttatacattcttctaaatttttttcaaagttttcaacttctttgcctttggtttgaatgtcctcccgtagctcagagtaatttgatcgtctgaagccttcttctctcagctcgtcaaagtcattctccatccagctttgttccgttgctggtgaggaactgtgttcctttggaggaggagaggtgctctgcgttttagagtttccagtttttctgttctgttttctccccatctttgtggttttatctacttttggtctttgatgatggtgatgtacagatgggttttcggtgtggatgtccgttctgtttgttagttttccttctaacagacaggaccctcagctgcaggtctgttggaataccctgccgtgtgaggtgtcagtgtgcccctgctggggggtgcctccgatttaggctgctcgggggtcaggggtcagggacccacttgaggaggcagtctgcccgttctcagatctccagctgcgtgctgggagaaccactgctctcttcaaagctgtcagacagggacatttaagtctgcagaggttactgctgtctttttgtttgtctgtgccctgcccccagaggtggagcctacagaggcaggcaggcctccttgagctgtggtgggctccacccagttcgagcttcctggctgctttgtttacctaagcaagcctgggcaatggcgggcgcccctcccccaggctcgctgccgccttgcagtttgatctcagactgctgtgctagcaatcagcgagactccgtgggcgtaggaccctccgagccaggtgtaggatatagtcccatggtgcgccgttttttaagccggtctgaaaagcgcaatattcaggtgggagtgacccgattttccaggtgcgtccgtcacccctttctttgactctgaaagggaactccctgaccccttgcgcttcccaggtgaggcaatgcctcgccctgcttcagctcgtgcacggtgcgtgcacccactggcctgcgcccactgcctggcactccctagtgagatgaacccggtacctcagatggaaatgcagaaatcacccgtcttctgcgttgctcatgctgggagctgtagaccggagctattcctattcggccatcttggctcctcccggaagttttttttaacctagtttgcaaagagttttttttttttattttttagccattatggtggttgaattttatcaaatgtttaatgtttttgatgcatagaccaagaatgttttttctctacgtggcaaattgcactcttagatttcctaatgttattttacccttgcactcctgaaacaaacacaacttgatcatggtctgtcatctttttttaaaaaaaaaaatgctctacttgtattgctaatactttatggttttgtactattcccttgagtaagcttgacatgtattttttatttttcatactattcttgtctgagttttggtatcatggttaagctggtctttaagaatgacttgaggggtcatatagtcatatatagtcaatagaaagagtcaatactcatacatagtcaatagaaagaggagtgtctttctactggaagagtttgtatgtccttaaaatggcccatccctgaaagttcaggactcagaaaagccttccaacactgcttcctttccatttacaagtgttgagattctaatataggaggtcctcaaataacatccttttgttccacattgttttattgtaagatgagtggctggggcctctgtctgcatggtttgcattctccccacatctgtctccacatattctggtttcttccacatcctaaggtgcctgttaggttttctcgtgtgtctaggttgtcccagtctgagtgagcattggtgtgtgagtgtgccctgggatgggatggtgtcctgtccaggatgggtccctgccttgcatcctgagctgcagggatcagctccagccaccagtgaccctgaactggaataagtgcgttggaaaatcaatgaatacaaattgtaaaataaaggtttgtaaagtccacgataatcatacaaatgcatgacaataaatgatgtggtgcctaagcgctcagcgagcctgccatgtttctgattgtttttgaactccgcggtggtaggaggtgttcctgacaattttctttgtaaaggatatgtacgcacattccatgacttagcccaccaccatgaccaccactagtcactgacgaaaaattgggtaattatctagtttttattactttcttaaatgtatgtttaggtcacatttatttcaatgtttaattagaagtgttctgggtctttatttagtgtagtttttgtggccagaaacattccacaggaacttaattttgcttacgtcaattagcctatggtaaaattggtttgattattctgtttctcttagtcgcagtttccaaaaacctactgatgatccaaatgaagacttaccgtacaggaaagcctaattaacgtctcaccgtgtgcttatttcttacacgtgtctgtgcctttcttcttgtcttttggatatttttgtttattccgattaccctttctacaaattaggagtgataaacaccattgacttttagctcttaccataaaattttgtcagagatacttaaaaacttactatcctaatgcctcatctgaataaaaggatcttggggatgttaaaactaaatatggcctgagaaggactccgtacttctgtatttgagtccttctgaatgaactgtaatctagcttgtcagacaaaattgaaaacctagtttaggagtatgtgcctgtaacaggaactgaatcttggccaatctcagcggccatacttcaaccactgctaagtgttcgaattgtgttcaaataaggcaccaacctgcaagcaatccagctgtttatctcactgccgatttctgtacatcgtttcctttttttttggtctataaatcttcttccaccacgtggctgcacttgagtctctgtgaatctgctgtgattctgggggctgcccaatttgcgaatcattcattgctcacttaaactcctttaaatttaatttggctggagtttttatcagggacaatttggattacccttcccaacttacttgctaatgttcaatatttagccttgtaactgaccaaattagatactgtttgccaatatgttgtgtcacctctaaaaacaacaaaaatttgaagtcctcattaaatttggagttcttttctacaattctgacaccaactatattttataaatatagaaactaatctggcaaatcaaatggtgaggcttaaagttcatcaattatatgaattaactaacagcttttgcaaaccttaaacacactactggccttcacataaaggggacagagaggaacacaatcttcataatcttcatttttgggtttctccagtaacctctaatccaacctccatgctgccacctaagtgatttttctaaagcactccaatacgtttccaaactaaccacagaacaaatccccaggtctttggcatgttttaaaggtctttcatgatcaggtacctctcttgcttttcatcctcaaactaccatgctccatccacatatattatattgctatgctattgtcatactttgtgcctttataaatcatgtaattcttactcattctttaagactttaatgtcactgataaatctttctagactctctcaggtagtaagatactcccctcacttctcgtgttttcttagcacttggtagtagaagtattcatagtagatgcttgattcagatttaccactttttatgtgacttacatcttggattctttagtgaattaggttacttatcccatatagttgggaaacatatacataaaactagcctctacgaattagtgcaaggattctaaaaacattcacttttatatatacctttgaatggccaattatgtgtgaggccagggatctataagatgaataggatatagctcctcttttcaaggggctcataggatagcagaaatacaccttgttgtggcatcacattgtatcaagactactcattcaataattattttctgaatgaatggtcaacatatataaaaaacacaatataatcttaaaagaagttttatgggtatagatttaagaaaaacaaatggcaacttccagcaactggtatcagattaaactatagcttacattctgtgtttaaagacataaatctgtctgttcatatgttggttatgacttttacattaaaatatcatttaaacgaatgagcaatcagtagtataaacagagttacaactaaatttggataaaaatgttcaataattaactctagcacgtatacaaaattagaaagcctatccaagcacttagtaaaacacagaatatttgkcatatccatagtttattttaaaaaactgttaaaaactaaccatacaggtttattaatatacttaaaaagtttgttccctatsttgaagtaaaatacattagcaacatcttccggacaccatctttataaaagtaaaacttctagatcctgaaatgtactacagtagagtctatagtttacacttttaatcacagattggaattcattctccttactcccctacttcccacatgtggcagttattacttcaaaattaatgacattcactcatgttatactaccacagatccttaaatagagtacatactgcataattactaacagagccagtcttctctatttgttgtcacatatttcatataagcatttgacttaaagtacaaatagaaatactacatcccataattgtaaacattcaccaggagcttccatagtacagtaagtaacagaggtggcccaagagtcagtcaagtgttcttcactcactggatactgctgagattaggaaaactgttttgaaggcaaattatcctaagtcttacttgtatttctataaggatgcagttctggatatatactttcagttgaaaacacctgaaagtcattctatagtctacattaagcaccactttcacttacctgaaatattttgagttaaattcagcagtatgtacggttgttaatatcagaaattaagaataactgtgggtctcaagttcccttttgtggatacatacagagtactgagttcccactgatgctaataggaaccgctcatgcataccaagggtagtaactcccccagggccacatgcaacccccaagtctgaggcacaactattacttctgccagtggatgctatacaagcatatttaaggctgtattyggctataaagagttcaacctactctttaatattctttctatgtagatcacatacacaattcaaaattttataggacaggtgaaaagtctccaaacactttttaaataccattctccatacaatttattgtcagcatatttacataggggagtgttcacactttaaaatgcaaccacaattttcaaattgttgtcacaatttctccaggattaccctcattctcattttccgacttttggccagcttcacatttgtcagattgttcattgcagttctcaggcaattctgatgttgctctgaaggagaataaaagttaaaagtattcactgccacccactctgggacaggcttggttgcaaagaaaatggtgttcctggcgctgaaggataactaggaaacccatcaggctgagctggatagctttccagagccgaagctgaatggacctgatggaaagaagagcgtgtggtttagcagagtgccaagttcattcaagcctgcgcttgcttctacccatgccacacagagatattcagaataggaaagaaagacaagacaaaactctgaggcacaataaagtctgctcagtcacttaaaatttttaagaaaatgttcaaatttcttcaggtgaaggagatgcatagaactgtcattaaaatatttaatattctctcaaaagtcaataggttttctacagataatgtgctttaacggtcaatcattaagcttgaattacagaagacaagttaacatttaactgtcatgaatagattcttaaattttatcaagtgaaatctataagcaggaaggaaaaacaattcatacagatractatatcctaccacctctgttactctcctgaaagaagacaagcaaaatttgcaaatttggagagaagtaatcatcatcaaatctctatgcattctgctaagagccattttttgccaatgttgggatatcgcaaatgatactgcaatgttatcactacagaagttagttatacatgttaccatgtaatttatgccagccattgctgcttacctgctgtaacaatgctgactgygcagccgcattatgctgtaattcttgcaaggatgattgtgaaggattctgaggaaacccagggatacccgggagggacaaaaggcctggaaaaacagaactscctgcagcttgaagtccagatgataaactaaaacaattgacagaaaaacaagttaactgcagacaagacataaaagctactgtttccatatttgtcaaatacaatcttaaaatgttaaaaacaaaacaaaaaccttagaatttattcctctgttggaaggaccataaaaatcagccattccctgatatgaatctttctactgtgaagtatattattcgaaattcagtaagtctgttttgcatataatcctttctgctgtcttataaataaaactatcaaatacaaatccaaacattgtatcaacaggcattaatattttatacatttatcttaacatggttcataaaacatttcwgagtgctaaagttttcacccagaaaaacatcatttagattttgacattcattttgatgacttgaaatgaaatgtgaactacaagttaggtgaagaataattttatcctatttccaaactatccacatacccggcttgtgcaacaagagcggwgttgaaattggaactgaatgctgaggcgaatcctgggaggactggagctggggatggggctgtggcagccacaggtagtggtgtgacagctgcgactgtagagggcgcctgcagccccgggaatgargkaagagcaggggtaacgcttggggtattagagacagaaaagcctggataggagggatttgaagatgacagaggtccttgagtaacagagaaaagtgagggaacagcagtggacaggttgagggggaaaggtgctgctgagactggtgctgaagcagaaagccctgagagaacagctgccgttgagctrggatgagggagagatgtggaggtggcagcggtagatgagrtggctattaatgaccctgggagagatactgacggattaagagatgggttgccagttaaaggaaaattgttggtcaaagaagtaaaagaaggaagagcagtgaatactggtgcaatgggagtggaggaaccatgtggtggaagggaaatagaggaaagaggatttgaaccatttaaaggagtactcaagctggagagacctgacaatgcaggattaaggcaagcagataaactgatgggcacggatgttgaagtatatgcacggcccaatgtccctgacaaacctaaagtgccatgagagggattcccagaatgagatggacctttgaaggccgagggagtaggacttgtgggctcagttttgatcataacaggaagagttgttgcagcaggggtagatgaaatatgcagatctgaggtacctgggtgggggccacgcaaaagggaggctgaggagccacagctaactggcrctgacgtggaagctgatgcagcagtggctaaaggagactgtacaggcaatgtcaggggagtggaagttgagttagccacgggagayggcaggcctgggaacagggccaaccctggagtggaagtcctctgtggggtagggatggctgatggggcatagcacttgttaggggctgaagcagaagagtcmgagttctgaagagtaagagaagayagtgaagccagcccacttgtgacagcagaggataaagcagaggagttgattaaattggtgtcattggatgtcagaaaaccttttaaygcagacaaaagaggactgttcacaccaagtggaccggcaacgctgggagtagagccaccagcaattacaggagtcgggttggataggccttgggatgttggtggtaagggcaaagggagccctgcaaaaactgatgacaatgaagcagaatttgggttgctggtagaagcagcagaagagctggtggaaaaggggaggctagtgaaaggtgcagaagtagaagcaaatgcttcactggaaccaagagtggaccgtggtgtaggtcctggggtaggagtggctgcggtaggagtggcagaaggacctggcagtgacactaggccagaaaaaatggaaggaacaggagtggtggttgtactgtggatggatgtaacaggtgcagtgggcaatgaaggggttctgataactgttgggtttggtattgatggctgaggtgtgtgaacggctgaggagacctgccctgggaacacaggaaggacagtattcagcaggttcattccagaaacggtggcagctgctgatgctgatggatgattaattgccttgactggggatgcagtaggaacaggagttgcagcaggtgttgaaggattagaaccatgaggagaaaagagttgacttgctggggtggaaaatgctatatggaagggggaaaaaaggcaagaatgtatcatcatgctgaaacgtcaaattttgaattaaaaagcataaccatttttgtaatatttaacaaataccaaataaaaaatgacaagtataacaggctcttgtaatatctaaattgctgggttccatttctcagatctttactctggagccagtcagatccagttttcgtctagactctgctcaaaatagccctccaaatcacaggaagttttgagaagcttgcgaagtgtcctttcatgtttttccgctttttaaaaattaaagcatttattttaattgtgattagtgctgctgcactgactttacctctaattctttcaatctacttatctagagtcagtcagtccccctcataggagctttcagaacatggcttcccttgcagggccatacaaggctttccaggattcatgcccagctctccagtattgtttgttgccactctgtgagttgaatttaatattccagattgttcatctgtacagytgccccgccccacccccatacatttgctcatactgaccgctctacactacattaaccccyaacccttacctggcaactcctttaggggcaaaagctgtgtctaattcatctttatagtcttagtacctagcacagaacacagcacctgcatagttaatgagygtctgctgggctggatatatcataattacctcaaactacagttcccaaacccactcaaggactattcccaacactatttctagagtttgctatttttattctgataaactctacaaataataagcattttgggggatgatgtgggctcccctctgaatgtattcaatggctatccccacctgtgataatcttggtgtcaagggatatcatgacttaggtagctaatgtcataaacacaactatcatctgatastgtactcacatcaaattctgtttcagttgtagagaatgttcctgttgcagtgataaccaactgagaaatattttcatggactaacacattttacaatttatgtataattaagattcttttgacataagcaagctgacacggtcaacgaatacactatgctactcatagatgggaagggacaataggaagaaaatggaggtaaacaacacatacataattcatttgcactatgtgaaggccaaggggtgtcacattgggctgaacaaattttgtagttgttttagaaaaaaaaaatgattggaaaattgacagtcatatttaagtacataaactgaaactcaaaagtccttaagtcttgaccgtattaatgttgtaagcagtgatttggtttcaataagactagctatcattttaaacttacagtacctataaaaatggatttgtacgttttttgtacttaatttcttttataagaactaraaggataaggaatatatacctaatcttatgtttgtaaataatgtaccaaaaaggtatttaagtccataggtgttgggtatcatttgagaaatcactatcttatttattaaactatatgctgaagaccatgtagctaatgacaaatctgaaggtaaaaccaagctatcctagagtattatttatagcagcctctgttggatctttttatttaataaagcaaaagctatgcattattaatcatagcacttgcaggtaaaaatgaaacgaacaaaaataaaaaaaatcccaaccacataccataataaacagcactttccagtcatctaatttggttattaaccataaaacatgatctgtcaagccctgtgctaagttaggcccatcatttcacttgtcctcacaataactctctgagatagaaactaacaccctcatttgacagatgggcaatctgaggcttgctatgactaagcaactggataaaagatcatgcagctactacatggtggagccaagacttgagcctgggtctttcagactcatgtctttaactgctatactagtttgtcttaatttgtttcttaatacagttccaaaaggaaaaaataaaatcttaatcatgctaacatcgtacaacataggaaaacaatatgctattcctgccaatggtacttacaacaactaacctgattactcccttcaaaaacatttgaacataaaataataaagatgaacataaaagctgaaatttcctcaatctccttttcactggagttaaattacctgttcaaggtcacaaaactaggtgatgccagaggcaggataagaaactggatgtcctgacatttcacttagtgttctttacaccccactatgctacctcctttagaaactaccagctgagaagcacctgctaggcactgttctcagggaatggaattctcccactgagactcctaactatgtactacaatggtcaggctattgtgctactttgctaaacaagaactgatgtagttttgtctcatacaagaaagcctctccttcctgaccacacagatcatcacctaggggaaaaatacaacgtcgcagcactgytgccatctggaggcactatgtaggacacacttcattttcatttttcaattccattttctgctttggtgccccttgttctttyctacattaagatatgcttaataatacttattgaaataatgaactctaaaaatagaatctgactagcatttgtcaaaaaggatttttatcatcccatgtgtttatatcaaaaaacaaatgaggtttccagtatcacagaatgtaaagtgaatgtgaatgcaaagctacgcagtacttacattacactgcaagttttgcaaattgtataaaagtcctaagattaattttaaattcagttaacacgtgcatttcatgttatgtatataatatgtaacactagtaaaccacttttaacaagtatgaattatattctttaaccagaaacttttcctaaaacataaccattccaaatatactcaaattattctcagtgaataacagagcaaaccatgacagatatccrttatctctggatcaaatttgctacttactttgattctgtataggttttgacggattcgaaaggtcttcattctctatataaaaataaataaaagttcattttaaactttaatcaaatatttgccaccayaataaacagatatttggataaaaagaaaaacacaggatataaatatttatggactatgttaggaaaaaaatgtacacatatgggaaaataaataaaaatagtagtaactctactattattactactaatactttactactctatctgaagagcaagaggattaccagaaactgagtgagtgctcttttatcccctagcatctctaccttagcttgtcaagttttaaatacacactgttaattttacatatatactatattcaagaacactttctggaaagatgctggcctgagggtgccatccaggagaaagtgtaccctgcagctgtagtgcagagaggaccactatcattggctgacctgacagacagctcctctgagtaccagtgcctacaggagtgggaagactgagaagcgaggtggcagctggatgaataagtgtagaattcgctgccattcactgtggattgtccaagccaacagaaagaaactgtcctgcccatttgctgtactcagcttgggaaaggccctatattaggaattaccatggagaactagcctagttgaggctaacttgaagcctgtgagactgacaacccaaagcacactcctcaagggaaaggatctatccaaacagcccatcagccaaggatacaaagggagaaaaatttaacctcttatggcttgacaataactgcccaagaaaccaatactgtgacaggcatacagtgtaaaggaaacctccacgccctggtatagtgagcaaagaaaaaccacagcttgtttgaggaattcacgagcttgactgaggtgacaaaaaataaccaccagaacaatggagatttaattaaagaaaaaggacttttaaaacccgacacacacacacacacacacacacacacacacacacacacacactactgggaaataagcagagaagacttttacatataaaaatctgattccaaattaataaatggaaagaataataaagattagaaataaaatgactaaaagttaaactatggttggaaacaagaaacaaatatcacttagaatgccaaaaaaaaatttttaatggaaaagatgtcataaatgaatgggttaataggcttagaaagcaaatacagaaaatgtaaaataagagtagcaggaggaggggaaaaaaagcagaggaaaatgcaacaattaaaagaataacgaaaacaaaattttcctaagctttaaagacttgagttttcacatcaaaagaacttacagaatgccagaaaagattaatgacaagatacacacctaaacatactggtaaaatttctgaaatccaaagataaaaaaaattctttgtaagcttacagaaagagaccaagttcccaataaagaaaattatctggaattaaatttcccatccacaactctatacatgtgtcctttctgaagtaatttcttacacgtcattttctaccaaaagaaaattataacaggcacatcaagacaaagaatcaaacaaacagaagaaacagtaacaagtcatgatcaaaggcaattttaaagaaattaaatatcagaagcaaaaatgtctagtatcccaacaaaacatacaaattgattttaaaaaggagaggtcgggcgcagtggctcacacctataatcccagaactttgggaggccgaggtaggcagatcgcctgaggtcaggagttcgagaccagcctgactaatgtggagaaaccctgtctctactaaaaatacaaaaaaaaaaaaaaagaaaaattagccaggcatggtggtatgcctgtaatcccagctatttgggaggctgaggcaggagaattgcttgaacctgggaggcggaggttgtggtgagccgacattgcgccactgcactttagcctgggcaacaagagcaaaactctgtctcaaaaaaaaaaaaaaaaaaaaaaaagggagagaatatggaagtaaaatgatatatagaatagttttaagtttttgtatactgacaaccattaagaataagaaggtaatcattggcgatattagagaaaatttctaagtttgggtggggtcaaggagagaacagttgttaaaaaaacaaaatggcaatttgaccaatacaatttagcaaaaggtaagaaaaacaaaactggaatagaagaataatgaaaataaaaataaaatggaaggactaagaacaaatgtgtaatttttattattaataaaaattcctattaaaagtctaacaggtttaaaaataaaaattcagctatacacaatttacaaaccaagccaatctaccaaataaaatcataggggaaaaaagtttaaaataaaggtacaggcaaaatattttttatgaaataaaaataaagtcaggacaatattattactgaataaggcctaggaaataaagaaatattttatagtaagactataactcagctgatattattttatatctatctagaaaactcaagagacttaaaaaaaaaaaaaaactagagagggtaattagtaataagcacctagaaatgaaacattctatttataattgcaaccaaaaatatctctaaattctatagacagatttaaggaacagaatctgcatgtagaaaactacagtatcttcttgaaaggaataaaataaaccctggggaagaaaacactaccagcttgacgtgatataaagatatatacacataactgaatggtaagacttactatcataaaaatgtcagttcttctgaaattactatatagctctctctctgtacacacacacacacacccctgttgttttaagttgcagaaaatgatcttaaggttcagatggaagatttctaacgataataaaaatacaaaaatatataagggggagcctgccttatgaaacattagaacacactacaaatctggtagtaaaattagtatataataataaaataactacagtggaattttaataaagaacacatcaaactcatgagtaaaacaaacaacaactgatataaataaaaattaattttttgttaaaaaacacaaacaaaaatgtaagctaaattagtctaccagactggcaaagttaaaaaaatgaaaatcttccatgttgaaagggtgtgaagaaactgtagcctcatatactcttatggacaggtttaaactggtatagggtttttggagaatagtttgacaacatatgggaaaccattcattgttcatatcccatgttaccaaaagacccactgaaaaaggttggcctggcaagtgttggggtgttttagtccttctcactgcttttttatgagcccttcctctccatggtaggcataatttactcaaatggtggcattcattaagtcaatgatacttctccatagcacgtcaaagttttaccactcatgagaaatagttctttttcccataactagcctgtgtttacatatgtgacccaaggccacttgaatggagtcttttatgtcattagcaaagtaaatggggagacaatcatgccaactggccgtggaacttaggctacagtgggctgaattccagctcctgccctacctctgacaggcacgggatacccaattcaccccctccccaagtaattactcttctaatctgcatgtgataaactgcctttgtgcagagtattctttgctatcccgctgtcaactccatacacagtcatccatcaatttcagtttctgacagttcctttgctgagtcagaaaggtgcctaccctagtgtccaaagattcttaataaaagtttagaggcagaaagtcccccagctctcttcaatctggcacttaataaagatccttgaaaaaaaagttgatactttgatctctcttgggttctctgtgcacaaattctagcatttcccaaagttgcttaaagaaccaccagtaggtcattaaaaaaaataaaaataccaggcaccccctatcacaatacactgaatagaatctctacaagtggggaactaaaggtatttttttwaaagtgctccaggtagtttcaggctacagagaaaccacctcactgttgctttgtcattcctcatatttgattatcagtctgttttcacctgtttcttccttaacttaattcaattaaatggcagcttcattattgggtcaacaacctttaacagtatattatgcaagcagctcacgtttaatttagtggggctgatttggatgcctctcctatgagtttccatagcaccctaaccctatcacagcactgatcattccaacgcatctctttgaatctaagatgccacttgctataaatcacattctaatttcagagaaattaaactataaaaaatgtgcaattgagaaccaataatgtagaatatattgaaatggccttctctttcctcatctgtattttttcactagactaaactctttgcaaacatgactctttgtgcacctctgtatccacagcacacaacacatgatagggtcacctaatattcattaaacatgttactgaacagatgctattaaaatgttagcctatattacaaatagagaaagtgaagtccatcaagactatgaaaactgtcccacattaccaaggattcacttccagatccttcagactcttgagcttgtgttccctctgttagaatacgtcatgccaaacaactgtccrttccaagtgtacatttgtatatgaataagttacttaaacacccccaaataacattttacctgttcctacaggattaggagtatatggaggtggaggtggagctatgacattcgctaatggtaccagacctgcattgttataagcacctaaaataaaaacacaatagaaaaaaatataccttaggactgttctgtgactggtattgttctgtgactaggagttcaaactatattaatgcagctattcaatttattataaaaactcctatttaatacagttgattttwtatggaggtttatgtctagagttaagtgaaaactgacaccaaatgaaacaaccagagattcctatttcccactgcatgctcattgcagggataagttcagtgaatggcatggcaggcagaacctgctatacttacattatttgtcttttctgccaaacgcatatacttgactttttraagttaaatgcatgaatgatgcctctgaactaccaactaccaaaaaaaggaattcaagatgatttaccaaagtgaaaacccataaataatgaatgactaaaaataatctaattaatttatcataaagaaaatatcctaaataaactatctgctgcagtgttgtaggccaggacactactagctaactatgggcataattaagctcacagtagcatttcataagtgctacagatttgccaaccacatagaccagcatttactttcaatttaataaataaacagcaaaaaagaaaaacaagtaaaaaataagggaactccttacttggtgcaatagttgcatgtggtcggcatggaggtatcggataaggaacaggtttatgtggattatatgttgaaggaggctaaaacatgggggaraatacagcagttagaagaaaatcaagtaagctgtctcctggcaacttgtctttcaaaatatttagtcctaatatgctaaaaatgtccccgcatatcatactactggactacatgggacracaaatgagggaaatttctttgctttaataaatgtggttgctattaaattccaaatgcagatcttgccaaagatggccatagaggtggccagagatttttaaaatcatctccaataaggggttagatctcattgtaaacagcaaactcctcccaggcccagcctaagttaaaccaagaattcctgtttcctcctacataacaaagacaagaaaccttctaggttttacaatctcaaattacgcaagaactcccaatggcaacatcctcctaaactgataggaattcatcctctcattcccaccctctttcctccttttagaagaaaaaagcactgtttgcgttagcatttggcattctgacaactccagtagaacatagactggaatcaggaattcagtatgttagttgttctgccttttgaaatccataaatccaccaatacttattttacagttgatggagcttacctaagtaacaaaaagcattcaaagcactggtctttagaaaactggaagtatctgaagctaagccagatgctgtactttttacctacagagagagcatgtgcatgcctgtgaggcaggggaaaggacccactggtggtaagggagccagattctttccagctcccataattgtggccctatctgaagtcttgtgcaagaaccatgatctgttactattctgccataaacaactccactggagttcttgtcatgtggacaggcaggttttgcaaggtggttgtatgcaggcctctagtacttcaactccaaagatccttcaacccatggggttgtcttctcctgtcctgtttacattgcaatcattataatcactatcttgtaaatactttcaacctgtgacttcactgtggtttcactaacactaattcagctaaactacaaacttagttaaaacaagctctccacactccgtatctccaactgagcagctgaatgcatctcgagaaaaaaactgaaagcaatttsactgattctactttaaaataaaaagctyaatctcaaaggggctcttactactgttaaatatttatgtttccctcatccattcactctctcactctcctacaatttctagaatacttcaaactttgcaacacaaaaataaaatttatgctttgagtaaaaaggaaactttatgtaggaaggagtttgggcttgtttcatcattttctaaacatactggtttrgatggcccaagaattcgtgcagctattcctttgccttcgttagtacattcttcaccatcttttttcaaaggagttccctattaaaaaaaaaaaaaaaggtaattgaaacttaaaaaaaaaaccctcaaaccagtaacaataaccaacctcactgtattacactgaagaaaaggacttggtaagagtgtaaagacttgcattcccatttcagttctgcactggctggcggcatgaccctgataargtcctcaatcctcctatgctatggaactctcatatcacatgcaaaggtactcagaagtgaacatgaaaaacacagagaggatgacaggaaaatataaggtatccacagggactggttctaggacctcccccataaataccaaaatacatggatgctcaagtctcttatataaaacagcatagtatttgcatataacctgaacatatccacccatatactttaaataatctctagattacttataataccgaatacaatgtggatgccgtgtaaatagttgttatgctgcattgttttactgtattattgctttttttcggaatacagtatgttctgatttttcttcttcacaaataggagcaatcagaaatgaacttccaatgccacagtatgtataatactcaaagaataagagtacctatgttacagttgaaagtagataagaaaaaatggtgttctctataaagattaagtgtgattatttatattgtcaagggtaaatgagaccttattcaagactgttaaaattaacagatcagaataagttgatagattattgcagtgtgtcatcgccctaacactgtgtgtggctaaatggtatatactagtgtggaagccaactcccaagatgtcccccactgatcctcatctcctacctgcccttgcaccattccctcccagaatgaatggggctgacctgtgtaacacatgggacattgcagaaaggatgrcatctgacttccaggcagcttccacttgtcttctcttgcttggattacttgctctggtagaagccagctgccatgtcatgaggacattcaagcagcattacaaaaaagtctttgtggtggacaacaaaggactcctgccaaccaccaacactaccttgccaagcatgtaaacgagtcaccttgaggccctattcttgggctccaatcaaattttcagatgaatgtaacctcatgaaaagacctgaaccagaactatccagctaagcgttccaatattcctgacccataaaarccatgtgaggtaataaacrtttattgctttaatccagtaagctgtggggttgttatgcagctacagaaatataacattctttgagaaagctgttttacaaagaggtttgaggaacattagatgatataaaaacaagtttcttttttatagtacttctcagagcctttatatgcgattccccaggaaggaaacactgtatgcaaagtttcccaaacacacttcactgagtgaaactgagattgtaagaatactgagaatttgagaactgttcctttactaaatgtaaatcagtgcttctaaagtactttgaaaaataaaatcatcctctcttctatttgtcttgttctatagattttatatagatacccttaatactttaatgaagtttagacatgaactttcaatcagtggtgagcctgtgaattaagttaccgacataaaattcctttcctttaaatatcattaacttattctacacttcatacttaaccatgagaagtttcatatacagctacagaagtatgcttactgggaaaattccatttatgcggctaggtcttcctttgggatatggatttcctgggattgttccacaagaagatatcatagcatgaggagctttgcagccccccttgaaagcctgtaatataagaaagaagaggggtaggaaaaaaattcttaaaagataagtattctgaacattgggagctcagctaaaaaaaacatgaattaaagaacagcactacattcaatctgctcatacataattcagcacttacagtggtgaatgtgaccaaaagtaataaaatcactttatttaaatggaataattaaaatggttaacataataatgctgcaacagactcatacaaagaatgtcttcacagtagattttgtaaattgtgtaaaaaagtgtttattatctaatctgtcccatttcttcaactagcaagaaataacagttcaaatctacaaatgccaaggtcatgttacatttgaggaaaggaggacacagagatggaagaaacatggtccctgctctttacaacccagtggaggacatcataaacaagtaacatgacattgggtggtccaaagacctacataccgttcaaaaaccaacttagacaatgttcaacatactattacatatttatgagaaatagtgagggaagggatttaggtctaagctgtttattactgcatcctcagcttctaaatgatgccgcacacacactgagttggtgctcaatacatattaataaatgaaaaaacactgtattaggcaacatatattccaatgtatctatattatgttatagaaatatccagctatacatakgtgtgtgtatatatatattcacaagtatgtacaatgtattttattatatattggttttataaatcccttcacaacacatatatgtatattagctatataacccagcccctctactaaataccccaaccctgaaatcatctgaatttttggctataataaagagtaccggggtgaatgcccttatatataaatttgtatatttcaacatttccttcaaataaattcctaaaagtagaaatttggggccaaaaggtataaatattgtaaaggctcttcaagtttaccttctagaaaagttgtactaatttatattgaccagagggcccactctacagaacactcaggcccagaatatttctgagaaggaaagtgacacgatcggaacacttcataagaaagaaaactacagcagtaatatgcatgttgccttaaaggttttagtcaagaaaactggtaaggaagttactgaagtaaataaacatggctcagatcttaactcttctacaacaatgtatgactaaggtgaatttgcctaccatccctgggcttaaaggagtttgtgagtattaaatacaactgaactgccaggctcataattaattaattaattcagcttccagacatcgcaatcctaccttagaaataactaccttagatgacaaatcaagttttctagggttggacaagtactatttctcccattcttacagatttttaactaataaactggaattttaactaataaactggctttaatattgacctcttatgaatccgatttaaaataaactggataacaaagcaaatttgaaaagttaagttcctaagtacatamagtttaaagcaaaaacttgaagccatggcaaaggtaccaagggaccaagacacaaacatttccatgaggctcaagctgagtggccaactgacttctcactctcaagccatctcctcccccttgaatgtccccatcaaccagctctatttccacgccgcagaccgcagggatgttcatttttaacccattgtacaacagcattcaagttattcaccaaagttagtaagaagaaaggtgctttttcgtcttcaatattcggaaaaaccagcgtaccaagtacatgacaatctttagaaaactacctgttcaagtattctcttgcaccgtttcttctcagacatatttaccctgaataaatcttcaataggacgagaattctgtgcatcaataatgttcctaycaagaaaacacaatttagctttttgtttaaaaatctgaacatacatcgaggtaagcaacctttgtttaccacacaaacatctgagtaagcgttctccatgacatagggagaaaagtgtgactatttacttttaacagctcaatttaaataacatgtttatatataaatataayaacttaggtttatctgattactgaaaagtaaaacagtaatactgcaaataaaaatcattattttgagatttttcaaaatatactttcttcagtgatagttaggagagctatgccaatagaaccaacccatgtgttaaatgcataaaaatcattttatgctaaatgcatagttttatcttgtgctttaattttgtgcttttatggacacctatgcatacaaaaaggacttaaaaatgtatgtgttacaaataaataacttatacattcttcagttatgcaaaggagtaggttctttccatgtctttttgagcttacattcattacggtcatctgtcaaatgctgtggtaggtgctttcacagactttctgatatttaaagttcattaccctattaagtgggtatgagccttatttttacaattgaggcaaataaggctcagaaaaaataagcaccttgccaaaaaaaaaaaaaattattgtgtcagtaagtgaaagaatctctaattcttaaattcctgtcttttcagagtaggaaggcaaagcaaataactgaaatacaaaaaatcaaattaaacaatcttgttaagccccttcattttataagttatagtcatatatgtaataagtacactagatacttattcacatttggaaatcagaatgtaccactatgcttttgactgtattttgttagacacattaacacacactaattagacacttaaaacgcttctacattttttcccaagtraarwaaaaaaaaaaaaaaaaagaaatacttacgaggctaacagttcaagagcaactagtttgtctttactgaaagtgaaacagttgagtatattgaccacttctgttggctgracagccaccattttctgttgatataaaaaataattttayttttaacgtgaaattttcatgccagaaattacctttttctggaagtacagttaaatgctcttaatataaacattttagataaaatatatcacattttaggtgaaaaccacttactcaaaagaaagttctaacaataaatgaattatgctctatcaacgtaaccatttcagttgaagatctaatgaagatctaagttctcctacatgctccttttttatccatttctcaatgtgttcagttacagaattaaaaaaatcagaagtattactttcctcagaaaggttatataaaaaggtgatactcatacacatgggagattaaattgttcaaaggttagaaaaacattactatactcctcagttagagggctaagtatgccacagatcagtgcttccatgatgttaaacatattacaaaaaaaggttacactagccatataaggtagggaaaagctgggttaaacaggtttctctactgcagaactttaagtcttattttaatttaatgtgcattgtgatgcaccaagattgtgtggaatgttacataattatttgactagagtacctttatttctgaagaacattcagaagatttggccaatttggacatttatgttaatagtgaaggaaaattaaaagcaacatcaacataagtaagactggttagaatcaatatccaagagctcctaaaatttggaggagtggttttcacatacttttatgtactaccagaagaactaataaaactataagcccctttgcatgtttttaaattgatacctaacaattttatcagaagtttaaatactcacaaaaggtcgattttcttaaatacatttatatatctgaaagaactttgaaactactaatttagctcatttatggaaatatttatyacgtaactcaactggcgaaatcagtcttcagtgagaaaacaatcaaatcagactgacatttttagaaaaggtcagacttaatttaattcaaataagtgtattgagttgtccctgtgatacccttgccacctctgaattttaagtctaaggcagggagacaggcaagcaggcctcagagctcggtcatgagtttgttgtcctgataaaataaagcaaagccctcatcaatattccccctgccgcagcctcctgggtagttaggactaaaggagcataccaccacacccagctaatttaaattttttatatttttctagagacagggtcttactatgttgcccaggcaggtctagaactgctggcctcaagcgattctcctatctcagcctcccaaagtgctgggattacaggcttggccaccaccccaagccccttatcaatatttcttacagagcctctctctttgctttgctctccctctcaagagcaaagcactgtccttttggaacctggagaaacattttcacccccagagaacaggtgcgataactctttcttttgcaaagcagtaaaaaagcaagtattaaagaggaggtcagaaagcagcactaacagacccagacactttcttaggctcatcagtttagaaagtcaaggatctgtaaattgattccactgaagatatccaggcctgatattgcttcaaaaatcttcctacacagccagatactcctgtgtgatccagatgctcctgttgacctaggttctagagctgtgctatccatatagtagccactaagcacatgtacctacttgaactaattacaattaaataaaattaaatatagttcctcagatgaggcacattcaagtggctaccacaatggacagtgctgatataaaaatttccatcatcgctgaaaatttatttggacagtaataactcttctaagactaaatagaaagatggtgacgatggatattaaaaaacagaagtgcaaaaaaccattaagaattcaaatcctatattttgcttgctggtgaagttttcttctaacttgccaatcgggacmctgtagcatacaatttaaatgtacagtttagaaaattttaattttttaacatagctattttgaatcaaagtacaataacacatagagttcgcttttctaatgcaaataaattrcaactgaaataaattacacacaactgggagaattaaaaatacttaaattctacgttctgaaggaaaaaataagttacttacatgctgtaatgctttcattgccttcaactggggctcggcccaggaaaaatatctcagcaaatcaaccacctgaaaacaaagaactaacagctctaatgacagcatgtttgcaaacatttctataagatttcagtacttgaaattataattcgacacgtgcagcccasgcccaggtgatacaggtggcattaaagtttaaaaactgtgctaacagaatagctattatatagttatatacatttaaataacttaaagtcaaataaaatgtaaaaatcagttccttagtgacacaagctacatttcaagtgctccagagctatgtgaggctgataactacaataatgcacactgcagatagagaacatttctaccaccacaaaaagttctactagacagcactggtctagaaagaaagaaaaatatacaatacagaaaaaaacaaagtatcctaataggaaaaggatggttgagaagtactagatggagatcaaatgtcagctcaggattataaagatggactgtgaatggaaaacctttcaacacgaggggagaacagcactcacaaaggcacagtggtatgttttagtgtaggtccactaactttagtcctagtaggtcctttaacttgaatctggagggcataaactcaaatcataaatctagtcccttaaaaatgttaagagtcaacatgaattactccagmagcccctaaatgatacatcatttgagagctcagagtgtgcagctcagattagctcccaccaccacctaagaacttcaaacaaatgagggaagcattatgagatagccagtaagaggggagcacagggcataaagatcaggacactgaagtctcagcatgatcaccaccaccctgtttgactgcctccaaagatgctccaaaaggggaaaaaagtgatacaagaagacagttcctgaaaatacgctaaggttccaattattctatacagcaaggtcaatggtgcaaactggagtggtatgtaaagagagtaaaaataatttttactccttataaagagatatatatatatagcaaataagtattatgtatactttccagttaatttgataaacgtctatgtccttaactttgatgggaataatgttcttaatatctaataaatgctatattttaaccaaccataaaattttacaagccaccatatctaagatacaaagaaaaatctttaatacaataagctcatttagaaagtggcttaataaactttgtaatgactttagcaaagtggaagcatcattaagggtggtacatcacatacacccaagaaaaaaaatgctattagctgtaagaaattatatatctttttaaaacatttaattttttttttttttttgagacagagttttgctctgttagccaggctggagcgcaatggcgcgatcttggctcactgcaagctctgcctcctgggttcaagcaattctccagcctcagcctcctgaacagctgggattacaggcacccgccatcatgcccggctcatttttgtatttttgtagagatggggttttgccatgttggccagtctggtcttgaactcctgacctcaagtgatccgcctgccttggcctcccaaagtgctgggactacaggtgtgagccactgcacccagccaaaacatttaaatttttaaaagagcataaagtaactttgtaaagcaatgggaaagctgaaaaactgacataaagacaacaaatgcaaatcataaagtagcttttaagaatttagtgggcagaacttctataggcttaaaagtcatttaaggtttcaagttttgaagttcttgagaaaccaatgaaaagctggaccatttactaactcaattggagcatttactaactcaatatatacatttattgtccatcctttccccaagctgttctccagacatttctattaatatttatgcctgacttctctatcaagaattttccaactatccctcagaaacatgcccccttgtgtgtgtgacacacatatattttaattagcaaactgcccctaaggtggaatgaagttttcactaaactatcatgcttaaaatgttagtattctggcagttacagaaactacttattaaataacactgtgtatttttcttactgttgaaatttttatttagtggcttcatataaaaacatatttcattatttgttcacattttcttttatattacatgacgaattttgtaattgtcttacatgtaactataaaaatttgggtaaatttgccattacgagtctctaaatctttgatattgtgcccagaaccataaacactttgaattgctttaagaccctatatttaaaatcattttaaaacatgaattggggtgaaagtggagaggtgcttagtccctgaattataaattctgtagagttttctgccaaaactgagagcttctcgagttcttgaataaatacagcaaaaaggtaaaaccaattctgaattcggccagcagacagacattaaccagaacattggtataaaaagaaagctttgtttaaacaaataatgaggaatacctgttcactagaaaagtatccatgcacatattcaattgcttttaatttgtattctgtcaaaacagcctaaaaaaaaaaaacacacacacacagagtaaaacagcattaatatacgtaagcagcacagtaatatacatctatcaaaactgcccaagcaactcaacagtggcaggtctacttcagccctgtcattcagaggaactaaggtcactgtggtgagaggcccttccttccatctttccaggttccatactgtgagggacacactgagcaagcaggaagatctgctgggcttccctaccaacttctacaaaraaagggaataaaattgtaatagatatgattcaacatcagtatacacaacatttagaattcctaaatatgtaattaaagagtttcaaaacattccaaatccaaattgtcatttttaagattaaacatatcagatgttactcattcatcaattattgaatatctactatgtgctaagtgacagagaagcaagaataagacaaggtctagttgaggctctcagtatttctatagggacataagaatgcaagaagtcctgaattcaatgtctgtgcctgccactaactggcagtgtagactttgagaggcattttaattccttttgagcgtcctcattcatagagggaacaccattcaccaacctcaaagaattactatgaagactataatagtggacattagatgtgacatataacaggtattcagtaagtgatggttcctttccttttcggaatctatcagtgggtgagagagaagttggtggctttgatgcagcactatctagagcccactaaatcacacatgctccccttgcagctatttgctcagcttagagatggaaacagctatcttaagtcagtagccactaatcattaaaaatgaactaatccctttgcttgtactataaaataattttaatattcatatttttcacatatatcattctgctaggagaaagtattatgaccagtcaactgaaatatcctgggtgctcagtagttcaatattcactgaaaagggagaaaatggcattctaaataatgtattcctaggagttttattatcaatgtaataatcggacacagtcaaatacaagtttctgaacaaagtcttggattgtactgatgccaagtcatatctcaattcttccatcaatgcctgagaggcccagctgtaaccccaggcaggacagcatggtgctctgcaagcatagtttgaatactgcccccagcccccaacttaccacctagggagtcttgagctgatagttaacctcacagagaataggccaccagctataagyaagaagtacagtgcctacacctcatgcgttgtaaggagaatcaaaacaaataatgactggagaaagtgcttaaaaacaggctcacaaagtaagtgctcactaattaatagctatcattccctcctttttgaataatcagttaaccattgctttttccccctttctactccctttcccagttcttctgctagtggcttcttatatgcctctgttttaaatgacagtagtgacaatcagtattatctatcatataaactcactgtgatactcaagagatgacctggtttaaactgacttacatttacaaagaacgatttttaagaaaatcagtagtaatgctcatatttagatatgccaatattttattccattttaatagaccatgacaatgttgatgtgtctaatcactcggcaaagccagcagaagatatattttaactgctgaccagaaatacagacttaagttgccatctcatgtgaacaacactttcatatctggaaaatttcctattcccctctttagaatttactgtgacgtttttatgacaccaggaagagaatatgcacactgagaccctgtatcttccaaaagtaaaaatctgctggtctacttggactcaccaattattttctcatgaaaagtaattaaaaatcagcccaagaacaaattgtgacaaatttctaggcatataattagcaaaccaatattttatttcaaaaattaattggacacttaggtttgcaaaagcagaacttgttcaaaaaagaatgttcagtattatcaaatatgaaaacttaaacacgtcaatttgaaaaaagaaaaaagctgtataaaaacaaagcaaaacagcaagaccagagacaattttaataatagctttgtaaactgaaataagcaccagagcacatggcaacaatttcttccgtttcagtcaagggtcgtaaaggtatgcagctgacgaaagaataattgcccggaaggccgaaggaaagcaccgtgtgttgatgtaacaatggtacatcaagtccttacattttaaaataagtaacttctcggtatttttgtgcttgagatattgttaggctcaagactaccttccagaattgttgctgtctggttcactctgggaaatgcgatccacacaacagcctcaaaaagcagcaaaaacttggaaagcaggagaaaaaagttttgaagctcaagttattgacggccaattcctaagaacgtgactttaaacttaatgccacacttaccatcaggacacgaattttgcatggccaacgcaacaaatatactctaccttatgcttagatttgaaaaccccatcataataactaccataaaagaaactttctgcgtattacctctcgttttcagtcactcttgtgttactgaaagatgaggcaataaactcaaaaatattaaaccccttacccaaaaagtacagagctattacggatttgtaaagccggctttggaaccgagggctttacaaatgtaattcccacgacaccgtgctgagtctcaaatttggcgttaaygtaacttaatttctatttgtactggaaacgtatcaagatataaactcctccattacacgtgaraattcaaaccaatttggcaatcctaggacccttattctgcacaatctccatacagtacctcaaagagagtctaaaacacgagaattcatctcataaaataattcatggaatcggtctaattacctttctaatttcatccagcaccatttcaaaggactttttatccatcttgactactatcccgacgtggttttaacagttatacttgcaattaaaagacgttcatccctggtctgctccgccgatagtaaaaaatatttatagctgaggaggaaaaagactccacgagcaagagaggatgcgaagaggtagagagtattgcaaacttcgcaaaaaaaatttctaaaaattgagattcagaaaaactctttttattaaaaagaaaaaacactccagtcaggcttccccagcttattcacacaatggttcagggcacctcgggcaagagccaggtcctctgagttttgcagaaaaacccgggctcggcggcaggtttgagtgcggtttccctgcagctgagggccaggtgccgccagaggtagctcttgaaggcgctttcccaggtggagcggccggcagagtagaaacacctgcgctcagagtccacgggcggcggggagggaggcgccggtctctcgacccgcacctgcgcctcggccgccggccgcgaccctcaccgccgcgaacccggacgcatggtccggctcgcgctcatccccagccgctccgcccgactcctggatacctcggccccggcagcaggcggcccggcaggctctttgttaccagctgctgcagcttccgggagcgggccggcggctggggagcaccrggagccgggcgaagaggggcacggcctcgcatagggggactccggaaaaacgcagccccaacagcgccagacgccctgcctggttacccctacagcccccaccagctcatggggacctacaataaagccagtcgcgcccaagtaaactcaacactgcgccgccagcttgggcccctctttcctgaaagccagaggtggggtcctggtgtgggaatataggcatccatagcggatgcctggatggtaggaataggatgtggcaaaaatccttcccgaagcctagcggtcattattttgaatgtcatccccaccatacctcgtgtctgagtgtgcgatgttttgattttgccctctggattaaaaagaataaatggcgagcgattaaggcatatctacgggcgcccatactttggtggccactgaaagtcagcggcgcggactgccctgagggcgggaaagggtggtcactgggtcagcccgaagcacctgacatgagggcggggaccccgaaatgcacacgaagtccggaactggtcttctgtgattttcattcgccctggtctctgttccctttcgtactcaaagctcgtgcatccagggaggggaaaccggagatagggtcttcgggccccgggcagaccctctgtgccgctgcaaaccgttgcagcctgaggctgtcaggtcctcccccagacacctgcggaccctccctctcctggcttcccgtctggtcatggcgagattctgggtctgcgtagccggtgctggcttctttcttgcatttttggttttgcattcgcgtttttgtggctctccagtgagttgggtagtgaggaaatgactgtcgggtgtgcgggtagccctgttgggaggcgtcgccacggtcgtggcatggaggtggcaggccctggttccctcagtagcttgtctcaaagcctgcacctgggtccaaactgccttgaccctttgagtttaaaaatttgtgtatgttacatcgccattttcctctttcccaactcttactacatcctcaaataatttgcagacttgtattgtggtcgtgttggtctttaggcatctaagctcatttctttggaattatttcagtccagcaaacttctagttgtcaaggcatgcttaaaaataagccctgttacccggcccccccgccctttttttgttcttacctagacggtaaactaaatctgaattgtctgattttgtttaaggttttgaggaactttacttttgcagtttcctggagaactgagaaaattctttaccggctggatgtgggttggcctaagcacccagaatattttaccggaacaacattttgtgttgcagttgactccctcaatggattggtttacataggtcaagtaagtaaatagagatttaaaaaaattatgaacacaaaggaagtaacagccttcctgtcttgctgtagtaactgaccatatgcgtttatatcatgctaattgtgcaatttatttttgagttggtctcaagtattttggtttcgaatgtgaaagatatgttagattttgaaagtggtttttgtagtaaaattctcagttattttttttcttcgccaagatacagattacctttcctttaagctgatcctaagaagttattttttgtataccttcagagaggggataacatcccaaagatattagtgttcacagaggatggatatttcctacgagcctggaattatacagttgacacacctcatggtatatttgcagccagtactctatatgaacaatccgtctggatcacggatgtaggaagtggtatgtatagtaatatctattaaattatcttactggaaatcacatctttgcacatgtccttgtttgtattgtttaaaatcagagttgctgaatctaattgtaatttctttaacgattcatgaaatcacatgtttttaacaaactttattttgtacttctgtggaattaagaaatttaacaagggctggacgccgtggctcacgcctgtaatcccagcactttgggaggccgaggcgggcggatcacgaggtcaggagatcgagacgatcctggccaacacggtgaaacccccgtctccactaaaaatacaaaaaaaaaaaaaaaaaatcagccaggcgtggtggcgggcgcctttagtcgcagctactggggaggctgaggcaggagaatggcgtgaacccgggaggcggagcttgcagtgagccgagatcgcgccactgcactccagcctgggtgacacagcgacactctgtctcaaaaaaaaaaaaaaaaagaaagaaatttgacaaggagcctgttaatatgatctttccttgaacttgtctagggtcttttcctctttaaagcatcagttgctcttctcagattaaataactctaaactgaagccaaataaagtggcagtctctgaaagcaatgactggaatccttgactcttattttccttttccagttttctttcataaaagattgtgaaatcgtaactgctttgttgctcaaagtgcaaagattgcagaaactgttgttaatgtttttgaaattctactgactgaagcatgtctgaaatcttcctgccatcaaatatttttagtagaaaaagctgaaaaatgaagtgagcacaactgaatgtgcagctatggagaaagttttcagagaaacaattcacctgtggctgtagcttaagacaaggcaatacctgagatatcctggcattaccctaggaattcaggaagaaatgggattataaagacattatttctagtattccttggcccagttatgttcttgaattgagagacatcctggttctacagtcctggctgattcagataccattttttagagataatgagttctcagtttctgtaagtagtgccattatcacagctgttctcagaacccataagatttctgggcctcagctgatggcccatttatttcatgctgtgttttacatagtatgaatctggttcaaccaaaaaaagtctatagattatcactgagtgaattgttaatactataatgagagtctattttcacttttttcctgaagatccactgttaaagaccatttctttgagttcattttattcatgtgatttttaaaaataagacttccttgattcccagaaataaaaagagcacagacgatctcttcattttttccattacagctaattttctacccagagatctgaagacagttttatattcccatttcccaaaggaataaatttcctctaatgaaaaatatggctacaaattagccttttttttttgagaaaattttttattggtagtcttttttgctagtttttagaaacttggaggcttatgtgttttttattgctatgaactttagctcaactgtctaaaagtgtaatagtaaataaattatttaacatagaattgtaatgcaagctgattcactttctttctggtaagctcaatgtatccagtttgtcttttgaatacctatcaattaatttggcatatgtaccttcaaattgatttctgttcactgctttatgatattcccttattagtagtctgctttatgctcttgcttgtaagataattttaacttaaagaaattttaacgtgagaaaataagatactcatgatttacaaagattattttcttcttagcaaagaaaagttgggttgaattttgaatgtctccacaaggtgaaaatgcagttaaaaaaaaaatctgtaccatagagaacgtttttgttgacttactgaaatttaaggtctgtatgtgagtgattgaaataacagtttcaaatataagttgttccctttacattttcttcttgatttcctttcataagcaatgcttattcaaggtcataagattaaaaaagaaaatggtgcaccaatactttgttagcattctgagtttcctgtataatgagtcaattatggggatgttatttatttgaatttagaatccgcttattttggactaatggagattttaattcgtgatcaaatttggctgtaatttacgaagaagctatagtgcttgtcaattatatgtaatttcctaagcctatcacctatttgttattatttacttctatcaaatttttgctcttagcttacttgaaaaatctgaatgtttgtatagtggttttatttgtgagatgtacatatctatctttataggattctttggtcatactgttaaaaaatacagttcttttggtgatcttgttcaagtcttgggtactccaggcaaaaaaggcactagtttgaatcctttgcagtttgataacccagcagaattatatgtagaggacacaggagatatttacattgtggatggagatggaggattgaataacagattgatcaaactgtcccaaggtacattacttgtttatggtattataaaaatattataaattgattttaatttgttcgatatttggtataatgttttaagtgttgtgtatgaagcggtgtgtaaagagctaagtgtattactacgagaaaactgaaaaacagatgggtatgattgcccacaataaatgatcctgataacaggcccacttattcttcaccaaaggccaggagattcctccaaaagtaactggcaacagtatgagaatttctagtgggctcaggagataagtgtgtatcctatttaattaagcatgtagaaattagaaacctagaatcccagactcaagtatcctacaggctgattaatcagcaagcattttattgagtgccctttctgtgtcctctctagtatcaggaggtgcagatctattatgtattgaaacaatgaaatgtagtctatgctattgattcttaaagcaaaatggacttaggaggagaaactaaattgcctggagaaatagaacaagatatcatgaaggaagtagttattgaactaaactagttttggtgggaggagaggggaggatggatggaacattcatggagggtttatcatgcatggtctacaggcatttattagcaggaaagaaggtgaagatgcactttttcagcagcagaaaatacaatttgggatgtttctgaagtcttatttgaggattattaaagccatgtttttgcctataacatttttgaggttttcctagtagaaaagtgatgttacaacagcaggttttataagacattcttttaggatctacttcaagtgagctctgtcatttggaggctgtgtagtcaatttatcaattagtaactgaatttggttgataacagttgaaagggaaatgtagaataaggataaagcaagaatccaaaaaattgaatgaaagaaacaacgaaatctaggagacagattgaatataagtgtattagtttcctgtggttgccataacaaattgccacaaactgcgtggctttaaacaacataaatttattctcacagttttggaatccagaagttagaaatctggtagactgtgctcactctaaaggtcctgccttgccgcttctagtttctggtggctcaagcattccttggcttgtggcagcaaaactctgatgtctgtctccatattcacatggcggccccttcttctctgtgtgtttttgtgcctccagtctttcccttctttctcttaataaggatttagggcccaccctaaatccaggatgatctcatgagatccctaatttaattttatctgcaaaaactatttccaaatagcatcacattcccaggtatcaggagttaggacttggacatctttttaaaggaccacagttgaacccaccgtagtgcgtaataaaggagatagacggtaaaatcataatgtgaatttttaaggtctgtggaatactaatatcaagtaacagataagttgggaaggggaaccagttttagggagaggatggcataaaccctaaacaatgattttgaagcagtcatgaaaaattcaagtggagataataattaaagaagtagattaattccctaaagcagagaaggaactttaaaaaaaaaactgtaagaaatgggcaaatgggcatatagacaggaaagccgagaaagcatagtcaagtgaaccagcggtgtaattaaatagttctttgtaacctgtttcataaaatatgcaaatgcatgagacattctatatgttgctctgactatat

SEQ ID NO: 96560 - DNA, 31374 bp, Homo sapiens
  misc_feature (1)...(31374): n = A,T,C or G
tgagctaccacacccggctgatttatccttttatttgggctcctttcactcagcgtctttaagcttcatacgcgaaagatgcttcagagattcctttttcaggctgaatatctgctgcgtggctaggccactttttgtttaatcctctctcctctggtggacaccaggactgtgctgttttggttgctgtaagcgcgggtgcacacgcctgcctgaggctgtgttttggccgttgtgagtgtgggtgcacacacctgcctgaggctctgctttgttgtgagtgcgggtgcacacacctgcctgaggctgtgttttgggtgttgtgagtgtgggtgcacacacctgcctgaggctgtgttttgggtgttgtgagtgtgggtgcacacacctgcctgaggctgtggcgcgatctcggctcactgcaacctccacctcccgggttcaagcgattctcctgcctcagcctcccgagtagctgggaccacacccaccaccacaccccgttatttttttgtatttttagtagagatggggttttgccatgttggccaggatggtctggaactgacctcaggtgatccacccactggcctcccaaagtgctgggattacaggtgtgagccactgtgcccggcctctttttactttgttaatggtgtattttgatagataacagattgtcattttcatgaagcacagctggtcagtttattgttgctcatgtatttggcctcatgttcgagtccctgtttttaatcatgagctggacacagccctctttagagcaactgtgaccacttgtggtgagaagtgcagcccacaccatccacgtgaggctcccatgcagacatttagaaggcgttttcactgcagctcagaaaatggccccaggcccccatgggcacccccatgtcaccagggcctctggttgctgccggtacacagggataggcagccaggcctcgaaggtgctgggcatgggtttgggtgtctgcgttgggtagagacccggagcgcccttgctgggcgtgccctaacatcccggtaccctgtgcccctctgtgggccaggacgcctggtgctgccagctgggcgtaagccctgaggagctgagggtggctgtgatttggaggatgagtaggagctcaccaggagggcgtggagccgaggcgtttaatatcatcaggagcaacactgggctcagaaggcaggcacacttgccgtccctccagagccatggctgacggccaggcctggtgggctctcgtgaggacagtgcctgtggttgtcagatgctgtcccttcgagtaagggatgagagccatcctgaagatgggtcagctctgtggtgaccacccgttgggagcagtgacattcaggtgcgttgcactggtggctgtgtggctgtgtggtacggccaccaggagccatgtgggcaaggacagctgtgggctgggcacagagctctctctgctgggagtcagtcggtgctggggcgaggggaggcagagctcacagagcccctctacagctcaccctgcagctcggccctggccagtaaacccaccatccccctttctgccgcaggaggcagtggagaaggtgacacagcacatccacggcctgtctgggaagaaggatgggctggtgcccatgttcatcaatacccacagtggcctcttcacccacctgggcgtattcacgctgggcgccagggccgacagctactatgagtacctgctgaagcagtggatccagggcgggaagcaggagacacagtgaggcccggcccgctgcccccagctcccgcggctcccccgttcccgcagccccccactcctgctgcccccagctcccacggcccccgctcctgctgccccccgccacactgtgtgtcaggaaaccgcagccgtgccaggcctggcccaggcatttatgtggagggcgtattcattcacctctcaccgtggcctctgggggggtgaggggggcatcttcactgagggccatgggctgtgcagggtggcaccttctgtccggcaagggccaggcctgctgtacttgtgtgggcccaggatgtgcctgtccctggtgccccacgggagccgatgcaccgtcctggtagagtgagatgactgctggtgtccacaggctgctggaagactacgtggaagccatcgagggtgtcagaacgcacctgctgcggcactccgagcccagtaagctcacctttgtgggggagcttgcccacggccgcttcagtgccaagatggtgagtgtgtctgcggggccttccggccgccgccccttttaccttggcttccaaggtgcctgagtcatgatgtcaaaaagaacaacgaaatcctggccatggcgcccacgtggaggccctgggtggaccgtggctgcctggccaggcctgtcttggcaacagggcagtaaggccttgtgtggcacctggggtgggcagggcttccccagggcagctccctccccgtgcccggtgtgtagcaggtcctcgggcggtgtgtgggggccgggttggagggcctggtccaggcagctccgctgttccatgccaagtgccctcgcgtggcctcccctcccagggtaccagggccgaggcagcgctgggctcccacgttggctgcccgtgcagctgcaggctgagggcagggcctgggatctggggctgaagagaccctctgattccaggaccacctggtgtgcttcctgccagggacgctggctctgggcgtctaccacggcctgcccgccagccacatggagctggcccaggagctcatggagacttgttaccagatgaaccggcagatggagacggggctgagtcccgagatcgtgcacttcaacctttacccccagccgggccgtcgggacgtggaggtcaaggtgggcctgggcctgggtcagggtccatcaggaggagggtgctggcagggctggccttgccctgagctctgctccgcccacagccagcagacaggcacaacctgctgcggccagagaccgtggagagcctgttctacctgtaccgcgtcacaggggaccgcaaataccaggactggggctgggagattctgcagagcttcagccgattcacacgggtgagcacctgtcctcgccccgcgtggtcacggccaccgggccacaggcacggctgggctgtggggctcaggctggctccgctcttggtggtggctgtgacctgggtccgggaggggcgggcttgccgcagcctcggggtggccacactgcagcttgggggccctggcatccccatccccactgagcttcatggttgtgggacccagagtacttggaggggctgggcacccctcattttcatttctcagggcctgtctagggagggtctctgctgtgggcccagcatccccccagtttaggaggcacacgcacccatgactggggcaccatccccactgtggaccaggccctgttttaggtcacgccctccacgccagagtgtcacctcctggctctgctgtgatcttggcctgaggcccccgctgcctccgctcccaccgtctgccctgtgccctgtgccctgtgcggcaactgtgaggccccctgagcccaggttctgggggaggcggtttctgtcgtggtcacttgagggttgttggcatttccaggtgggctccggtggaaccacacggctcgcctgggggtggccatcatccaggcgccctccaccctgagcttgcgctgggggccacattcaccatggggtggagagcgcttcggtgatgaggctgaggggggtgcagggtgccccccgtgtggtgacgaggccctggctgctgcacaggtcccctcgggtggctattcttccatcaacaatgtccaggatcctcagaagcccgagcctagggacaagatggagagcttcttcctgggggagacgctcaagtatctgttcttgctcttctccgatgacccaaacctgctcagcctggacgcctacgtgttcaacaccgaagcccaccctctgcctatctggacccctgcctagggtggatggctgctggtgtggggacttcgggtgggcagaggcaccttgctgggtctgtggcattttccaagggcccacgtagcaccggcaaccgccaagtggcccaggctctgaactggctctgggctcctcctcgtctctgctttaatcaggacaccgtgaggacaagtgaggccgtcagtcttggtgtgatgcggggtgggctgggccgctggagcctccgcctgcttcctccagaagacacgaatcatgactcacgattgctgaagcctgagcaggtctctgtgggccgaccagaggggggcttcgaggtggtccctggtactggggtgaccgagtggacagcccagggtgcagctctgcccgggctcgtgaagcctcaggtgtccccaatccaagggtctggaggggctgccgtgactccagaggcctgaggctccagggctggctctggtgtttacaagctggactcagggatcctcctggccgccccgcagggggcttggagggctggacggcaagtccgtctagctcacgggcccctccagtggaatgggtcttttcggtggagataaaagttgatttgctctaaccgcaatgtcgcctgtgtctttagggatctccatgactggaaagtctgggcggacgttggggagaaggtattcttcaagtcacgtctcagaattcggtttgctgagactggactctagctgtcccctgctggtgggcagggagaggccacggggaagctccgtgtccctggccccacggggcagatgcttggcgggaggcatccttgcacctgcgtttcacacagggcctgtttccctgcagggctggcactgaggcgcacagctgagggatacacgggccctcaggtcaggcagctcccagcagcctggcatggctatggccccgagccctgggctgtggtggcagagttgtcctcatcatcactctactgctgtccctatcccagggctgaccctgggccttggctgggttccccccgaccctgaaccaggtgacctcttaggaccacgccccctcgctctcccctgtgaaaaatccatcaccttcacttccggaagactccccttccctgggaagccagagccggtggcggcacagggcagggctacccggacccagcccaggattgccagctccgcccctcgggacgtcggggccccgagtgtgggcctcggctctgcctgtccccacaacccccaacatcccacagcagccacctgtgtccctctggggacagtgggcaccctggggcttcgtctcccacctcatgctgggccctgatcctgcactccaccctctgtgcctggaaaggtgagaacatcggctgtcatgtgaccctggcgcctgccccttgtcacggtgggcccagcacggccctagcctgccccttgtcagtaccaccctagcccgccccttgtcacggtgggcccagtgctgccctcctggaccaggtgccccatggccggctgaacgggcaggactagggcagcaggtggggcctcaacagccggaaaaggtgcaccttctccatctcacccagacctccgagactaacgtgctgggggcgtggtcccagagggtggagggacagcaactgcatgccccttgggggccaaaagcactgtccagtggcctcccctggaggggtcgctgtgtacagaggatgtcagggaaggagtcaccttggaggtgtggctgcagcctctgtctgctgcggctcagcagagcggggcttccttgcggggcactgccccccgctgccctaaggagcagacctgagcgttgtggagcctctaccttgtggagcacatggcatacccggcctgtgtggggtgcgccgcgtccccagccgtgtctccgagggtcccgctcccacagcctgtgtgtgggccccacagacaggaaggacgggacatacatggccaggcctccaggcgtttattcagccccttccctctgccgccagctgcttgagtgaagcccccactccatgaggagccttgaracccctccagtcctgtgctcaraggctgagtctgggccccccacgcagagctggctgctgctcacgcctggctgcctttacccactcgccgatgatggkggcctccagcttccgcgcctcaaccacggaagcaggatcttctgggtgggaggctctggggagcgggcacagagggggcccgtcagccccagccctcggtgagcctgtcccgcccgacccgcgaccaccgccaggccacctccctccgcacctgaggtcgaggtggtgcgctcccccctggatggtgacggcgatgactgaggcactcaggttcctccgaatctgtggtcagtggaaagaactccatcaggtgaggaacgaggcaactgcccagcctccgtgggcccattggagaggagacgtgagagggcgagccgagactcagtgcccatcaagcaaccagagagaaccagccagagacggaggtgggaagtgacgagatgatgggggcaaaaccgggtgagacaggagcagggaaggggcaggtgtgaggcctgtgatcccagcactctgggagtaagacaggagcagggtaggggcaggtgaggggcctgtgatcccagcactctgagggtgagacgggagcagggtaggggcaggcgaggggcctgtgatcccagcactctgagggtgagacggcagcagggtagaggtaggcgaggggcctgtgatcccagcactctgggggtgagacgggagcagggtaggggcaggcgaggggcctgtgatcccagcactctgggggtgagacgggagcagggtaggggcaggcgaggggcctgtgatcccagcactctgggaggccatgcggggaagatcgtttgagcccaagagttcgagaccagcctgggcgatatggtgagactgtgtctctacaaaaaaatatttttttaaattagctgggcatgttggtgagcgcctgtagtcccagttactgggaggcttgagcctcagaggtcaaggctgcagtgaaccctgatctcgccactgtattccagcctgggcgccagagaaagaccctgtctcaaaaaaaaaacaaacaaactaacggggtcatagggcccaggccaggactcaccccgccccctgcccaggggtccaggttcccgttggagaagatgatgttgctggcggctctaagatctgcaaggggcagagaaagttgtgatgtgggcccctcacgggggctgtgagccatgggcagggggtgcagagctcggggcagaaagcaggacgctggcccaccccccctcagccttaccacccccccagaagctggtcagcagccagtcgggccggggccacacgccccaggtgtccaggcagtaccgctggcggagctcgtcagtgaagggcaggtcggggaacatatcggtcacattgttgctggcgaaggtcaggttgatctcggtgcaggcctgcaggtgycccagcctgagtcaggccagcccacgcccacccttgcccccgagtggttccaggccacccacacccccacacctggtagtcccaggccctggcgtcggggccggtgccgcagccagtggggtcagcacagctgtggtagagccggtagatgtcgtagcagtgctcggagcccgaggcgttgtagaccagccctggggaggagaggcgctggggcccagcggccacacacagacacaccgcgggctccggccaccaacctgtmccccctcggaatggtcctgcaggggatctggggctctgggatctgtakgtcccagtgaggaaggccctccaggctacctgcttggaggtcggcggtgtctgtgctgccagccccgggcctgactgttgagggccccccsgctctccacggggcagggtgrggcctgctgccctctgttgccctccatgctggggaccccaggggccccttgggcagcacccaccaagctgggcctggctacagccagtgctgagagggtccccagggacggcccctgcctcccccagggtttctgggaaggtcgtgctgtccaccccaccacagccctggggcaggaggcaaagcccctggccgggctgcggatcctcgccccacccggccccaggacccaagccaagcctggggtctccacacttgcccatctggggccgggggaagggcacctgccagtgctcgcagccccgtgatcctctgggcctcactcagcagccgatcacagcccacctggagtgcaggggcagcggcgactcagcggggtcccctccaccagctccgcctccctggctcccaggatgagggtcaggccgctgaccaccagcctcgggacactccagccggcctctccctgcgccctgggaggcggcgcctcaccttgacggggttggcagggaggggacccaggaagtcagtggggtaggggtagtccatcatggccagcacggtgaaggcattccgggcgaacatgaagagctgggtcaggtccttctcgtctgacagcggctggcaggtgccgaactcccagcggaccgtgtcgtaggctgcgtggaaggggcagagacttgaagtttgggcatagctggcgctggggcgggtcaggcagtgggaggcggtgggaggacctcacctccctgtaggaacaagtccttgatctgtcggaacgcttcccgcacaccctgggtgcatttgggactctggccctcaaagtcctgggggaaagagaccgtgctgactgcagctgctgtcccttagggggcctggaggaccccaagcctcactcaccgccgtgacgtcccggaagaactggttggagtcgccgaggcctgccacagctagaacgggcgcgctggccgccagcgcccccgccaccaggtggggatacttcatcctcaggtaggcactgagcatccccccataactgggtgagggacacagggttagggctgctgcccccaacaccccatttcctcttttcctcctcaggggcccacaggtgccacaaggaggacgacacttctgagacccacaaattccaaccctgggccaggtgcgggtgcagctctcactgggaaaggccgctagtgtggccgcacatccaagctgagcaggtggctgggaggacaggtgggagggcttcctgggggaggcaacactaagcctggaaccactgcctgaggccttacgaaaaggcagcggtgggagtcagaggggagtggggagaagggctgggggcgctgggtcggggcaggggagggagggggtgcggaggccgggggaggcgcccaccttccaccgaaggcgatggcgggggcatcctgggccccgaggtcgcgtcgtagcgcgcggagcagctctgcgaagtcggccagggcctgctccaccgtcagcagctccgtgtgcccgcgctgcgtggactgnnnnnnnnnnnnnnnnnnnnnnnnnnnnnnnnnnnnnnnnnnnnnnnnnnnnnnnnnnnnnnnnnnnnnnnnnnnnnnnnnnnnnnnnnnnnnnnnnnnnnnnnnnnnnnnnnnnnnnnnnnnnnnnnnnnnnnnnnnnnnnnnnnnnnnnnnnnnnnnnnnnnnnnnnnnnnnnnnnnnnnnnnnnnnnnnnnnnnnnnnnnnnnnnnnnnnnnnnnnnnnnnnnnnnnnnnnnnnnnnnnnnnnnnnnnnnnnnnnnnnnnnnnnnnnnnnnnnnnnnnnnnnnnnnnnnnnnnnnnnnnnnnnnnnnnnnnnnnnnnnnnnnnnnnnnnnnnnnnnnnnnnnnnnnnnnnnnnnnnnnnnnnnnnnnnnnnnnnnnnnnnnnnnnnnnnnnnnnnnnnnnnnnnnnnnnnnnnnnnnnnnnnnnnnnnnnnnnnnnnnnnnnnnnnnnnnnnnnnnnnnnnnnnnnnnnnnnnnnnnnnnnnnnnnnnnnnnnnnnnnnnnnnnnnnnnnnnnnnnnnnnnnnnnnnnnnnnnnnnnnnnnnnnnnnnnnnnnnnnnnnnnnnnnnnnnnnnnnnnnnnnnnnnnnnnnnnnnnnnnnnnnnnnnnnnnnnnnnnnnnnnnnnnnnnnnnnnnnnnnnnnnnnnnnnnnnnnnnnnnnnnnnnnnnnnnnnnnnnnnnnnnnnnnnnnnnnnnnnnnnnnnnnnnnnnnnnnnnnnnnnnnnnnnnnnnnnnnnnnnnnnnnnnnnnnnnnnnnnnnnnnnnnnnnnnnnnnnnnnccgcgccggggctgtgccccccaacaccccgcgccccgcggccgctgcccaggggtccttcccgggcacggcgcggggaagcagatggcccccgggccatctccgcggcctcccgccccactggctcgtcctcctaccgcggccccatccggagctgcgctagggcgagtccctgctgcgcccgccaagcctccccagcacttgctcctggcaggtgccccactccaaggcagggccrggagagtgggggccgttctgctgccctaagggcgggagggagagggtcccaaacagagtgctggccccccgaagaaagcaacccagggtttgtccaagcgataacgggctgggcttggcggggcggggcctcgcagcgggcaggagtgtggggtgcccctggagcgtctgggcagggccgggatgtggccgggtagctcccaagagctgggaatcgccacctgcccttccgactggcacccagtgtgcccacacagccctgcagggacaaggggggaccagaggcctctgctgggagctggggcctcctccctggggagcacccagaggatggaagaagtcacctttccccagcgtccagttcagggagtgggtgagggggccgtagtggtgggtgccagactagctacgtggagtcctgctggggatgtacatgggccgctagccaggcccagaacaggtgcaggggcagcaggggctcagctacagagagttaccctgtccttctcccaagactaccctcggccagcatgaccctgccctgcccatcctgtgtggggctgagcggagaagaccggccacttccacagcccctcaygccatggccctcccgtgcctcacacagaggcaccccccatggtgggtgactggtggctggggccctcagcatggtggcagtgaccatcacgtcacactgcaacacgaggtcatccagggccacacaccgtccccaccacggccctcacatctgggccctgtcccatccctacgcagttcctggggctgcctgccggggcccccgcaggacgggggtgaggacaaacagcagacctccttggatgtggaggtaccccacggcgtcccccaccccacacctctgctcctttggctccctcgggtgccttaggtggccagaactccaccagcaaccctcacccaggaccgcagctctggagatgccagctaggccgagagctggccagctccccargcacaccagagcctggagacgctccaggcttggctgggcccacagaggggccagagcctcagggagggctccaggagcagggtttccaaggaagccactttccctcttgtccacggcccaggcattgatgccccttctgggcagcagccagggcctcccaagccgggaagggtgggcatggggctacccagcatggctctgccaggggtgagggtggccacagtcccctgcccacatccctgtgcccacagaaacatatgctgtatggaatcaaggtttaaggcatctaggcctgtgctggtaacctgtaaccttagccccatccctgtgcccacagaaacatgtgctgtattgactcaaggtttaggggatttagggctgtgcaggatgtgctttgttaacaatgtgtttgcaggcagtatgcttggtaaaagtcatcgccatcctccattctccattaaccagggacacagtgcactgcggaaagccgcagggacctctgcccaagaaagcctgggtrttgtccaggtttccccccagtgagacggcctgagatatggcctcgtgggaagggaaagacctgatcgtcccccagcccgacacccataaagggtctgtgctgaggaggattagtgaaagagggaggcctctttgcagttgagataagaggaaggcttctgtctccgacatgcycctgggaacggaatgtctccgtgtaaaacccgatcgtacattagttctattctgagacaggagaaaaccgccctgtggctggaggcgagatatgctggcggcaatgctgctctgttactctgctacactgagatgtttgggtggagagaagcatgaatctggcctacgtgcacatccgggcacagcaccttcccttcaagctatttgtgacacagatgcctttgctcacattttcttgctgacctctgctctgctgccgcattcctcatgcaaagatagtgaaaatggtaatgaataaatactgagggaactcagagaccggggccggtgcgggtcctccgtatgctgagcgccgtctcctgggcccactgccttctctatactttgtctctgtgtcttatttcttttctcagtctctcatcccacctgacgagaaacacccacaggtgtggaggggctggccaccccttcactggcacagcaacctgacatgtgaaggggcccaacttctgcaggaggaccccaggtctgcatcgccagggccctcgtcagcctgtgcagggcacagtaggtcacccaaggggcaagtgagcctaggctgcccatgcctgtgcagacacccccgatctctctctgcccatccccggagcagcacagacgggcaggttggctgcagagccaccagctgagggggtgagaggtccctgggcagggaatcctgggagcctggccagcaagggtgagaggctgctgagcccaaaccctcccctcgaggtccatctgccctctccagaccatctaggcagctcctccacaccccgattcctgctgggacacccagtcccaccctctatggctcacagactgggggccatgcccggccacacatcacgtctgtgctgtccctcagactgaaaggctatcggcgggcggctggccgtgacctactgcatccgcacttggggccgtgctggtctgtgtgctgaattatacataatataaaattgaccacttaaccacttccgcgtgtgaaatttggtggcattaggtacattcctgccttcacaacgctgtgcaccgtcatcactattttccactatctcatcacccccagtagaaactgtagccattaaacaatggaccccagcccctggcactcaccattctaccatctgtctctgtggctctgctgactccaggtacgtcatatcagtggaatcctacagcattttgtcctttttttttttcgagacagagtctcactctgttgtccaggctggagtgaagtgacacgatctcggcttactgcaacttccgcctcctgggtccaggccattctcctgtctcagcctccggagtagctgagattacaggcacccaccaccacgcctggctaaattttgcatttttagtagagacaggttttcagcatgttggccaggctggtcttgaactcctgacctcagatgatctgtcagcctcagcctcccaaagcgctgggattacaggcgtgagccaccacacccggcctgttttagccattgtgaatattgatgcgatgaacatggctgtgaaatgcctgcttttttttttttttttttttttttttgagacagtctcgctctgttgcccaagctggagtgcaatggcgcaatctcagctcactgcaagctccacctcccgggttcaagcaattctcctgcctcagcctcctgagtagctgggattacaggcgcacatccacatgcctggctaatttttgtatttttagtagacacggggtttcactgtgttagtcaggattgtgggtggcaagccactcaggtgccaaggcaagagaccgaggacatgagctgttgccagtataataaaatnnnnnnnnnnnnnnnnnnnnnnnnnnnnnnnnnnnnnnnnnnnnnnnnnnnnnnnnnnnnnnnnnnnnnnnnnnnnnnnnnnnnnnnnnnnnnnnnnnnnnnnnnnnnnnnnnnnnnnnnnnnnnnnnnnnnnnnnnnnnnnnnnnnnnnnnnnnnnnnnnnnnnnnnnnnnnnnnnnnnnnnnnnnnnnnnnnnnnnnnnnnnnnnnnnnnnnnnnnnnnnnnnnnnnnnnnnnnnnnnnnnnnnnnnnnnnnnnnnnnnnnnnnnnnnnnnnnnnnnnnnnnnnnnnnnnnnnnnnnnnnnnnnnnnnnnnnnnnnnnnnnnnnnnnnnnnnnnnnnnnnnnnnnnnnnnnnnnnnnnnnnnnnnnnnnnnnnnnnnnnnnnnnnnnnnnnnnnnnnnnnnnnnnnnnnnnnnnnnnnnnnnnnnnnnnnnnnnnnnnnnnnnnnnnnnnnnnnnnnnnnnnnnnnnnnnnnnnnnnnnnnnnnnnnnnnnnnnnnnnnnnnnnnnnnnnnnnnnnnnnnnnnnnnnnnnnnnnnnnnnnnnnnnnnnnnnnnnnnnnnnnnnnnnnnnnnnnnnnnnnnnnnnnnnnnnnnnnnnnnnnnnnnnnnnnnnnnnnnnnnnnnnnnnnnnnnnnnnnnnnnnnnnnnnnnnnnnnnnnnnnnnnnnnnnnnnnnnnnnnnnnnnnnnnnnnnnnnnnnnnnnnnnnnnnnnnnnnnnnnnnnnnnnnnnnnnnnnnnnnnnnnnnnnnnnnnnnnnnnnnnnnnnnnnnnnnnnnnnnnnnnnnnnnnnnnnnnnnnnnnnnnnnnnnnnnnnnnnnnnnnnnnnnnnnnnnnnnnnnnnnnnnnnnnnnnnnnnnnnnnnnnnnnnnnnnnnnnnnnnnnnnnnnnnnnnnnnnnnnnnnnnnnnnnnnnnnnnnnnnnnnnnnnnnnnnnnnnnnnnnnnnnnnnnnnnnnnnnnnnnnnnnnnnnnnnnnnnnnnnnnnnnnnnnnnnnnnnnnnnnnnnnnnnnnnnnnnnnnnnnnnnnnnnnnnnnnnnnnnnnnnnnnnnnnnnnnnnnnnnnnnnnnnnnnnnnnnnnnnnnnnnnnnnnnnnnnnnnnnnnnnnnnnnnnnnnnnnnnnnnnnnnnnnnnnnnnnnnnnnnnnnnnnnnnnnnnnnnnnnnnnnnnnnnnnnnnnnnnnnnnnnnnnnnnnnnnnnnnnnnnnnnnnnnnnnnnnnnnnnnnnnnnnnnnnnnnnnnnnnnnnnnnnnnnnnnnnnnnnnnnnnnnnnnnnnnnnnnnnnnnnnnnnnnnnnnnnnnnnnnnnnnnnnnnnnnnnnnnnnnnnnnnnnnnnnnnnnnnnnnnnnnnnnnnnnnnnnnnnnnnnnnnnnnnnnnnnnnnnnnnnnnnnnnnnnnnnnnnnnnnnnnnnnnnnnnnnnnnnnnnnnnnnnnnnnnnnnnnnnnnnnnnnnnnnnnnnnnnnnnnnnnnnnnnnnnnnnnnnnnnnnnnnnnnnnnnnnnnnnnnnnnnnnnnnnnnnnnnnnnnnnnnnnnnnnnnnnnnnnnnnnnnnnnnnnnnnnnnnnnnnnnnnnnnnnnnnnnnnnnnnnnnnnnnnnnnnnnnnnnnnnnnnnnnnnnnnnnnnnnnnnnnnnnnnnnnnnnnnnnnnnnnnnnnnnnnnnnnnnnnnnnnnnnnnnnnnnnnnnnnnnnnnnnnnnnnnnnnnnnnnnnnnnnnnnnnnnnnnnnnnnnnnnnnnnnnnnnnnnnnnnnnnnnnnnnnnnnnnnnnnnnnnnnnnnnnnnnnnnnnnnnnnnnnnnnnnnnnnnnnnnnnnnnnnnnnnnnnnnnnnnnnnnnnnnnnnnnnnnnnnnnnnnnnnnnnnnnnnnnnnnnnnnnnnnnnnnnnnnnnnnnnnnnnnnnnnnnnnnnnnnnnnnnnnnnnnnnnnnnnnnnnnnnnnnnnnnnnnnnnnnnnnnnnnnnnnnnnnnnnnnnnnnnnnnnnnnnnnnnnnnnnnnnnnnnnnnnnnnnnnnnnnnnnnnnnnnnnnnnnnnnnnnnnnnnnnnnnnnnnnnnnnnnnnnnnnnnnnnnnnnnnnnnnnnnnnnnnnnnnnnnnnnnnnnnnnnnnnnnnnnnnnnnnnnnnnnnnnnnnnnnnnnnnnnnnnnnnnnnnnnnnnnnnnnnnnnnnnnnnnnnnnnnnnnnnnnnnnnnnnnnnnnnnnnnnnnnnnnnnnnnnnnnnnnnnnnnnnnnnnnnnnnnnnnnnnnnnnnnnnnnnnnnnnnnnnnnnnnnnnnnnnnnnnnnnnnnnnnnnnnnnnnnnnnnnnnnnnnnnnnnnnnnnnnnnnnnnnnnnnnnnnnnnnnnnnnnnnnnnnnnnnnnnnnnnnnnnnnnnnnnnnnnnnnnnnnnnnnnnnnnnnnnnnnnnnnnnnnnnnnnnnnnnnnnnnnnnnnnnnnnnnnnnnnnnnnnnnnnnnnnnnnnnnnnnnnnnnnnnnnnnnnnnnnnnnnnnnnnnnnnnnnnnnnnnnnnnnnnnnnnnnnnnnnnnnnnnnnnnnnnnnnnnnnnnnnnnnnnnnnnnnnnnnnnnnnnnnnnnnnnnnnnnnnnnnnnnnnnnnnnnnnnnnnnnnnnnnnnnnnnnnnnnnnnnnnnnnnnnnnnnnnnnnnnnnnnnnnnnnnnnnnnnnnnnnnnnnnnnnnnnnnnnnnnnnnnnnnnnnnnnnnnnnnnnnnnnnnnnnnnnnnnnnnnnnnnnnnnnnnnnnnnnnnnnnnnnnnnnnnnnnnnnnnnnnnnnnnnnnnnnnnnnnnnnnnnnnnnnnnnnnnnnnnnnnnnnnnnnnnnnnnnnnnnnnnnnnnnnnnnnnnnnnnnnnnnnnnnnnnnnnnnnnnnnnnnnnnnnnnnnnnnnnnnnnnnnnnnnnnnnnnnnnnnnnnnnnnnnnnnnnnnnnnnnnnnnnnnnnnnnnnnnnnnnnnnnnnnnnnnnnnnnnnnnnnnnnnnnnnnnnnnnnnnnnnnnnnnnnnnnnnnnnnnnnnnnnnnnnnnnnnnnnnnnnnnnnnnnnnnnnnnnnnnnnnnnnnnnnnnnnnnnnnnnnnnnnnnnnnnnnnnnnnnnnnnnnnnnnnnnnnnnnnnnnnnnnnnnnnnnnnnnnnnnnnnnnnnnnnnnnnnnnnnnnnnnnnnnnnnnnnnnnnnnnnnnnnnnnnnnnnnnnnnnnnnnnnnnnnnnnnnnnnnnnnnnnnnnnnnnnnnnnnnnnnnnnnnnnnnnnnnnnnnnnnnnnnnnnnnnnnnnnnnnnnnnnnnnnnnnnnnnnnnnnnnnnnnnnnnnnnnnnnnnnnnnnnnnnnnnnnnnnnnnnnnnnnnnnnnnnnnnnnnnnnnnnnnnnnnnnnnnnnnnnnnnnnnnnnnnnnnnnnnnnnnnnnnnnnnnnnnnnnnnnnnnnnnnnnnnnnnnnnnnnnnnnnnnnnnnnnnnnnnnnnnnnnnnnnnnnnnnnnnnnnnnnnnnnnnnnnnnnnnnnnnnnnnnnnnnnnnnnnnnnnnnnnnnnnnnnnnnnnnnnnnnnnnnnnnnnnnnnnnnnnnnnnnnnnnnnnnnnnnnnnnnnnnnnnnnnnnnnnnnnnnnnnnnnnnnnnnnnnnnnnnnnnnnnnnnnnnnnnnnnnnnnnnnnnnnnnnnnnnnnnnnnnnnnnnnnnnnnnnnnnnnnnnnnnnnnnnnnnnnnnnnnnnnnnnnnnnnnnnnnnnnnnnnnnnnnnnnnnnnnnnnnnnnnnnnnnnnnnnnnnnnnnnnnnnnnnnnnnnnnnnnnnnnnnnnnnnnnnnnnnnnnnnnnnnnnnnnnnnnnnnnnnnnnnnnnnnnnnnnnnnnnnnnnnnnnnnnnnnnnnnnnnnnnnnnnnnnnnnnnnnnnnnnnnnnnnnnnnnnnnnnnnnnnnnnnnnnnnnnnnnnnnnnnnnnnnnnnnnnnnnnnnnnnnnnnnnnnnnnnnnnnnnnnnnnnnnnnnnnnnnnnnnnnnnnnnnnnnnnnnnnnnnnnnnnnnnnnnnnnnnnnnnnnnnnnnnnnnnnnnnnnnnnnnnnnnnnnnnnnnnnnnnnnnnnnnnnnnnnnnnnnnnnnnnnnnnnnnnnnnnnnnnnnnnnnnnnnnnnnnnnnnnnnnnnnnnnnnnnnnnnnnnnnnnnnnnnnnnnnnnnnnnnnnnnnnnnnnnnnnnnnnnnnnnnnnnnnnnnnnnnnnnnnnnnnnnnnnnnnnnnnnnnnnnnnnnnnnnnnnnnnnnnnnnnnnnnnnnnnnnnnnnnnnnnnnnnnnnnnnnnnnnnnnnnnnnnnnnnnnnnnnnnnnnnnnnnnnnnnnnnnnnnnnnnnnnnnnnnnnnnnnnnnnnnnnnnnnnnnnnnnnnnnnnnnnnnnnnnnnnnnnnnnnnnnnnnnnnnnnnnnnnnnnnnnnnnnnnnnnnnnnnnnnnnnnnnnnnnnnnnnnnnnnnnnnnnnnnnnnnnnnnnnnnnnnnnnnnnnnnnnnnnnnnnnnnnnnnnnnnnnnnnnnnnnnnnnnnnnnnnnnnnnnnnnnnnnnnnnnnnnnnnnnnnnnnnnnnnnnnnnnnnnnnnnnnnnnnnnnnnnnnnnnnnnnnnnnnnnnnnnnnnnnnnnnnnnnnnnnnnnnnnnnnnnnnnnnnnnnnnnnnnnnnnnnnnnnnnnnnnnnnnnnnnnnnnnnnnnnnnnnnnnnnnnnnnnnnnnnnnnnnnnnnnnnnnnnnnnnnnnnnnnnnnnnnnnnnnnnnnnnnnnnnnnnnnnnnnnnnnnnnnnnnnnnnnnnnnnnnnnnnnnnnnnnnnnnnnnnnnnnnnnnnnnnnnnnnnnnnnnnnnnnnnnnnnnnnnnnnnnnnnnnnnnnnnnnnnnnnnnnnnnnnnnnnnnnnnnnnnnnnnnnnnnnnnnnnnnnnnnnnnnnnnnnnnnnnnnnnnnnnnnnnnnnnnnnnnnnnnnnnnnnnnnnnnnnnnnnnnnnnnnnnnnnnnnnnnnnnnnnnnnnnnnnnnnnnnnnnnnnnnnnnnnnnnnnnnnnnnnnnnnnnnnnnnnnnnnnnnnnnnnnnnnnnnnnnnnnnnnnnnnnnnnnnnnnnnnnnnnnnnnnnnnnnnnnnnnnnnnnnnnnnnnnnnnnnnnnnnnnnnnnnnnnnnnnnnnnnnnnnnnnnnnnnnnnnnnnnnnnnnnnnnnnnnnnnnnnnnnnnnnnnnnnnnnnnnnnnnnnnnnnnnnnnnnnnnnnnnnnnnnnnnnnnnnnnnnnnnnnnnnnnnnnnnnnnnnnnnnnnnnnnnnnnnnnnnnnnnnnnnnnnnnnnnnnnnnnnnnnnnnnnnnnnnnnnnnnnnnnnnnnnnnnnnnnnnnnnnnnnnnnnnnnnnnnnnnnnnnnnnnnnnnnnnnnnnnnnnnnnnnnnnnnnnnnnnnnnnnnnnnnnnnnnnnnnnnnnnnnnnnnnnnnnnnnnnnnnnnnnnnnnnnnnnnnnnnnnnnnnnnnnnnnnnnnnnnnnnncgattctcctgcctcagcctcccgagtagctgggattacaggcacgcatcaccatgcctggctaatttttgtatttttagtagaaaggaggtttcactatgttggccaggctggtcttgaactcatgacctcaggtgatctgcccgcctcagcctcccaaagtgctggggtttacaggcgtgagtcaccacacctggcctcctgttactcatttctaatgtcattccattgtggctgaaaaacatactttgatggatggacacactaactcacacctacaatcccagtgctttgggagccccaggtgggaggctcatttgaggaaaggagttcaggacccacctgggcaacatagtgagatcccatctctacaaattaaaattagccaggtgtggtggtgtgcacctgtagtcctagctatttgggaggctgagatgggaggatcacttgagcccaggagttcaaggctacagtgagctatggatcatgtaactgcactccggcctaggaggcagacagacacacacacatgtgcacccacgtgtgtgtatatacatactgtattatttcaacctttgaggctgggcatggtggctcatgcctgcaatcccagcactttgggaggccgaggtgggcagatcacctgaagtcaggaccagcctaaccaacatggcgaaaccccgtctctactaaaaatacaaaaattaggccaggtgctgtggctcatgcttgtaatcccagcactttgggaggccaaagcgggtggatcacgaggtcaggagtttgagaccagcctggccaacacagtgaaaacccgactctactaaaaatacaaaaattagccaggcgtggtggtgggcgcctataatcctagctacttgggaggttgagaaaggagaatagcttgaacccaggaggtggaggttgcagtgagccgagatcgcgccactgcactccagcctggatgacagaactagattctgtctcaaaaaaaattaaaaaataaaaaaattaggctgggcgcggtggctcacacttgtaatcccagcactttgggaggccgaggcgggtggatcacgaggtcaggagatcgagaccatggtgaaaccccatctctactaaaaatataaaaaattagccgtggtggccggcgcctgtaatcccaggtactcggagaggctgaggcaggagaatggtgtgaacctgggaggcggagcttgcagtgagctgagatcgcgccactgcactccagcctgggtgacagagcgagactccgtctcaaaaaaaattaattaattaaaaaaaaaattagccaggcatggtggaacatgcctgtaatcccaggtactcgggaggctgaggcaggagaatcgcttgaacctgggaggcggaggttgcagtgagtcgagatcacgccattgcactctagcctggacaataagagtgaaactctgtcttaaaaaaaaaaaaaaaaaaactttgaaaatgaaaatataggccaggcgcagtggctcatgcctgtaatcccagtactttgggagtttgagataggtagatcacctgaggttgggagttcgagaccagcctggtcaacatggtgaaacgccatctctattaaaactacaaacattagctgggcatgggggcacatgcctatagtcccagctactctggaggctgaggcatgagaatcacttgaacccagcaggtggaggttgcagtgagccgagatagcactactgcgctccagcctgggtgacaaagtaagactctgtctcaaaaagaaaaaaaaaaaaagaaaatatcttaaggccaggtgcgggggctcatgcttgtaatcccaggactttgggaggctgaggcaggcagatcacctgaggtcaggagnnnnnnnnnnnnnnnnnnnnnnnnnnnnnnnnnnnnnnnnnnnnnnnnnnnnnnnnnnnnnnnnnnnnnnnnnnnnnnnnnnnnnnnnnnnnnnnnnnnnnnnnnnnnnnnnnnnnnnnnnnnnnnnnnnnnnnnnnnnnnnnnnnnnnnnnnnnnnnnnnnnnnnnnnnnnnnnnnnnnnnnnnnnnnnnnnnnnnnnnnnnnnnnnnnnnnnnnnnnnnnnnnnnnnnnnnnnnnnnnnnnnnnnnnnnnnnnnnnnnnnnnnnnnnnnnnnnnnnnnnnnnnnnnnnnnnnnnnnnnnnnnnnnnnnnnnnnnnnnnnnnnnnnnnnnnnnnnnnnnnnnnnnnnnnnnnnnnnnnnnnnnnnnnnnnnnnnnnnnnnnnnnnnnnnnnnnnnnnnnnnnnnnnnnnnnnnnnnnnnnnnnnnnnnnnnnnnnnnnnnnnnnnnnnnnnnnnnnnnnnnnnnnnnnnnnnnnnnnnnnnnnnnnnnnnnnnnnnnnnnnnnnnnnnnnntgccaatgtttgcttcatatattttggggagctgttcttggtacatacatctttatttatttttttttttttgagacggagtctcgctctgttgcccaggctggagggcagtgacgcgatctcggctcactgcaagctctgcctcccgggctcatgccattctcctgcctcagcctcccgagtagctgggactacaggtgcctgccacgacgcccggctaatttttttgtattttttagtagagacggggtttcaccgtgttagccaggatggtctcgatctcctgaccttgtgatccacccacctgggcctcccaaagtgctgggattacaggcgtgagccactgcgcccggccatacatctttataattgctataatgtgttcatgaattgacccttttattactatataatgtccttatatcatgtaataatttttttttattttgaaacggggtctttttctgttgcccagcctggagtgcagtggtgcaatcatagttcatgactgcctcaaactcctcgactcccacaatcctcctgcctcagctgcctgagtagctaggactataggtcctaatttattttattttttgtagagacgggatgtcactattttgaccaggctgcttttgaacttcctgtctcacttgatcctcccacctcagcttcctcaagttctgagattacaggcatgagccactgtgcccagtccatccttttactttcaatctatttaaatctacttctcaacagcatctggaatttggccattctccttcctgaaccgtatcttcaatgatgagatgttttcctggttctctggctgcccttgccctcctccctgaccccaatcttctcagtctggtggcactcaggactaggcctggccccttcttccaacctttccggacgacaaaaaccatctatacctagggactcctaaaacctgtctcccctggcagactctgatcccggcaccacctgcccaccaaggtctccatggcgcctcccaggcatctcacagtgggcagatccaaaacggagctcctcagtgtccccaagccagagcctgcacagcctttgctggcccctccacccagggacccgccctccttttcccaaggcccactcctgcggagccctcctcccccactcagcttttcccacagccaggcagctctcctggcctcctgccctccagtgtctccacccagccagagcagtttcacagtaaacatctcagacctccagtccacgccaaaatcttcccgcacatcaactgaaccctccatgctacctctgtagcaggacgagccgcagacaaaacccctgacaacgggttaaagacggaagtggcgagactccgtctcaaaaaaaaaaaaaaaaaaggaagtggcttcattccgcgggaacttcggcagacttgcgtctttaagtaccgagctccctgaaaaagaaattcccggcccttttaagggcttacaactctaaggggtccacatggaagggtcctggtagattgagtaagcgcgggaaatgtgactaggggctatgcatcagctcacagaacagaaagttttacaatgcttctgcatacaacgtctggaatttacagataacacaagtagttcaggtcaggagctgatattattattataattattaaccaccagggctgggtggtggcgccaaggtcgtctggctatttatcttacttckgtttctttccaactgtttgctttctccctttcctcctgccttataaactaggcaaggtggggagaggaggccagcaggaaaagtggtggtctgcttccttacctccaggacctgtaggaccacggatggactgagacaacccccactccgtctcccagccctgggaatttcaccgtctcaaatatgccaaggtcctccttgcctcaggcagtttcgctcaggctcaagtcagccccctccccaccctgcccggtgccagcagcttctcagccctcagatcttgccttcagtgccgcagcctccgctgagccctcagaaccagccacggttcttccccagggccctgctcttttccacacaggacgtacacatgtgccacctgcctctgcctgtctgtggctggcttctcacsagcctctcctacaaatctgttttattcatctctgcagtcagaactaaaacggcaactggccacggtaggcgttcaaggagaatgaaacaaagaatatgcctgtttcttcccagccaagaataggttgtgctcccagagacagacacaaaagggactcagaaaggcatgctctgagttgagagtctcaactgaatctcagtgactctccgactgagagtctataacgcccttaagccaaagaccactgcaaacacgcctgtagttaaacaagttgggtcttttactctacgtacaaacacaccaggttgagacgttgaggtgtctcagcaacagggtgttcggaggaaactattacaggatttcacctgtagttgggtgatttgggggatgatctaaggaaggaggatttggttctagattagacgcacgctggagcccaggaggtcgaggccgcagtgggccatgatcgccactgcgctccagcctgggcgactaagcgagaccttgccacaaaaacataaaaaaagattagacgctgtgggaaggaagagggtaattctcagcttatgatcgctgcatgtgacagggtgagctgtgcgttccctgcttagaatcaagaagaggtcttagttcatctcactttgtcgtggtgtctgcgtgkcgcttcatgcctcacagaacatgggctggctacgagggtcaaaccaggccacagcaacgcgtcaggggccgcttgctttcttaggagcaacaggtccagaggcttccgctccaagagggactggggcctgggccaggaccttgccgaaaakcaaacgaagcccagacaacctgctggggctccaacccttcctcccaccaccaccgccccgcagaatttgggycgctgagaccgctgcaggcgtgccgaccacggctgccccggcccggaaagcagatttgcccctttttgcggggtaagggtggagagggcggcgtcggggggagtcgagtctgcccgcccaggccccgctcggagccgcaggctgggagggcggcgggcgcagcgaccccgggcctcggtccgcccggcgcggtcctcaccctgcagcacaagagccgccggcagttcttgctgttgccgtagctctcgccaaagctctgcgtcaccgaaatgaagtcctgatgaagcagcggcggcggatgcgtggaagggggcctmgaggaaccaccggcggcatcaggagacccggtcctgtaaaagactgagagctccgcctctccgatactcgcgggcagccattgcggcgcacagaaccgtaccgcgtgtgagcagcgcgcacgcgcacgcaatgcgcctcaaccccgcagcctatgcgcctgnnnnnnnnnnnnnnnnnnnnnnnnnnnnnnnnnnnnnnnnnnnnnnnnnnnnnnnnnnnnnnnnnnnnnnnnnnnnnnnnnnnnnnnnnnnnnnnnnnnnnnnnnnnnnnnnnnnnnnnnnnnnnnnnnnnnnnnnnnnnnnnnnnnnnnnnnnnnnnnnnnnnnnnnnnnnnnnnnnnnnnnnnnnnnnnnnnnnnnnnnnnnnnnnnnnncctcctgtcgtcggacggcaccggctttgcccacggcctcgcggggagacgcagacacccgggacccggggaggcgcccgggcgccgccgccatgttgtcagggagcgcccgctcccagctcttcggttccgggacccgcggcgcggggatggggctgggccgcccttggtagccgtcctgggctgggggccacgctggccgcgtggtcaccggcaagaagcccagggcctcacccgggcgcggcgtcgcgggggccgagggaaggaccggaccctcccgaggtcgcggacccggccggctggggcgaggctggggtggcccctaccccgagctaagctggccgcgccgcatctcaccgtcgccggggcccgagcgctgcgcctggaccggcgccgagcgagggggccaagcggccggctggacccacagtccccgcgccataggcgggtcggggctttcagactcggctccagccctcaaacctggtagccttggaggtcagcttgagatgactgcgcttcctgcgcgcgttgtcctccccagaaacgctcaaaatggcaaagcggcgtccgtggccgccggaggcctgtgttctcccctgccgaacctcacgcgcggcccctccctcattttcttctggccaggctgccccctgccccttgggcgattctgctgcgtcccacggtcctggctgtggcatttctgggtgtttggagggctcccccggcaacgacgtctaatgtctataatcccggccctttgggaggtcgagggggggcgggggatcacttgaggtcaggggttcaagaccagcctggccaatatagtgaaacgccgtctctactaaaaatacaaaaaatagctgggtgtggtggcggttgcctgtagtcccagctactcgggaggctgaggcaggagaatcgcttgaacccgggaggcagaggttgcagtgagccgagatcgcctcgttgcactccagcctgggcaacagagcgagcctccgtctcataagattaaaaataaataagaaatcacaaaaaattagtacgtattttgagctgaataaaaatggaaatatgcacatgaaaatgtataggatgcagctaatacagtgcttagagaaagttataactgcaaactcttaacgttagaagaggtgaggccgagaacagtggctcacccctgcgatcccaatgctttgtgaggagactgaggccgaccccggaggattgcatgagcccaagagtttgaaattagcctgagcaacacggtgaagctccatcgctacaaaaaaatatgaattaaaaggccgggcgcggtggctcatgccagtaatctcagcactttgggaggccaaggcgggcagatcacgaggtcaagagtttgagaccagcctggccaatacagtgaaaccccgtctctactaaaaatacaaaaaaaaaaaaaaaaaatctagctgggtgtggtggcgggcaccccagctacttgggaggctgaggcaggagaatcgcttgaacctggagggcagaggttccagtgagccaagatcgtgccactgcactccagcctgggtgatagagcgagactccatctcaaaaaaaaaaaaaaaaaaaataggtgtgttgatgcacacctctagtcccaggtacttgacaggcttagaaagtggatcccttgagcatgggaggtggagactgcagtgagctaggattgcaccactacactccaatcttggcaacagagtgagaccgtgtcccccccggcccccccccccccacacacacacaaaatccaagctattcggaagactaaggcgcgagaattgcttgagcctgggaggcagaggttaccgtgagccgagaatacaccattgcactccagcctgggcgacagagtgagactgtctcaaaaaaaaaaaaaaagaaagaaaaaagnnnnnnnnnnnnnnnnnnnnnnnnnnnnnnnnnnnnnnnnnnnnnnnnnnnnnnnnnnnnnnnnnnnnnnnnnnnnnnnnnnnnnnnnnnnnnnnnnnnnnnnnnnnnnnnnnnnnnnnnnnnnnnnnnnnnnnnnnnnnnnnnnnnnnnnnnnnnnnnnnnnnnnnnnnnnnnnnnnnnnnnnnnnnnnnnnnagaccatcttggctaacacggtgaaaccccgtttctactaaaaatacaaaaaattagccgggcgtgttggcgggcgcctgtagtcccagctactcgggaggctgaggcaggagaatggcgtgaacccaggaggcggagcttgcagtgagctgagatcgcggccactgcactccagcctgggggacacagcgagactccgtctcaaaaaaaaaaaaaaaaaaaaagaaagaaagttcttaaaaagttgtttcttagaaaagatcaacaaatttgataaatgtttagctaaactggccaagaaaaaactaaaattaggaataaaagaggggctatcactactgcccttccagatacaaaacgattgttagagaatactacgaacaactttatgtcaataaatcaagcagcttagatgaaatggacaaatttcttaaagcatataaattgctggccgggcaccggtggctcacgtctataatcccagcactttgggagtccgagatgggcctcaggattacctgaggtcaggagttcgacaccagcctggccaatatgacgaaatcccatctctacaaaaaaatacaaaaaaattagccgggcgtggcggcgggcacctgtaatcccagctactcgggaggctgaggcaggagaattgcatgaacggtggaggttgcagtgagctgagatcgggccactgcactccagccctgggagataagagcaaaactctgtctcaaaataaataaataaataaataaataaatagccaaaaccaactcccaaagaataaaaaatctgaatatagctataaagaaattgagttagtaattttaaatctttctacaagaaaaagaaaaatgctcaggcctaatcaatttcactagtaaattctaccaaaaatttcggatagaattaattccaattccgacccattctataaggtccatattcacctaataccaaagccagagaaagatatcacaaaaatactacacaccaatatcctcctttaatatcaatgtaaaaattcactacaaattattagcaaacagaatccggaaagataaaaaggattatacatcgtaaccaagtgggatttatttcaggaacattttgaggatttttgttgttgggttttttgttttgctttgttttgtttttgagacggagtctcgctctgtcgcccaggctggagtgcagtggcgcgatctcggctcactgaaacctctgccccaccctggattcaagtgattcttgagcctcagcctcctgagtagctaccacacctgtctaatttttgtatttttagtagagatgggattttgccatgttggccaggctggtctcgaactcctgacctcaggtgatccgcctgcctcggcctcccacgtgttgggattacaggcgtgagccactgcacctggccaggaatgtaaggttttaatattcaaaaatgaattgatgttatgtactaagttactagactgaagcacaaaaattacattatcatctcaagagatacagaaaaagcatttgacaaaatccaatacctgtttacaataaatatttttaacaaactaggaaaatggtaactttttttttttttgagatagagtttcattcttgttgcccaggatggagtgcaatggtgcaatctcagctcactgcaacctccacctccagggttcaagcgattctcctgcctcagcctcccaagtagctgggattacaggtgcccgccaccacacctggctaatttttttttttttttttgtatttttagtagagacagggtttcaccatgttggccaggnnnnnnnnnnnnnnnnnnnnnnnnnnnnnnnnnnnnnnnnnnnnnnnnnnnnnnnnnnnnnnnnnnnnnnnnnnnnnnnnnnnnnnnnnnnnnnnnnnnnnnnnnnnnnnnnnnnnnnnnnnnnnnnnnnnnnnnnnnnnnnnnnnnnnnnnnnnnnnnnnnnnnnnnnnnnnnnnnnnnnnnnnnnnnnnnnnnnnnnnnnnnnnnnnnnnnnnnnnnnnnnnnnnnnnnnnnnnnnnnnnnnnnnnnnnnnnnnnnnnnnnnnnnnnnnnnnnnnnnnnnnnnnnnnnnnnnnnnnnnnnnnnnnnnnnnnnnnnnnnnnnnnnnnnnnnnnnnnnnnnnnnnnnnnnnnnnnnnnnnnnnnnnnnnnnnnnnnnnnnnnnnnnnnnnnnnnnnnnnnnnnnnnnnnnnnnnnnnnnnnnnnnnnnnnnnnnnnnnnnnnnnnnnnnnnnnnnnnnnnnnnnnnnnnnnnnnnnnnnnnnnnnnnnnnnnnnnnnnnnnnnnnnnnnnnnnnnnnnnnnnnnnnnnnnnnnnnnnnnnnnnnnnnnnnnnnnnnnnnnnnnnnnnnnnnnnnnnnnnnnnnnnnnnnnnnnnnnnnnnnnnnnnnnnnnnnnnnnnnnnnnnnnnnnnnnnnnnnnnnnnnnnnnnnnnnnnnnnnnnnnnnnnnnnnnnnnnnnnnnnnnnnnnnnnnnnnnnnnnnnnnnnnnnnnnnnnnnnnnnnnnnnnnnnnnnnnnnnnnnnnnnnnnnnnnnnnnnnnnnnnnnnnnnnnnnnnnnnnnnnnnnnnnnnnnnnnnnnnnnnnnnnnnnnnnnnnnnnnnnnnnnnnnnnnnnnnnnnnnnnnnnnnnnnnnnnnnnnnnnnnnnnnnnnnnnnnnnnnnnnnnnnnnnnnnnnnnnnnnnnnnnnnnnnnnnnnnnnnnnnnnnnnnnnnnnnnnnnnnnnnnnnnnnnnnnnnnnnnnnnnnnnnnnnnnnnnnnnnnnnnnnnnnnnnnnnnnnnnnnnnnnnnnnnnnnnnnnnnnnnnnnnnnnnnnnnnnnnnnnnnnnnnnnnnnnnnnnnnnnnnnnnnnnnnnnnnnnnnnnnnnnnnnnnnnnnnnnnnnnnnnnnnnnnnnnnnnnnnnnnnnnnnnnnnnnnnnnnnnnnnnnnnnnnnnnnnnnnnnnnnnnnnnnnnnnnnnnnnnnnnnnnnnnnnnnnnnnnnnnnnnnnnnnnnnnnnnnnnnnnnnnnnnnnnnnnnnnnnnnnnnnnnnnnnnnnnnnnnnnnnnnnnnnnnnnnnnnnnnnnnnnnnnnnnnnnnnnnnnnnnnnnnnnnnnnnnnnnnnnnnnnnnnnnnnnnnnnnnnnnnnnnnnnnnnnnnnnnnnnnnnnnnnnnnnnnnnnnnnnnnnnnnnnnnnnnnnnnnnnnnnnnnnnnnnnnnnnnnnnnnnnnnnnnnnnnnnnnnnnnnnnnnnnnnncacttttgggaggccgggggcggggggggtggattatgaggtcaggagttcgagaccagcctggccaagagaccagcctggccaatatggtgaaaccctgtctccactaaaaatacaaaaattagccgggcatgatggtgggcgcctatagtcccagctactcgggaggctgaggaaggagaatggcgtgaacccaggaagcagagcttgcagtgagccgagattgcagcactgcactccagcctgggcaacagagtgagactctgtctcaaaaaaaaatatatatatatatattatttttatttttagtagagacagggtct

SEQ ID NO: 96561 - DNA, 25117 bp, Homo sapiens
ttcctgttttagtttcacgacgtggttttctgcctttacagcccgtttctgttacccaaaaaagaaaaaccacaaaaagcatcactgatgtcctcacattcataccggacacgggccccaacccagggagcaggagggcacccaacctggctgtggcccttcacagcccctgtgcccctcccagtcccgcctccactctcagaccacccctgggaagggctcatcgtgcagtgtctgtgctctggccccccactccccacggatgccctcgtgggccagctatccccaggcacagcgagacagcgacgtcaaagaacaccagtcccagagagccacatggccccgctcccaagggcaggctgcaccggctgctgaggacaacagcactttctcaggagcgctcctgccccacccagctcgtccgattcagagaagaaacccatacggtcatcagctccaggttctgctccacctgctgaaccaccgactccaggtcgtggtagtcgctttcctccttgatcatttttgcttctaacttccgctcaagcgtcctcacccttgttaaagaaaaacccgagttgttaatttctgtggctacttttaagaggactacaaaaagatacctcatgagccagataaaacccgctaagagcctgtgatggaatgggtctcaggcacagaggggaggcagcggcagcctcaggcctggacctgtagccaccaggcaggcgtgcagggagcggctctcacagcactgctgctccaacaaggtgtttggtggctttttgcctaaagtttaaaataaaccttggccaggcgccgtggctcatgcctataatcccaacactttaggagcctgaggcaggaggattccttgagccgaggagtttgagacaagcctgggcaacatagtgagaccctgtctctacaaaaataagatttaaaaattagccaggtgcagtggcaaacgcctgtggtcccagctactcaggaggctgagatgggaggattgctggagccaaggaggtcaaggctgcagtgagccgtgattgcgccactgcacccgagcctgggtgacacggcaagactgtctcaaaataaacttttaggcagaacacagaaatgtgtttgatgctgaacatttatatacaataaaacccagatctggtttgactctgattacttcattatcatttaaaaacggatttccctgtgtattagatgttgtggattgcattcctaactaaaagcttacatacatttctgtttgagcttcagagaagctctgaacctcattcagctttcttctcagcttagaattttcatctttcagctgtggagagagaacatccttattagaaagtcagcatgtctggctcaaaagggcgtgtgcttctgcggtgtggctccagagcctcctgataagcagagatgctgggtcagtgcagcatccacctgcagccactacagagggagaccacagacggaggcaggcacttttcaaagacctgtggtcacagatgccagttaattttactcagaggccgggggcagtggctcgcgcctgtaatcccagcactttgggaggccgaggtgggcggatcacaaggtcaggagtttgagaccagcctggccaacacggtgaaacccccgtctctactaaaaatacaaaaattagccagcagtggtggcgggcacctgtagtcctaactactcgggtggctgaagcaggagaatcacttgaactcgggaggcggaggttgcagtgagccgagatcgtgccactccactccagcatgagcaacagagtgagacactgtctcaggaagaaaataatttttcttttttttgaaacagagtttcgcccgtcgcctaggctggagtacagtggcgtgacctcggctcaccgcaacctccgcctcccgggttcaagcgattctcctgcctcagcctcccaagtagctgggactacaggcgcctgccgccacgcccagctaatttttgtattttcagtagagacagggtttcaccatgttggccaggctggtctcaaactgctgacctcaggtgatccacccacctcggcctcccaaagtgctgagattacaggcgtgagccacggcgcccagctaaaaaatttttttttttattcagagcttataaccttttaggtgattataattttttaaaaattttcctcctcttggaatacttagcaagctggcgactgcagcctgcctttactgagggtacagccctgtaagtgcccaactgcatccaattcacagcttctagctcaccagtcctctttagccggttctattcccacgtgtaaccagaagcaaagtcaaagggaaagtggatagcaggctgtcacgcaaatcgccttgtcctggaaatcaaaccaggccacccaagaggtaggatggctccaggttctccccgggagaagccgctcggacaggcgctgtgccagagggcgccgcgaggctcacttactgcgtcgtaacttatctgcagcgtccgcaggtgcctgtctcccagagactctccatgaaccgcaaagtctgcgctaggactccctgccggagaggccggagacacgcgagaatcagtgtcactcaacgcccacgagggcagagactcaggccctgccagctccgacggggtggagaaaaaggaaaggtatgtgctgcagggcgacgtgccggcagggaccctctcggggtgagtctgctcgatggcggacggcaggtaggccccactccatccggtgtcctcatcctcctcctcatccaggaggtcaccagcccctgtcggatcctcgaaaaatggctgctgatactccaggccatacccgccggtttgggagggtggggagttgtggtcaagtcccagggaatgcctcgaggcttcctaaaaaaaaaaaaaaaaaaaaaacaatggaggccatgcttctgactcggagcgcatcttcctttctgtgttctgcctcggaacaagaagaaaggcccaatctctctaccggaaggagcccagcagcttctgagcccagagctgctccccagcactgacgcctgcctgctctgccacactcatgcacgattcctccaaaggaggctgcagaggccggaacagaaacgtcccacagagccatcgcccacagtgccgtggatttacctttgcataaattctgctggccggatcctctttcgagaggccgaggttcttggtcttcagaaactctctaaaagagaatggatttgcctcttccagatcttcaaatctgtcatctgaaataacagacatcacaaatgcataaagtctactgaagagcgttgaaagggaaccttcctgttcacctgtctttccagagcatggccacatgtgagatcgggcagccacgcttgtcattctaccatgactcaggcagcactaggaagtgtgaaggtggctgaaggtgggcagtgacacagacgtgcgtctgcatttgcaatcttctccttccacccctcggcccctgctcccacactgtgctgctcactaaagctcccctggggagctttaaaacgacccaagccactccactgcacacacccagctccctggtgtgaggtcaacctgtgctaggagctctcaaagctcctcaggtggccaggtgtggtggctcacgcctgtactcccagcactgtgggaggtcaaggcgggcggatcacgaggtcaggagatggagaccatcctggctaacacggtgaaacctcatctctactaaaaatacaaaaaattagccaggcgtggtggtgagcgcctgtagtcccagctactcgggaggctgaggcaggagaatggcgtgaacctgggaggtggagcttgcagtgagccgagatcgtgccactgtactccagcctgggcgacagagcgagactctgtctcaaaaaacaacaacaacaaccagctcctcaggtgctgcaacgctggggacccagtgccccctgaccctcttcccgactttcctacctaggtagcctaaataacgcccacttttcccttctccctcttgccaccgccttcccaccctccggggacttaagcagccacactcgaccctcccagctgtgagccccatgtaaagctggctcctgtggccccagccccccaggtggggcttccccgctccctgatgtcacctcgctgctactctagggtcaagactgaacccttgaaatcccacccccacctgctcttttgggctccagctacaccacatagccagtcacattgacagtcccaccagacacgtgcctggcactgtgttggatggagacaagaagaaaaggttgctgaactactctacctccaaaatgtgtcccgtgggctcctgacgggctctgcttagaacatttcccctttccatagccaaaatctgcaaagaaacaatgtcacccaccatgctggcaggaagtctttatgacctcacatttggtttttttcttttgcacatggagtctccactgcagtggttctcacagtctagagaactttttttttttttttgagacggagtcttgctctgtcgcccaagctggagtgcagtggtgcgatctcggctccctgcaagctccgcctcctgggttcacgccattctcctgcctcatcctcccgagtagctgggactacaggcacctgccaccacgcccggctaatttttttgtattttttgtagagacgggttttcaccctgttagccaggatggtctcaatctcctgacctcatgatccgcctgcctcggcctcccaaagtgctgggattacaggcgtaagccactgcgcccggtcagccgagaaaactttaaaaaaaacacaagctcccagacttgtgaccctggagatggcctgacttgcagactggccctggtgtccgtggtctgaaagcggctcctcagcagattttgaagcccagccggggcaagcgcgtcctcttgtcttgtgacaacccccgaatgtcctcagatcctggcataaccacacaaacactcctgcacaccccgggcacccagcagcacttctgcttgggtagaacgaggacgaaccagatctggccactgcccggctgtggaggcagatggaatgctccagctcggtttccaatcactgcccactaggtgaaggcaccccgactccagccccacgaggaaagcgggcgggctcctgtgctccccgggcactaaccatcctgtactggaactgtctgtcttgggggaggtctccccgcaaccagactgtgagctcctagcaggggactccgcctttgaattccgagtgcctggcacgcagtgagcgctctgcacattgatgggtcaatggacgagctcgtgctgcagcggaggtgccacacgtggcgcgggaactggaagcgtccccggggccggcgccctcgtctctcacctgtgtctcccacggaagccagcaccgggctgggcacatagcacataaaggccggccgaatgccgaagaagggggagtccaggtccctgccatgggggcgctcacaatttagctgggggagacaagaccggcgctcatagaacgctggagctggaagcaacgacaacagcgactttactgcgtgccggggcggccgccgcccacctggaccgctggactcggcccctgccccgctcaccgtcgggaatggcgaggctccgggctcgggacagcggggtggcgcccgggcggcgctggtagcccgacatcgccgccggcccggcggggcacgacctgcctagcccggcagcggcggctccatggccccggctccgcccgtgccgcggcccgcgtcgcccgcccccgtcgcccgcccccgtcgcccgccgctcggccgcccccgcgcctccgagcctctcgccgctgtttccgctccgagcaccaaaagcgcgtgcctgaatgccttgggccgtcggcgagggggaggggaagccgtgggcggaagcggaagtgacgactgaagcggggcggagacgcaagatggcggctgtggtgctggcggcgacgcggttgctgcggggctcgggttcttggggctgttcgcggctgaggtgagccaaaggcgaaccaggcttcggcctggggcgggggcggctcgagtctttctggacgctccgtcttcggtttctacaggtgacatggcgcccgtgggacgggctcgcacttcgggacactggtgtccccgaggcgacgggggccctgccttgctttgcgcctcgagcccggggacgcagtcccatctgtctctcctctccccggctgctgggtcctctccccccctcacttcccgggtcgacgggccttctccgaggccatgcctcatatttgcccccgcgcttcacctaccgcgtgctccttcaggaggctgagccggtgggggcccagctctgttagacccgcagggttctgacaccagggtccaggctctcggttgctgcggtctgtccgttgatctctgacgtttaagaaccctttccgtacccaccgctcctcccacccaagtgaccgggcctgcctttccccacgctggaactttgttccgacagcacaggcgtcgcccctccccacacaacgagcgccgtttcaggggtgcggaggtgctgcctccaggagatggatacaggctggagcgtaaacaaaatatcggcagtcgcgtaaatgctttggagtaaacaagcagcctttcatgatagaaaatagcaggaaagactagactggtgagggatagtcctccatcagggtgacatttaagggaagagctgaagaatgaaagaaggggtaggcatgggcaaagggcaagccctggaacggtgaagaagctttggggttgatgagtcaaatgtgttccaggaattgacaagaatcagtgtgaccaggacctatgggagtgtgggggttcaagagatgagtttggagagggagacagaggccaagtcacaccccgccttcggaccaggttaataagggatatggcttttatccaagacttcggtggtgctgttggagggcagagctgttaagtgctttatgtgtacaaactgcacttagagtgagttactgttaataagccctgtttttacagagatagcaactaagacccaaaggacggaaccagcttgctccaggtcccgtggctgagcctttgttgtcagcctctgctttgtcttccaaagtctgtagaaataagtcctgtagaaaggcagatgctcacttttaacccagacaaaacataactaaccgcacctaacaggtcatcacaggtttgttgtctcaagcctgttgtaactgggccgctttctctgttttaggtttggacctcctgcgtayagacggtttagtagtggtggtgcctatcccaacatccccctctcttctcccttacctggagtacccaagcctgtttttgctacagttgatggacaggaaaagtttgaaaccaaagtaaccacattggataatgggcttcgcgtggcatctcagaataagtttggacagttttgtacagtaggaagtaagtactgttgtgttgtcgtgggtggtcccgcagttttaacatgcacatgctttagttgactgttagttgtaattagcatgccaattatgaattgtaccctgagtggaaacaaagtgtaygatttcataaatgttgagctacacatatacctgtgaaaccatcagcacaatcaccctcatgtaattaaatctgattatcatgtcatattgacatcttaaaatgtttctcttgattaaatcttattttgaatatctgatgtaacctgtcaattttctttttactactagttcttatcaattcaggatcgagatatgaagcgaaataccttagtggaattgctcactttttggaaaaattggcattttcggtyagtacccagttttgtaattttttagactatacttttgaaggatgtttgagatttttcttgtctataatggttattttaataaattatsaagttgctaagttaatgttaataaaagacttttaagttaaaagataatttttgtatgtgtgttaaaagcaaaagtagattttaaaaaaaaattgtgtttcagggatagcctggattgcttatttaggtttccttatttatttttactagtctactgctcgatttgacagcaaagatgaaattctgcttacgttggaaaagcatgggggtatctgtgactgccagacatcaaggtacaccagcttttgtgtacaaactgactttgggkccttgggaactgacgttcttgtcgttgctcagattccctctgagcccctcccagcgggaggtgtggagattcacggggagaaggagccctgtcctggatggagacttgggtggatggcgcttacacagagaagcacagcccccaggagctcagttgacccccgtcagttcctccaggctgttggctgcatgccagggatgtagagcaggccctgttcccagatagagcagagggccttgcatacgtaatggaccccgtagccaaaggcggtaggagccaggaggatgagtggctgacttggtctggagttgggaaaggaatcataggaaatgcagggttgggctggttccagaaggagtttgctagacacacggggcacaaggcattccagaccaggagacagcaggggcaaaaggcaccgagccagggaggtgccggctgcttggtggagggagggggcagtgttgcctcgagcacagtgcagtggtctttgcatgccaggtgtggagcttgttcagaaagcactgggcaatgtgagatgggtgaatatagatcacagatttttaaaattgttgatttaagtttgaatgctaaaaaaattacacataaaagacacattaaatgctaagaattaaagttagcttggaggtaacatattcatgttctaaaacaagrcctcttaataccccctgactcccagctgcccctgccaggttcctgcctggtgtgtttgattctccgactcttgcctcgaatctcactcatcccagatgaactcctttctctggccaggtggctggtgtcctgactcagacccagcccccctcgccctcagctcaggcttttgttcttgccattctccccatgtggagagccaaagtcactgagaatggctcctcttcagggtgaaggtccagccaagtcccctcttcagaggcactggtgactgcgtcctgcctcccaagctccctcttcttcgtggctgttgcgtctgctctgcatggtctcccttgatcacacttgatctcagagcaccccatgatttcrtgcctgtcccatgggccagctctgtgcacttctgactgtgcagtgcctcatgccgggaacagatgttacagtgagacaagctccatacgagccagccattgctgtcccccaagccagccaaggccgggcatgtttccacactcaccagtgggttcgttcagtcaacaggaggctgggatgaaacacttcaccttttgagagagagtatagttacaaaaatctgtatcagaagtggctccattttgactcaagctgtgtgtagctgtgagtcctgcctaccaagcattcacactgtaagacaggaaaagagaaaggggaaaagtgtctgctgttccccgatgaagggtaggaggtgtcccctggcacgcaaagcccaagcgtccctgaaatgtctgctgggccccaacaaaaggtaggtgcccctggcatgcaaagcccaagtgtcccctggctgttgagcagagtgtgagctcagggcctggcattgtccacctggcacgcaaagcccgagcgtcccctggctgttaagcagagtgtgagttcagggcctggcattatgggcttgtgttttcttccagagacaccaccatgtatgctgtgtctgctgatagcaaaggcttggacacggtggttgccttactggctgatgtggttctgcagccccggctaacaggtgtggatcccagccgctggcgtttgaggtgggcttggacatagggaagaccggaaaggtttgcagaagccctgtagccatgagggagagcaccatgtaattggagctttaggccaacacaaagtgacagcgagatctcataagaaatagcgctggggctgggcatggtggctcacacctggaatcccaggactttgggaggctcaggcaggcaaatcgcttgagcccaggagtttgagaccagcctgggcaacatggtgaaaccctgtctctacaaaaaagatacaagaattagctggctgtggttgcttacacttagagtcctagctactcgggaggctgaggtaggaagatcgtttgagcctgggaggttgaggctgcagtgagccatgattgtgccactgccctccagcctgggcaacagagtgaggctttgtctcaaaaaaagaaagaaaggaaaaagaaatagtgctagtagccaggcrtgctggctcacgcctgtaatcccggcatttagggatgtagagatgggaggatcacttcagcccaggagttcgagaccagtctgagcaacatagcaagactctgttctccacaaaaaggaaaaaaaacccactggtgattgtaaaagtccttagtgtttgagagaatgtgtatttgagacatctgtgccctcatccctgtgggatgtttttagcgaaattggttctttgatttcggaagggcacctcggaccgtctttaaacaagtggaatggtgtgtgccagaaatttccatttcactgtttccattaccctcctcagccttgcagatggcaggactttgagtccctgtcaggggtggaccaggagaggggaacgttggcttttccagataccctaagggtgcagtttcacagcagcttgcgcttggtgttcaaaggctacagtcccacgttaagatcttgtggtcacaactgatgaaaggcgcccttgacatctgtctgtgcctctgtttctttttggagatagagtctgtctctgtcacccaggctggaatgcagtggcgcgatctcggctcactgcaacctccacctcccaggttcaagygattctcctgcctcagcctcctgagtagctgggattacaggcgcccgccaccgcgcccagttaatttttgtatttttagtagagatggggtttcacagtgctggccaggctggtcttgaactcctgacctcaggtgatccacccacctcggcctcccaaagtgctgggattacaggcgtgagccaccgcacccagcgtgtgcctctgtttctaagcaccttcatgtctggtctcgtgtcctcacagcagcacttgggacagacaggtccagtgtcttcggtgcctttcaccagcaaggaagccagggcttagcaggctcacgtggctgcttcatggctgaggcgggatgtgaggcccaggtcccctagctcctgctccctgtagcagtccccctcactcacacaagcacccagtctgcccctagatgaaggcagaggtgactgccaacagccaccaacaggcgacactcaggccagcacacaagctgtgggtcactgctgtgttcctcatctctgcctgtgcagactcagccctggcctttgggttctcttgcagatgaagaagtcgagatgacgcggatggcggtccagtttgagctggaggacctgaacctgcggcctgacccagagccacttctcaccgagatgattcatgaagtaaaatgtcaaactcgagaatgcccccgcatctcgaacagtggtcctcgggacaccaggggtggtggggagggtgcctccgtgatgttgtccttgcaggttatggatatatacagaacatttttttgttttttgagatgaggtttctccacattgcctacgctggtcttgcactcctgggctcagctcaggtgatcctcctgcctctgcctcccaagtagctgggattacaggcgtgagtcaccgcactcagcttagaacattcttgatttctgagtctgctgtttatacaatgttcgtattttccagtttttatagtaactaggtctttactactaaacacaattaatcttaggctttttgtgaatttgtattctggagaggcagattttactctttataaatacgcacgcagctgctattgccagagtgcaagtaaaatatcagcttgcgtcggattttcccagggctggctgcagatgggcgctggtgctgcttgttggaggaagcctggtcatgctgtcttcagtcacctgtgtctgtggctcttccccattaggcggcttacagggagaacacagttggcctccaccgtttctgccccacagaaaacgtagcaaagatcaaycgagaggtgctgcattcctacctgaggaactactacactcccraccgcatggtgctggcyggcgtgggcgtggagcacgagcatctggtggactgtgcccggaagtacctcctgggggtccagccggcctgggggagcgcagaggccgtggatattgacagatctgtggcccagtacactgsggggattgccaaggtgaagtagcgggaacgtctcatggcctcgggtggggaacacgtcccctggcccgtggtgtgacctgtttttgtattgattctgagggtgataggtgttgactrcatgtgtagctttgccttaacacatgctgtagtcccacagcagggcatggactgtgtcccctgctgagaatgagtgctgctaggcctgagagcaacacaaaaggtggatgcggttctttctctaggggagtgggtctgccactgcgtgttgcattttttttttttttttttagagatggagcctcgctctgtcacccaggctggagtgcagtggtgcaatctcggcttactgcaacctccacctcccaggttcaagtgattcttctgcctcaacttcccgagtagctgggattaccaccacgcccggctaaattttgtatagagatggggtttcactatgttggccaggctggtctcgaactcctgacctcatgatctacctgcctcagcctcccaaaatgctgggattacaggcgtaagccaccacgcccagcttatatgtatatacatatgtttttttttttttgtctttttggtagaggtggagttttgccacattgcctaggctggtcttgaactcctggactcaagtgatctgcccaccttggcctcccaaagtgctgggattttaggcatgagccactgtgcctggctggcattggatttctgtgtaaccactctgaagatgatctcatctggggtttgcgagccctcattgtttttcacatggcgacacttgcttgttttcttggttacagctagaaagagacatgtccaatgtcagcctgggcccgacccccatccccgagctcacgcacatcatggttggactggagagctgctccttcctggtgagtcctggtgctgggtctgatggcgttcctgatgcagtgtggccggctcagccagccctgccctctgtccctggcatccgacagcgctcctgatggggcgtgggcggctcagccagctctgccctctgtccctggcatccagcaatgctcctgaygcagtgtgggcgactcagccagctctgccctctgtccctggcgtctgacggcgctcgtgacacagcgtgggtggctcagctagctctgccctttgtccctggcatccgacggcgctcctgacgcggcatgggtggctcagccagctctgccctccgtccctggcgtccagcggcgctcctgacgtggcttgggcgactcagccagctctgccctccgtccctggcgtctgacggtgctcctgacgtggcgtgkgtggttcagccagctctgccctcygtccctgcaggaggaggacttcatcccctttgcagtgttgaacatgatgatgggcggaggtggctccttctcggctggtgggcccggcaagggcatgttctccaggctctacctcaacgtgctcaacaggtgggttgcactcttttctgtatcctcaggccaccaggccaggccaggtgtgtttttggaccatgaggccaccttccaggtgacttttctccagtttcccatggcctgatcctggcgagtccccttcactcccatgactctcgcttcctcccaggcaccactggatgtataacgcgacctcctaccaccacagctacgaggacactggcctcctttgcatccatgccagcgccgacccaagacaggtgagggccccgcctgccaccgtcctcagtgcrgttgcctgtccagacctgggcgtccctgcctagacgggtcagtaggccrgcaggcgcaggccacactgttaycgtcttgcccttcttcgcaggttcgagaaatggtagaaatcatcacaaaggagtttattttaatgggcggaaccgtggacacggtaagtgcagtgtggcgccatttccaggygtacctgtggtgtctgacaggagacagccacgttgtaggagtggcyacctgtgggcctggtccctgagcctcagggccaaggtcccggcagggcagggcagggcagggcggccaaggaggcacagcctggggctgagctgctccacctgggagcccgctgaggctgttcttccctggtccaaaccccgaaaacagaaaaacagaccaccgccctcccccagtgctcggtccactacttctttctctgagccactgggtgagtcgtgggactgaccatgtgactctctcagctttgctggcgaaacgctgcaggagtttttgtgtccttctcagccgcctctgtgaggtgactggggtgaagcagctcgcacaggtgggctgcagcgtggggtgtctcgagcctttccctggctccattctatgtttgaaactgtatttgtttaccaatttttttttgttctttttaagatggagtctcactgtctcacccaggctggagtgcagtagctcaaattcggctcactgcaacctccacctcccgggttcaagcgattctcctgcttcagcctcccaagtagctgggattacaggcatgcgccaccatgcctggctaatttttgtatttttagtagagacggggtttcgccatgttggccagggtggtcttaaactcctgacctcaagtgatccgttgccttggcctcccaaggtgctgggattacaattacaggtgtgagccaccatgcgtccctgtttactaattttttaagcttagtttttgatgctttacacatttgggaacctcgttacttcctggaccagaagtggtacaaataagcaagttttatacacacacttttttttttttttagacagagtcttgctcaggctggagtgcagtggcatgatctcagctcactgcatccttccacctcccgggttcaggtgattctcctaccttagcctcctgagtagctgggattacaggcatgtgtcaccaccctagctaatttttttgttttttgttttctgtttttkttttttttttttgagacggagtcctgctctgttgcccaggctggagtgcggtggcatgatctcaactcattgcaacctccgcctcccgggttcaggtgattctcctacctcagcctcctgagtagctgggattacaggcacccaccaccacacctggctaattttttgtatttttagtagagatggggtttcaccatgttggccaggctggtcttgaactcctgacctcaagtcatctgcccatctcggcctcccaaagtgctgggattacaggtgtgagccattgcacgcagccccatggctaatttttgtatttttagtagagacagggtttcaccacgttggccagaccggtcttgaactgctgacctcaggtgatccacctgccttggcctcccaaagtgctgggattactttgggatcccggtgtgagccaccgtgcccggccaggaaaaaaagcattcaagaaataaagttgtggttaaattaatacgcttcagttccactagtgcactgctagaaaaacagtcctccactaacgtgaagtcaacttgaaataaatatgaagtatttaggtatttgcctaaagttgcaaaaagacctaagaattgttttacttaaaagaaatggtatagaggccaggtccggtggcttatgcctgttttcccagcactttgggagaccaaggtgggaggatcacttgagcccaggagttcaagactgacctgggcaacatagcaagaccctgtgtctatttaagaaaaaaaaaaaaaagtgtagcatctctgcggcccatcagtttttggtgtttgtttttcagtatgctggctcctagatctgcatgtccttctcacagcacccctgcctgtgccctgagacagtctgaaggcagcctaggacccgcactgcctccctcagaacctcccagggactttgctaaaaccagctgcctgggccctgcgccggagrcgtctggggaagccccagaacctgtgtttcatttgttttccccgattttgccgtgtggccactttggggccctggcatttgggagttractattttaccttctcccgctgcatgtcacacagacaatgaagaactcaagggaggcacattgctcctgtatttcaagtgtggtagaagccgggtaacacgtagcacagcccttccctaaaaaacctgaaggggagaccagcagggttgcctgtgacttgggcctgggttcccgtttttttttttttttttttttttgagacagagtcttgctctgtcgcccaggctggagtgcagtggtgcgatctgggctcactgcaagctccgcctcccgggttcatgccattctcccgcctcagcttcctgagcagctgggactacaggcgcccgccaccacgcccagctaatttctttttgtatttttagtagagaaggggtttcactctgttagccaggatggtctcaatctcctgacctcgtgatccgcctgcctcagcctcccaaagagctgggattacaggcgggagccactgcgcccggctgcccttccctttcttatgttcagctttgggcacagagatggcgttttgccattgctcgagtggggggtggaaggtggcacggggcgggtgtgtgctcacctgactggaccctggccccaggtggagctggaacgagccaagacgcagctgacatcaatgctcatgatgaacctggaatccaggcctgtgatcttcgaggatgtggggaggcaggtgctggccactcgctccagaaagctgccgcacgagctgtgcacgctcatccgtgagtacygcaggggtagtgaggggctgcygcaggcctcggccaggctcagaggaggccgtctcgccctcccgcaggccgtggtgggcctgtggtatgtccatcacacccagaatctggggccttcaccagttgtcctcagcaggggcggccaagggcagggtcgtggggtygcagacctggtctcacttcccggccccaccatgcacctgctgcctccttggcaggtgaccccaccctctgcacccctgggaggggctgtcactactgcccagagttgttaaagagcactcaagttagtaggcgagaagggctyagtagaggactgctacattgtacgtggagtagcagtggctcggaatgccgctgtaccgttgctggctctcgggcaggagtctcagccccaggtttccggggcccccatgagtgaccttaggaggtctgaatttcctgaaactgccaagttgtatgtgcatcggactcttctgggggacaggcttaaaacctggcaaggctgcctattacgttggggtggctcgggcttatggtgtcacctgtgggcatctcctttccaggcctggagtcccgggcacttgccctgtcccgtgtgggccctcgtccttccctcaggagcccccrcttaaatcctcaagcgagtgtccagcctctctcgggcctcgttttctgtagaaaacagacccacctggaccctatcactcctgtcctggggttcctgggtgcagccctttggccttctctcaccccacccttctgtccatgcggccctcgggggctgggggttttttctgcaggccgtcctaaagtgagttcatcagacacggagctcgctcttctgtaagtgtaactcttcttgggtggctttgtcctatatttttaagtcattgccatgtccccatttactgagaactcaacgtctgtcacttgtggactcacccttggctacacccagtggctgcctttgggcccaggtgcccccatcagcagcacagcgtgagtgagtggtacagaccagccgccccctccgtgtgtttactgatgcagcctcagcgtgggggccgtggcgcgctcgtgtgacacgcgtttgccctctgcactaggcaacgtgaagccggaagatgtgaagagagtcgcttctaagatgctccgagggaagccggcagtggccgccctgggtgacctgactgacctgcccacgtatgagcacatccagaccgccctgtcgagtaaggacgggcgcctgcccaggacgtaccggctcttccggtagaaccgctccccggcctgacagacccagggagctgcagctggagcccgttccygtgcgtgttagtttggacacgaatttagtctaaaaagctgtctggttgtataaayggtgcaaacaatgtcgccacagcacccacgcggtttgcattctttyggaactcaatgtgccgatcagtggagtcagtatcgagcctgaccaccgcaagccaggaagcaggtgaagtgcccagcgctggagtgcagcgtgccacgaggagggcggtyggtgcttccctcctcgggctgtgggcacatggggccccgcaggttcctwggaggagccctgagctgggaggcagcaaaggctgacctatcaragcctcccggaggccaccgtgctgggtaccaggactcacctctgacaagcaggagaaggtaagggcccggtcagctccaaggagcgcgctccacgcgcgtgcacacagcttccctggtaataaagagctggcatctttcttagcacggtgttttccttctcgcctggggaggggcggttcttaagggctgtctgaattggcagcttttctaacatggaggccttcctccctgtcagtcgtccggtttgaccccgtgtcttgaagcctgttctcgtgcgacgtgctgatgtcaggggtgtcgcagcatgcatggggtggggtgacggggggtaatggtgaccggcagcgaagcctgcaggtgccttagaggtggggagcaccgccaagccgaggaacggccgcagatgtgggtgtttccagagatccgaaaggccgcatggcttagggaatagcggctacggggtagcctttcatgtggtgtaaaaacttgtacaagaggccgggcgcggtggctcacgcctctaatcccagcacgctgggaggccgaggcgggcggatcacctgaggtcgggagtttgagaccagccggaccaacatggagaaaccccgtctctatcgaaaatacaaaatgagctgagcgtggtggcgcatgcctgtaatcccagctacttgggaggctgaggcaggagaatcgcttgaacccgggaggcggaggttgccgtgagccaagatcgcgccactgcactccagcctgggcaacaagagtgaaactccgtctcaaaaaaagaaacaaaaacaagcaaaaaacgtgtacaagttaaaacttgtaacgtggttctcaaacacccatagaaacctcgggagctccaaggggtgtggggaggtcgggcctgggaacctgcatgggccacctgcggtgctgcctgtagtccaagggtagcttcctacatgtgtgactccgtgggctgcacagagctgtgtggcacagttttgtcaggaggagagaacgtctctggtcctgtcttttgagtagctgagaggtgcagcctctttgcaggaccgatgggagagggagtggatattttcaggaaattaaacttgtaagctttactcctcttagcctcttactgtcctctggctgttgtagtttctgtaagacctggtgcctttacaacacacacactccagcgacggtgactgcttgaatttgcccatgtgggaagcgtcagcttgctgcccacctggtgggattggagggccggagccggaggacgatggtgtctgttctaacagtggacttcctgttagaaacatcctagtgttaaccacacctgggacagaagctcccggcagcacgcagcccctgatgttcagctgcacagtgaacgcagagctccagcgccacacgcgtcaggcctggggttgagcttctgaagattccggtgaagcacagtcctgctccacctaccgagtagcccgaggacattctagaaactgctaccaattagccctcggtgtctgtggtttggaagccgaggccaacaaaggttctctccattccctgccacatagctggctctccctcgctgcctcctctctaaccaaaggtcgcacacccgccctccctgccacactcctccccacttcgctttttttttttccctttctttttttgagatggagtttcgctcttgttgcccaggctggagtgcaatggcgcgatctcggctcaccgcaacctctgcctcctgggttcaagcgagtctcctgcctcggcctcctgagtagctgggattacaggcatgggccaccacgccagctcattttgtattcttagtaaagacggggtttcaccatgttggtcaggctggtctcaaactcctgacctcaggtgatgcacccgccttggcctcccaaagtgctgggatgacaggcatgagtcactgcgcccagccccacttcacttctttggaactaaggtgcacttgaatttgtttatagtcggctgcctttttaagatggtcacctcccccaagcaggctatttggctcattccagtgtccctgctggtggctagaccgtctggcctggagcagagctaggaaagtacttgctgaacaaaagacaagcaaagcatgcttgagagaatgagagctgaatttttttttttttttttttgagatggggtcttgctctgtcgtgcaggctggagtgcagtggtgcagtctcggctcactgcaagctccatctccgggttcacaccattctcctgcctcagcctcccaaatagctgggattctaggcaactgccaccacgcccggctaatttttgtatttttagtagagacaaggtttcaccatgttagccaggatggtctccaactcccaacttcagatgatccgcctgcctcggcctcccaaagtgctgggattacaggcgtgagccactgtgcctggccccgagagctgtatttttgaaaccaccctcacacagtcgtatttcacagattcttttctttatttttttgagatggagtttcattcttgttgcccaggctggagtgcaatggcacgacctcggctcactgcaacgtccgcctcctgggttcaacagattctcttgcttcagcctcccaagtagctgggattacagacacccgccaccacacctggctaattttttgtattgttagtagagacggggtttcaccattttgatcaggctggtggtgaactcctgaccagccgcctaggcctcaggtgatccacccacctgggcctcccaaagtgctgggattacaggcgtgagccaccgcacctggccacgttttttttttcttttgccaaatttagcactggaggataggataccaaagttgacactaatattaggttctaagaacccactactatcgagccagcttttttttttttttttttgagatgaggtctggctctgtcgcccaggctagccctggagtacagtgatgcaagcacagctcacggtagccttaaccactggggctcagcggatcctcccacctcagcctcctgaatagctgggactataggcgtgctcattgctgttttagaggtgtggtctcactaggttgcccaggctggtctcgaactcctggcttcaagcagtcctcctgcctcagcttcccaaagtgctgggattatagatgtgagccactgtgcctggccgtatttaacaattcttttattttccagagattggccaacatcatttgcattcatttaaactcctttctgagtgaaattccattaatctaagatctagcggtgagtgccaagggaatcacctgactttcgatccatgatcttactagacacgtcatatcctgccctccccaccgccgccgccggaagacttggagcctcttactgtcaagccacgtgaacacactccagggtcggaccagaatctctttaacaattgtttgggtcggagaagaggcctaggaagaagccataaaagcggactcatttgaagccccattaccataaacatcttggtacagattttcaatgaattaatttgaaacttagggcacatttgttcaggcaaagtctttttttttttggagacgagtctcactcttgcccaggctggagtgcaattgtgcaatcttggctctctacaacctccacctcccgggttcaagcaattctcctacctcagcctcctgagtggctgggactacaggcgcacaccaccacacccggctaattgtttgtattttagtacagacagggtttcactgtgttacccaggctggtctcgaactcctgagctcaggcaatctgccctcctcagcctctcaaagtgctagaattacacccagcccaaaatgttacacacgccacacccagcccaaaatgttatacatacaggacatcagactagttgactgaaattagatgagattggctgtgccctctcattaatggaatttctatcgacgactttttttttttttttttttttaaggagtctcgctctgtcgcccaggctgggatgcagtggcacgatcttggatcttggctcactacaacctccgcctcccaggttcaagcaattctcctgcctcagcctcccaagtagctgggacaacagacacccggctaatttttgtatttttagtagagatggggggcggggcgtggtctcaccatttggccaggctggtcttgaactcctgaccttgtgatctgcccacctgggcctccgaaagtgctgggattacaagcatgagccaccacgcctggcccaagagactcatttttatcaagagactgggtgtttgtttccctactttttaagatgctgctaataaaagttttctatattattcactgaattgttgataaccagcgtggttcatcaggtctcaagtatttgtgtcttcctcaaaagactcttttccatctaacgctgatctcttgggcagtgaactaggaatgcaggattttatgtatttatttattttgagatggagtcttgctctgctgcccaggctggagtgcagtggcgcaatctcggctcactgcaacctttgcctcctgggttcaagtgattctcctgcctcagcctccccagtagctgggattacaggcgcccgccaccacacccggctaatttttgtaattttagtagagatgcaggggtggtcgcaccatgttggccaggctggtctcgaactcctgaccttgtgatttgcccaccactcagatgatccatctgcctcagcctcccaaagtgctgggattataggagtgagccaccgcacccagccgaatgtaggattttaaagatagcagagatgaaccggacaagatcatagtcagctgttgagggttgagaccaaactttttgcctgtggattttacagcctttcaaacaaggacattgtgagaacgggatatgcatgtatattgttgcttccaggtttcagtctttggccagaaagagattttaagactcaatatatgcatttatttaaaaatataaatatggaaaaataatttaaaagactagattgaatgtccctagattttcacacattcaaagactacattttttcaagagatggaatgggacacaaagcaagaatgaacggttctatactctcgaagaaagaaacccgggacatggtggggatccctggcctaggtgttcaaggtggtggcatcctgaacttccagcagttccctagcccggttccactaatgtcattccgcggctggagttaaagaagcaaacggtctacgtcaccaagaccatgagacggtttcaaaaatggtctacgtcaccaagaccatgagatggtttcacacaataggcttggcctatgagaggaggggaagcagcttcttactcagctggggaggcccttatactggggtgcaggcctcctcgccccatggcaggcgacttgcagccaagtggaggggaaccgtgccacgtcctggaggctgtgtggcttcctcagctgggctctggggcccactcagaggtctgaggccccaggggtcacctagcccagatccagccttgctctggatacccgtgtgacatggggtggtgtgtgtttgaggggctgccaggaggacacagatggacgcctgcttcgggtgtggagggagaggctggtgcagagcacgggggtgttggggggctctgtgactgcccccagggcacaggagctgctcaggaacggattctgacgtctgcccccgagagtggctggggtccgtggtgctgctgggcgggtccaaaccctgccacccatgctgtatggacctgccatggagacgggggtccaagccctgcccacccacaccgtgtggacctgccacagaggacaggctcgctcagggttggcttccttcctgggacgctggcacagaggcacggtcgccacagtccctcggatccccgaaaggcggcaaactctttgtccttcccagtgggttttgatcaatacaatcaccccacgttgcagctgtgagtcctcgttcagcaaacttcaagaaacggagcagatggtgctggagttctgactctgtagtgcttgctgcctctgaatctccttcgaaatccgtcttttaattccta

SEQ ID NO: 96562 - DNA, 183376 bp, Homo sapiens
tcctcttttctttccttagaacacttacagaacctaaatctcctaaaatattttctctccctttctcaactctcttttgcctgaaaatcatagcttttcctaaacttgatgtttcactttcttgctctgtagctagtggaaagggtgaaaaaaaaaaaaacaggactgtgaacaaaacaggctatgccttattttgcttctaccaaatataagcatgatcttgtttcctctacacccagcaaaggacagtcaatgtcttgtaggtttctgtgtttttccttaataaaacaacactgtaggaatgttgttttatttgatgctcgacaaataccaattaagaaacatgacaacaataacagcaataacaaaaagcagttggtgtgaagtttaggaagagaagacagcaaaccaacaacaacagaatgcattatgaagtaatttgtacctacactcttggctgtgaaaagttggaaataatttttgctagaaactaagggaaaaaattaatggtctaaacagctgtgtaaaggaaggaaacttcctatggagaaacacaagccattcttgttcttcctttttaaaaacaaaacaggccaggcacagtggctcacacctgtaatcccacactctggaaggtcaaggggtggggggtggatcacctgaggtaggagtttgagaccagcctggccaacatggtgaaaccctgtctctactaaaaatacaaaaattagccgggcgtggtggcgggcgcctgtagtcccagctactcaggaggctgaggcaggagaatcgcttagacctgtgagcaggaggttgcagtgagctgagatggcgctactgcactctagcctgggtgaccgagtgagactctgtctctaaataaataaatgaataaatacatacatacaaaacaaaacttggctaaatgattattcagttacaaaagttagaaaccttggtattatctctgattctccttactccctcctcatttaattccattgcttagtgagttttaaaatcttatctccaaaatgtttctcaataaatatacagaatagtatctttcctattcttcatccatgctgtcattgtccaaactgaaactctctattgcttgattagctttttaaaactctctttgtcttcttatctcatcttgctcctctccattttgtcctcagttttgctgccagaatggtctttcaaaaatcatgtctttaatatttattgatattctgaatggcaggatgaatctgtcccagctcctgtccttgacgagtttttgatgttttacggttaacattgactctacctttcagttctgagtctagtcctttttttctgctatgcatcagctgccacatcatttccacaagatgccagtcactgaggaatgtaggaactatagccgatgtgtctccaccacgtgtaactttagctaattatttaaagaatgtagtttgacactttgtgtagaatgtagaaaaagtgctgtggaaatggacatggttttatgagtcaagaactgcacttgatcctggctttccctgatgacctgtgttttgacatttgaagctaagtagagcctgctgatgcctggtgaccctgatgaaagttaaaactgatttagaagttgatgatgttgcctgtgtcatgtccaagacatttatttactacacttaatcttagccaaataactgagaagtgatcaagacatttatacataaacaatgaagatatagcttgctgctggggtgaaatggatctggcatgcaaagacctagattctaattctggttctgctgtttactagttgtgtgacttttggcaagccactaaataactctgtgttctagtgtcctcatatttaaaacgggtgtgatagtacaaatcttgaaggattgttgaggggaataaaggaaacaacgtaactcatggagtttagcacaatccttgaaaccttttggtcagtttcaatggaacagataattcagatcaaacaataattattaagcaccttctgtgtgccaagaactgggctagtttctaggactacaaagataaggcctggttcctgctgttaagaagctaatggagggatactaatgaacactatgtaaattttttaactcaatctgagtcatgatgtttcaagatccccacagtttgcttatcccaaaagacatccgcaacatgagctattctgctgattagtctggaacatcaagtttctataggaagtgtatagtgtgttttgaggaggccatgtagcatgatgaaaagacaggtatgtgtttatatggactcagatactcgttaattcactaattaatactctcaggtacctgggtaagtttgttcatttctttgaatctcagtttccttatttgtaaaatgtggagattaaaatactcacagagttattgtgatggttaaaagtgataagatatataacattcctggcacagtccctggcatagggtagataataaatggtggaattaataagaaaaaaaatatccaaaaagaaacagaaatggctttgtaccacactcagttgcatgcatgtttcatgtcctggttagctcctgaataggaaccatgtctcttaaaccaagccttgccttttctttcttttcttttttttttttttgagacagggtcttgatctgttgccttgcctaggctggagtgcagtggcacgatctctgcttactgtatccttgacctcctgggctcaagcaatccccctgcctcagccccctaagtagctagtactacaggcatgagccaccacaacctcactaatttttaaattttttgtagagacaggctctcactttgttgtccaggctgttctttgttgctcaggagtttcactttgttgcccaggctggtctgtaactcctgggctcgagctgtcctcccaccttggattcccaaagtgctgggattacaggcatgagccactgagcctggcctggctttcttgaagatgccaaacgtctaccttattcccagaaacctttattaaattgtaatctatagaaaagaggcgatcccaaggaaaagaaaggaaaagagaaacaggatgctcatttttttggctgctatccctttcagatatattcttatttacttctttttcaaatttcttgtagagatatattcttatttacttctttttcaaatttcttttacagacagtgtctcagtctggcatccaactcaggctggagtgcagtgacatgatcttggctcactgcagtcttgacctcctgggctcaagcaatcctcctgcctcagcttcctgagtaggtaggactacagatgtgtgccaccataaccaacaaattttttttaattttaaattttattttttttgtagagatggggtcccactatgttgcccaggctggtcccaaactcctggcctgaagcgattctcccacctcaacttcccaaaacattgggattacaggtgtcagccaccaagcccggcccacaccacatttctttgggaaaattctaagaactaatatttatttatttatttatttatttctcctgttgcctgtataattgcagaataagagctaatattaattgagtgcttactatctaccaggctctgttctaagctctttacccataggagctcacttaatccttgaaacaacctttgtagacagctactattgttactcacattttaaagaaggggacaccgaggcacagagaagttagcaaacttgcctaaggccatatagctactaagtgatgaatctggatattaaaaccctggtactatggcaccaggatccacattcttaagtactaagctttgagcctctcctcaactagaagtagaaactccgcccagcgcaatggctcacacctgtaatcccaacactttgggaggccgaagtgggtggatcacctgaggtcaggagtttgagaccagcctggccaacatggtgaaacctcgtctctactaaaaatacaaaagttagccaggcgagcgcctgtaatcccagctacttgggaggctgcggcaagagaatctcttgaacttgggaggtggaggttgcagtgagccgagatcgtgccactgctctccagcctgggcgataagagtgaaactccatctcaaaaaaacaaaacaaaacaaaacaaaacaaacaaaaaaaacagaaactcattcatttctataccatctaactactgatccactggcatctgaacccatactctctgctcttctttcttgttactttggataaagtatctctgctagtatcaaaagtcaacctttgcacttgggcttggggtctcagtcttttcctttctttctttttttgtattttattccagtgttttgccaacacaaaaagaggtctcaatcttatgaagggcttcactgctgctattctctcttttctctaggatgtccccagtttttccctctcttgaaaatcagcaaagtaatattctctagtgtcttcgatctaaataataattttaaaaaaggacaaagaaagcccttcccttgaccacacctccgtttccagctagtgcctcatcttttagtttcctttttagctctttctcttgatatttgcacggctggccttttcttatcctccatatctaagtttaaagccacttcctaagaggcctgccctataaccaccccctataaattagctacccactgacttcctattaaaataatttattaaattatttgcagtgttaatcagtattggatatttttcttgtttacttgtttagtgtttgctttcaccacagaatttaagctctgagagagcttattcactgctgtattcccaggacctccaacagtgcctagatatagtaggtggtcaataaatcctttggtttttttttttttttttttttttttgtgtgagagagaatttggctctgtcacccaggctggagtgcagtgatgcaatctcggctccgaggttcaagtgattcttgtgcctcagctaggactacagggtgcgccaccacgcccagataatttttgtatgtttagtagagatgggcttttaccatgttggccaggctggtctcgaacgcctgatctcaagtgatctgcctgcctcggccacccaaagtgctgggataacaggtgcgagccaccgcgcccagccaataaatgcttaaattgcccctgtaggctgttagtgatctatccctacttctttgaccttatctcccaccactttctccctggctcactgctccacgcacactgacctccttgttgatccctcaagatgccacgctcactcctaacatttggtctttgcatttgctattccttcgtcttggaaggctcttccaccaggctccctccttcgctttcttcaggtctttgcttaaaagttaccttttcactcaggccttccctgtttgggaatttaaaatagcagtcccagcgctctctccttccttgcttatgtttttctccatagcatttatgattttttaatgtacgatataatttactatttattttaccattcccctcacctgtcatgaaggctctgttgtatccccaatgtctagaagaatgcctagcacaaaacagcgaatatttattaaatgaatggatttgtggaatgaatgcataaatgaatatcagatatgaaatcttttggaagtggaaggtatcatggccagtaaaattatttattaatatgttcataatcttttttctttactctaatcccatgacagattataaataatcttaatagcagtattcacgtttgcattctcgcatccgtggcatggagtcctacacacaataggcgccctaagaaagcgtgtttgacttgatcgctggagcatctgccggcaccgcccaggacccgcccaggacccgccccgccccctgcggccccgccccccgcatgctgaatgccatataggcgagtgacgtcaggccgtttgttgtcattggcggctcccaagatggcgtccatcatggaagggccgctgagcaaatggactaacgtgatgaagggctggcagtaccgttggttcgtgctggactacaatgcaggactgctctcctactacacggtgagtccttggagggcacagctccaggcgcctcggggccgcgtttcctgggtggaggtgggggaccggggttttaggtggctgagttgaggttgctagtctgggggtgccgccgtacgcgagggttcccttgttggggagggttttacgtctcggatagccaatgagggtgagggagagaggggcgcagccaataaatagaaactagctgtctgatttatgggttgggggtgagccaagtttctttcttagggtccgctattaagcggtagtggggtccagcatggttgtgagcgggtaagggtgatcgtagtcatggcttaaaaggtccagtcttgcggttcatgctgtcttcatatgttgtcatggactttacactgtcccaccaaggccctgtagccggccgcaccccttagcttccctccagggattgaagagctctgcttcctcggaggagtggccagaggagccgggacaggtccaaaagtgaccagccctcgggcaacaccagggggtccgaaatccctccagtcggttcaggttgtgtgtctcattcaagggacgcacccctctatttagcgggaggcgagctcaaacgacgccttaacttttgagagccaaggatttcctacacgcgagactcttgtcagcgaagagagacaagtgatagtgcagtgtccccttacagttacattctgggttcagggcttcactgttgttaacatgagttggtggccgtggaaaagtagatgaattgctgtgaatcttacgtggttgtgtgtgtgtgtgtgtgtgtgtgtgtgtgtgtgtggttttttttttgagacggagtctcgccctgttgcccaggctggcgtgcaatggcatcatctcggctcactgcaacttctgcctctcgggttcaagcgattctcctgcctctggcctccctagtagctgggatcacaggcatgcgccaccacaccctgctaattcttgtatttttagtagagacggggtttcaccatgttggccaggctggtcttgaactcctgacctcaggtgatccacccgcctcggcctcccaaagtactgggattacagacgtgagccaccgcgtccggccttgaatcttatgttttgactatcccctccaccctcatcgcattcgatatggagagtaggtggtattagggagataacttacttagaaaggtactttctctgaatggtgtatagttgacgatagccgatatgagggaagaaaatacataagaggacaaaatagaatgcccagaaagctttagaaaataatagaagacagaaagaaaaacatgattatggaagaaggattaaggttgatgagagaaaggggacactgaatttatttgttcatttaaaaaatattattgagctgctatgtgcgttttcatgccagcaagaatagacagtaaaaaagacattcactgttcctcttctctggagcttatatactagcttggtgagtcctttaattcatttcactcctaataactctgcaaggtggttattcattatctccatttaatatccccagttacagttttgaaatctgaggctccaggcttttaaagcaatttgctcaacatcacatagcactaagtgatggaatcaggatgccaaattattgactttttctactaaacttcgctttcactacaggaaggagaaaagtgtaagttgtgagttactaaaggcaagcttgcaagagtaaaagtattactttcatcatccttcaactatcagctttctttctctacatagtttttaaagggaaaaagactaaaccttaatgagtcttaaacacattgttcaagattgtctttaggtgggcatgaaagagaggcaactgaatattatgtcctgaaaactctggaattatgaaacccatggcttagataaaggaaaagtaatattgggtttaagtagatgtgataatcagaaaatcccgtaaactctattcaagatagagtgatttcagtgagtgacactatgcagttaagttactttacaaatcccaaatttgtgtggatctgaatctaggaccatactggagaggcccccagctgaggttcttgggaatgcctagcccagaaagaatcttcctttttcctctttttcttcttttcatgtatcctttttctgctttgttgccctttcagtttttgaatacttggacaaatatctcttttcttgctggctaaatatagggtttaaaaaaatacttttttccccctcaatgcttatccttctttttgagactagattccctaaaatattatccttgccagaggaaggaagtatcatatttctcactaacagctgtttagaagattttttttcttttctagttccttgatattgaagtatttgcttacagagaaacaacagacaattgttgtaccatcttgtgaaaataaaatgatacccaatctcaaattagaggaggtctagtgaagaggggaaaaggatagatatttacttaaaagggaaggtaggagacacattggatattggcaatgaattctacacacatgacattatttcagtccattcggattctgaaggatttgaaggtacatattaatgatttgcatgtggctaataacttggagctacatcttccaggaagaatatctgaattagttgtgtagccttccaagcaaggcagtgaatagcataactttatttcttgtttccaaaatcacttggcctgtagtctgtctctgtggttgttaatatattctagggtggttctgaaaaccctgaactaaactagagtgaccttgctttagagttggctttactgagaattgttcttgaggtaatctcaggattgggttaggatcattgcgatagttgtgaactgaatagatttacacaagcctcaccttagttgaatttttattagatgaaatggccagggagaactaaggatataaatttaggaacactatgtgagcaaccaattgtttatgtggcttatgatcacaaaagaagatatggaaggaaggaaattgggggagttatagatctatgaggaattggaagtttagaaagaggagtttgtgccttttgttaatttatgaaaggttactgagtacctattgtgtgcctggcactttgttaggaagtggggttaaagtggcaaataagatggaaattgttcatcctctcatggtacctataatatgttgggggacataccagataagagctgtgatagaggaagcacagggggatacataggtgggctacttgactcagtcttgaagggttaggaaaggtttccttggagaagcaggtttgttttgacttgaatgatgaggagagattagccgtatgagcagagagggaaaagtgcttgagacaaagggaataaaagttttttggaggagagaagagtaagcagcttgtcagttctggaggttgggctgtgaggtaggtagtagtgagagatgaactggggagctaagcaggaggacagataatgaaaggctttcttggcaaaccatgttaaggaatttgaactttatccccagggcagtggagagctatttcagtgttgtaagcactttttattattattgaaaaatcttttattatagaaatttaaaaaaataaatctattttatttattcatttattttgataagactggttaattttgtatttttggtagagacggggtttcaccatgttgctgaggctggcctcgaacttcagggctcaagcattcacttgcctcggcctcccagaatgttaggattacaggcgtgagcccctgtgcccagcctattatagaaaatttttaacattcataaaactaaagaggacggtaaaatgaattcatttcatccagcttatacaagtatcaacatatggccagtcttgttttattagtactcccattaactccttcctcctctattgaattatttttagagcagatcccagattattatttcttgtgaatatttcagtatgtggccaggcatggtggctcacgcctgtaatcccagcaccttgggaggccgaggcggggagatcacctgaggtcaggaattcaagactagcctggccaacactatctctgctaaaaatacaaaaatttgccctgctgtggccagcgccagtaatcccagctacttgggaggccaagaattcagcctctcccttcaaggagaatcacttgaaccaggaagtggagtttgcagtgagccgagatggtcccactgcactccagcctgggcgacaaagcaagactccgtctcaaaaaaaaaaaaaaaagaaagttaaggtccctctattttcaaaagaatgttatcaaaacacttttattacagctaaatagtagtatttattaatatcaaatatccagtctgttcaatttcctagaatgtcgcaaacatttcttccttaccagttggtttgagtcagaattccaaacaagatctgcatataaaattatagagtctcttttaatctctagttctccctctctttttcttggccatttatttgtctaagacaccaggtcatttactctgtagaattttctgcattttggattttgttggaagcatcattttggtatgtttaaacaggttcctttgtcctctgtatttcctatataaattgataatttgagctgaaagcttaatcaaatttattttttttcttttgggcaagaatataggtggaacctatcaaatcaagaggcatatgatgttagcttgtctctctatgatgttaaaattgatcagtaggttcaggtgaaatgtgtgtttttttttttattttaaagaatatggttgcggagaagtaatcaggaggttgcttttgatgggatttagtgattggatgtgagtgaaaggggaagagtctgaagacatccaggttttcagcttgagctggttgaatgataaaaaggaagataggaagaacaggttgggggagagaagtggttgctttggggcatgttgaaattgacataaagatgtgttacagtctggagcttgggacaaaaatctgggctgcatatcctcttatcagtcagtaaaacataaaataaatctgggctgcagataaatattagtttttcatatatggagagttgagagagtgagtagaatagagatctttggataggactctggaaaataccactggatttagttatctattgcgttatgacagattactccaaaatgtagcaatttaaaacaacagtttgttacctcatagttttcgtgggtcagaactttgagttctggctcagggtctcttatgaagttgtagtcaatatattagccagtgctgcagtcatctgaaaggcttgactggagcaggaagatcagcttccacgatgactcacatggctgttgtcagaaagtggcagttccttgctggctgttggaaggtggcctcattcctcaccaggtagcctctccattgagctgcttaagtgtcatcatgacagagcagctggctgtgatccaagtgagagcaaagaggaagcctcaatcccttttatgacctagtcagagaccaccacttctgccttattctgttcattagagacaagccattaaattccactcatgctcctggggatgggaatttcagacatgaggagggaaattaggctttatcttttgaaaagaatttgtggacaaattttaaaccaccacaatcacaatttaagggattggcagaggaaaaaagcttgcacaggagagtgaaaagggatgccagagatgtaagagaaaaactagaagaatgtggcagtcatggatggcaaggtggaagtagtaaattggcttgaatactgctgaaaggattaaatagatgagatctaaagcatatccattggattgatgaacatcattgatgttcttaggcagagcagtttccatggagtggtaggtatggaatgcaggttggagtggcttgaagagtaaagaggaggcaggaaatatatgaagcgaatggaggttattcaagatgtttcattgtagaaagggcaaagaggacatggaatgtggaatggaggggaacagtttctaaaataggaatatgcttaaatggtgtagggatgggaagcaaggtcaatgttaaaaatgaggatacagtcaggacgcaaggagtatagtaaagatttaggacaatgacagtgggaactggaaaaaggaatagctaaggaatagctaaatatgatttgtttagtcattacccacaaatgtttaaccctctttcttgatttgtattgcttttggagagagggttagaaactgaattagtaagttacctgggctactcaagatattccttgtaaaaggagtcgttagagaaatcatatgttctttgctgttacacactgtctggaagagacttgtaatgactttgcattttaaaaccactgctagtcaaaacacatttaagtgttatttggcagtctttagcaatgtttagtagatgataaaaaaatctaccatctaattattagattttagatttttgaatagcttaaatgtatatatttctcttgcaaacatgtaaaagtagtctcagattctcctggaaaggtatcagcaccactcccatcaaacatttaaaagcaaatttattcttttctaagtaaaccattcttgaatatatcaaatatgatttttattgagcttatatatggtacttttttttttttgtcggagtctcgctctgtcacccaggttggagtgcagtggcacgatctccactcactaccacctccacctcctgggtagaagcaattctcctgtctcagccacccgagtagctgggattaaggcacccaccaccaggcctggctaatttttgtatttttagtagagacgaggtttcaccatgttgaccaggctgatcttgaactcctgacctcagatcatccacctgcctcagcctcccaaagtgctgagattacaggtgtgagccaccttgcctggctatatggtacattttagtagtccaaatctaatagagtagctttagaattataaaaggaacaaaagaaaaattgtatctaaatctaaatgggctgggtgcagtggctcatgcctgtaatcccccagcactttgggagtcgaggcaggtgggtcacttgaggtcaggagttcaagacaagcctgaccaacatggtaaaaccccgtctgtactaaaaatacaaaaattagccgggcatggtggtacacctctgtaatcccagctacttgggaggctgaggcaggagaatcgcttgaacccggaaggcaaaacccgtgagctgagatcacgccactgcactctagcctgggtgacagagtgagactctgtctcaaaaaataaataaataaataaataaaaataaaaataaatccaaacaccctgaaaagacataaagaaactctctaagatagtgagtagtatcagtgggaagaattatttggaaattttttatcttttactttccttgaatactttagacagtcttgatttttcccttttctaaaactcctgagcctagctcatatacttcttttgggcattaatcatcttacatctgctacaattaactaaatgtatctctagtacattctttatctgtacagcaagcttgtaaactccatgatggcagtactgaacatcataataatcttcaagcctgacaatgaggcatattattctccttgtgaatagaatatgaatggcccttctaattcgaattataggtgagtgaggcagaaggctgtttggaattcttgtttacacagccttgtaagttttacagaatatactaatagcaaatatgtatgtttccacagtttatgtaaaacctgattgggtttatattaacaacagaggttttttgtttagtcatccagagcctgtggaactgtgtgccatctttgcttcctgtgttgtagcagacaagcagtcaattcttgcttctgttgcaagcagttttcttgatggtgataatttgtagaaagatgtagagttgttcttaaatatgccactccaaaagtggcaattgtatgattagattttctttttttaaaatgtaatttaatttattttaaactaatctagaccatgccagttggaaggattagattttcaaataggtaatcccgatcaaaactagaacagtgtacaagtgatttagattaaggattgaatttcttttactgtttatagagaaatacagacaaagaaatggccaccccaatcaattgtttccttctcatttatttaattgtaaaggattatcttcttcttctttttttttttttaatggggtactgctctgtcatccaggctggagtgcagtggcatgattttggctcaccgcaacgtccagcaccaagactcaaaatcctcccacctcacctcagcctcctgagtagctgggaccataggcatgcgccaccacactggctaactttttgtatttttggtagagatggggtttcaccatgttggccaggctggtctcaaactcctgagcttaagcaatccaccctcctcggcctcccaaagtgctgtgattataattgtgagccactgcattcagcccaggattattttaaaaatggaatttacttgcagaagttaagtttacatgttacatgggatgatataaatggaattatattcaaggaaagtatttccaggtattcataattaatttttttctattcacatgacaatgttaaaattattgtaaaagttgattgtctatttcttggagttttgttccattgaggccccatgataagattgtctacttatttcttgtattttatcttagtattgttatggcacagctgggtgaaaatacactggataaaaatgtgatctgtcgttctggcagctatcttttgtctctcaatcctcttctttcctccatcactcataggagatgccatgcttaccagagacaatagtccatttggtgggaacactctcaactccttgttctcccacctattttgatatatctattttcctctttatacttgcttttacctttccctatcatagaagaggtaatcctgtgttctggattccatttgctcacaaacttttcggggatctcagtctatagattttctcctctatctgctttctctcctctctctatttaacttcttcctcactacagatttttcttatttaagaatattattattattattatgcagtataacaaacagttgtaatcattttatacagacatttttagatagcctgttgctttttattcttttttttcccccttacaaccagatctcactctgtcacccaggctggagtacagtgtgctatcacagctcactgcagcctcgacctcccaggcttaagcaatcctcctgcctcagtcttctgagtagttgggattgcaggcatgtgccaccacacgagctaatttttgttttgctttttttttttggtagagttagggtcccactgtgttgcccaggctagtcttgaactcctggactcaagtgatactcccgctttggccttccaaagtgctgggattacaagtgtgagccatgacacctggccatctttaattttgatgatgtccagtttatttgttcttctgctgctgcttatgcttttggtgtcgtatctgagaaatcattgcttaatctaaagtcacaaagtttcatatctatgtttacttctaagagttgtttattttagctataatgggtaggtctgatccatttttgttgttggtcatggtttttttgtttgtttattttgagacaaggtctttctctgttgtccatcctggagtgcagtggcacaatcatagcttatagcagcctcaaactcccaggccaagtgatcctaccacctcagcctcctgagtagctgggactacaggcttgtgccaccatgtgggctactttttttatttgtagaggatggggtcttgccatgttgctcacactgttctccagctcctgggctgaaatgatccttctgtctcagcctcccaaagtactgggattatatgtgtgagccactgcacctggctagtttttttttttaatatggaatgaggtaagggtccacctttattcttttgcatgtggatatccagttgtccgagcatcatctgttggaaagacttctttctccattgaattgttttggcattcttgttggcagttaactaaccataaatgtgaagatttgtatttagactgtcagttctattccattgacttatttgtctgtacttacgcctgtactatactgtctcaattactgtagctttgtagtaagttctgaaattgggaaatgtaaatcttctaactttctttgttctttttcaagatagttttggctattctggatcctttgaatttacatatgaattttaggatggactgactttttcattaatgtattaacatgttcatctctcctactttgaaaaatgtctctcctaattctgttttttttttgaaaatatcatcctaacctgtcttcctcaatatacatttgtgtattgaaatgcctgtctctgttagtccatcttgcatttactcgacagcactcttttttacctccacatttcactgaaaattccagcagaggtccccagtgatagctttgttgctaaacccaatgggtgcttttttcgctcttaatcttagcactgtctccatagcatttgatgacactggttactcttttacagctttaaaaattgttttactgttcttgaagagatgacattgtactcttaattatttttctaccactgtactaatgaaggcctactctcaatttttttttttttttggaaaggactattgcagtattactctaaatttttaaaagaagagtcaaactatagtgaaaggtctatacagtagaaggaagaaaagtcacacctgaaatcctacttatctgtgttttggagaatagctttcctaacaactctttatgcacaaatacacatctgtgtactttatataaatggaatcattttatacatgatattctacaacctaaaagcattttaagatttttctgtgtaagttattgtaccattttgtattgtatttcttcaagaggcaaatgaacaaaagataacattttttcttcatctttatttaataagatctcagtcatctggctttgggaagttaaaattcctacgctggcctggtgcagtggctcgtgcctgtaatttcaatacgttgggaggctgaggtgggagaattgcttgaacccgggaggtgaaggttgcagggagctgagattgcgccactgcaccccagcctgggcgacagagcaagactccatctcaaaaaaataaaaaagaaaagagaaaaagaaaaatatctaaattttttattatgactttactatgactttgtgatctgcttcaatttatctttctttttttctttttttttttttttttgagatggagccttgctctgttgcccaggctggagtgcagtggcgtgatctcggcccactgcagcctctgcctgctgggttccagcaattctcctgcctcaggctcctgggtagctgggattacaggtgcgtgccaccatgtccagctaatttttgtatttttagtacagacgtggtttcaccatgttggccaggctggtctcctgacctcaagtgatccaccctcctcggcctcccaaagtgctgggattacaggcctgagctaccatgcccggccttagcttaacactctctattcacttgagcttttcttctgttcctttgaagttcttcaaacttgttcttgcctcagggcctctgaatgttttctgtcttggacaggtctagcatggttgattacttcttatacaggttttcattcatatgtcactgctcagagaagcctttctataacaaaccatctaaagtaggcctctcaccctcagttgctatcataatcatctcgtttgatttttcatggcatatattgttattgctttattttgtttctcttgcttattgtctgtttctgtcttgtatgaatagaatgtaagttccattagaacagagactttatttatcttcatcattttatctccagcatctagagcagtgcctggcacttagtggcttttcagtaaatatagtcatgggtcgcttaacaatggggcaggagtgtggggagatatcttctgagaaatttgttaggtgattttatcattgtgtggatgtcataaagtgggcttacacaaacttagatcatatagtttactacatacctagtccatgtggtaggctgccaccctgtacagtgtgaaactgtatgggcaggccaaagggaaaacttcttggcctttggaggttcgctgaaatgcaactgacaaaaggcagattcataggagaaaaggcatacaaattcactaatgtggctcggtgcagtggctcatgcctgtaatcccagtgctttgagaggctgaggtgggtggatcacctgagatcaggagtttgagaccagcctggccaacgtggtgaaaccctgtctctactaaaaatacaaaaattagctgggtgtggtggtgtgcgcctgtagtcccagctacttgggaggctgaggcaggagaattgcttgaaactgggagttggagattgcagtgagtcaagactgtgccactgcactccagcctgggcgacagagccatattccatctcaaaaaaaaaaaattattaatgtgcatgggggagggggagttatggagtgattaccccaaccccctaatggagtacagtaatttatataccctttttcacaggggacggaggagatggggagtgtagacaattcttttaaagggtactaaatgattactggggggaatgaatgaatcaaggagacagaaaagtccatccaggtgtagttgcatttctcagtcttcttttctgtgatagataatgagatttcagaaaggggatagaagacaattgtggtttttttggtaagatgcttttttggtcagataaggaaatgccagagagtctctcccggcgctgggtcagggagaaacaagacaaggttagagggaccttgatcctaagttttatttctaaggcctttcaattttcaaaagcaccatgcccaagtgccatattttctgggttagtcgttttctgcactacaacattactgtactgaatactgtaggcaattgtaatataatggtaaatatttgtgtatctaaatgtatctaagcatagaaaagatacaataaaaataggtataaaagataaaaaatggtacacctgtatagggcacttaccatgaatgaagcttgcaggactggaagttgttctgatgagtcaaagagtgagtggtgagtgaatgtgaaggccggggacattaccatacactaccatagactttataaacactgtacatttaggtaacgctaaacttacaaaaaaaatttctttcttcaataaattaaccttagcttactgtagtgctttacttgataaacttttaatttttttaaaacacctttaatttttgttttaactttttgactccttcgtattgacacttgggtttaaaacacaagcacattgtacagctgtacaaaagtattttctttctttatatgcttattctataagctcttttctatttataagttttcttattttatgttttttattttaagctttttcttgttaaaaatacaactgcccaatgggttctttctgcccactgcgcaaagaaaatcagtttgtggagaccatggcattacagtaaagaaagtttgacacgaggctggcctcactctgaggttagggatttttcaaagatagtttggtgtgctggggcctacagtatggggagtgctgattggttgggttggagctgtcctcttgtgctgagttgcttctaggtgaggccacaggagcagctggcatgtccatgtgggagccatcagttgtcagacatgcaaaaaacttgaaaagatatctcaaaaaggccaatctggctgggcatggtggtgcatgcctgtaatctcagcgctttgggaagtagcagcaggaggatcattgagcccaggagtttgagaccatcctgggcaacatagtgagaccccatctctamaaaaaactaaaaaaattagccaagcatggtggagtgtacctgtggccccagctacttggaggctgaggcaggaagatcgcttgagcccaacaggtcgagggtacagtgagctatgatcatgccactgcattccagcctaggcaacagagcaagaccctgtctcaaaaagaaaaaaaaaagaccaaccttaggttcttcaatagtgatgttatctgcagaagtaattgtgacgtccagaataatggctgacaatcatttatgtctatgccttagcaggattcaggctcctctaatctcctagcctggtggtctctctcattagatttacaaaggcagttgagttttggggaaggattattatcatttaaactataaatgtctcccaaagttagcttggcttaagcctagaaataattgcagcttgaaagctaaaggcaagggggcattggctagatcaggtctccccaactgccataattttctcactgatagaatttttgcaaaggtggcttcaaaaagtaagatacaaaracattagcagaggtctacataggctcagtatcatcagtatcactgtcttccacctgtacatcttgtcccactggaaggtctttagggcaataactcacatggagctgtcatctcctatgataacaatgctttcttctggaatccctactgaaggacctacctgaggctgttttacagttaacttttaaatatatctatatatacacgtatatataaatagaaggcatatactctaaaataacaataaaatacagtatagtaaatatataaggtaatgtacttattatcaagtattatgtactgtacataattgtatgtgctatattttatacgtctggcagcacagtaggtttgtttataacagcattgccacaaacatgagtacagcatcattaggcaataagaaattttcagctccattataatcttacaaacagttctgtgaagtaattggtattatttcctttgaacagtgaagacattgaaatttaagaggatcccatagtagtttctatgtgggtgatcaaggtctaacttcaaatagaatgttctttctgggatacactagattaatagtgattagaatgatgataaacctgttatcactagtttgctggcagatgataaataatttacatcattatcacaattaaataaactttctgcagaggcctttgtaaattacagtgatctattataatgctaggttaagcaaagactcttcctcttacctcaatggaaagcctgcgatggggggagaagtggcggggaccagatactaaagtctcagaatttgtgagtgatgggttttttatgtttacatggcataagtatagaaaggcagtggcaaattatcaaagaagatagggtctaccttggaattttatcacctgaaagaggagtaagtttaaatttctgacaggcaacatcctctgtgactagttaaaatgaaagtcattttaactcttctgccttcatttctttttggaaacccatgtattttgaagtaaagttagacttgattaaaaaaaaatgagagtttttaaattgccttttaaaaaatacttttctcttttttttgagaccgagtcttactctgtcctccaggctggatcttggctcactgcaacctccacctcctgggttcaagcaattctcctgcctcagcctcccaggtagctggaattacaggtgttcgccaccacgcctggctaatttttttatatttttagtagagacgtggtttcgccatgttggccaggctggtcttgaactcctgacctcaggcgatccacccgccttggcctcccaaagtgctgggattacaggtgtcagccatctcacctggccacttttatctttattataaaagtaaaataaggccaggtgaggtagctaacacctgtaaacctagcactttggaggccaagacgggaggattgcttgagcccaggtgttcaagaccagcctgggcaatgtagggagacccctgtctctacaaaaaaataaaaaataaaaattatccaggtgtggtgatgcatgcctgtggttccagctactgggtggggatgggggaatgggtgcgaggtagaaggatcaatgagcctgggaagtagaggctgcagtgagctgtgttcctgccagtccactccagcccgggcaacagagcaagaccctgtctcaaaaaataaagtaaataaaataaaataaaataaaataaaataaaatgaaaacagggtcttgcactctgtcacgggggctagagtgcaggggcatgatcatggttcactgcagccacaacctcctgggctcaagcagtcttcttacttaagccttcagagtacctgggaccacaggtgtgaaccaccacaccagctaattttaaaaaaaccattttgtagaaatggggcctcactatgttgcccaggttggtctcaaacttcagggctcaagtgatctttccacctcagcctcccaaagtgctgggattacaggtgtaagccgccttacctggcttggaaataattattaacagtttttcattgcaaacatttttcctgagccccaacctccagatttgaacaaggagcttttggagcatagccccattctaaattggagtctataggatgagacttggaattaggactaagcatctgaaatttcatgggtctagctgttgttcttgctaaccacatttttgtgtgttgcacaaatttttctatcttctatacatttttgtagtgttcttcttgttccctttttataatcttgttattctgggccctctattagtctttgctaaatagggaaaaaggtccttgggcaatttttggtagaggagtgaacttgaatgttaataatggattgtcatttcacagtttggtgggagaagtactgatggtggaggagcataaaacagagtttaacactccctcattatttcctttaatcaactctgtgaataaacacaagtcaatatttagtattttgggtggtatgtgaaaaacaaaacaaaaatagaaaatctgtgtcgaggttgtagggaagttgaaactttccctctgaaggtttgaatccaagtcggctgaaatgagttgacagtcgccagattaacaggagaaaaggtatacaaatttattcacgtgcataagcatgggagccatacaaaatatgagactcaaagaaaggccaactgaagttttataccatgcagaaaggaatagagggttaagggtatcctggggttgtggggaaggggttgctgcagtgtatgagagtgagaggaggaaacatggtgtattagtctgttctcacgccgctgacagagccatacctgagactgggtaatctataaagaaaaagaggtttaatggactctcagttccacatggctggggtggcctcacaatcgtggtagaaggcgaaaagcatgtcttacgctggggcaggcaaagagagaataagaaccaagggaagagggaaaccgctgaaaaccatcatatctcatgagactttttcactaccacaagaaacagtatgggggaaactggccctatgattcaattatctctcaccaggtccctcctacaacatgtgggaattacgggagctacaattcaagatgagatttgggtggagacacaggcaaacatatcccatggccagcaagggctgggccgtcttgttatgcaggagaaatctctcagtagatcattttacctgtgggaaaagtttctctgtcagacttcgaaaagtgtgtcaagagcagagtgtgatgggtcatacctatagtcccagccactggagaggctgagttaggaagatcccttgagcccagaagtttgagttcagcctgggcaacatagatagaccccatctgtattaaaaaaaaaaatgtcagaactttggtctccttttcctgtgaggtaatcttcctagattagataaggcagataaggaggtctcagaaaaaggtgtttgcacctcgctgttactccactaatgtagattacctctgcagatacaagtctcccctaccaaagtacagcttttcagagttattctcgtgtctgcagcccctctgagaatagctatctcaaaatatgccaaagaagtatattttggggtggtatattttgatttccttcaaggtgcagcatatattactaacatgctatcagtagtttgcagaacttgggctactatttagtttttaatatttaactttataagggatgcaaaaaccctaagtcatcatggctgtgcttaattgagctccgtgaaagtggttctctccactcacctgttgtcctgaaattctgacttgaagataaaattatccttttttaaaaacagtgaaaaacctgagactcgacaatgttataggccactagatcaaagtccatatgtccacaatcctctgcctgcaattttgaaatctctacagccctgaattaaaaagatttttccccctaaatttatgatacgctcatttggaagtaaagcctatcttgaactgatgtgtggctatttataatctttatcatgcttagtgtaaatatttgtttgttgtactatagatatattaatatgcttggttgtggaattaatatccttggctaccctagacctcactgcaggtgacacaatttatgtactgtatgtatgtatakgtgtgtgtgtgtgtgtgtgtgtgtatcctttctaaaatcaatccttccttccttcctctctctctcttgttttttttttttttttttttttttttgagacagggtcttgcttcgttatccaggctggagtttagtggcatgatcatagttcactgtagcctcaaactcctaggctcaagtaatccttccacctcagcctccccagtaactaggaatataggcatttgccacctctcctggatgccacttcattctttttttttttttccctttgagacaaagtctggccctattacccaggctggagtgcaatggcatgattcagctcactgcatcctctgactcctaggctgaaaccatcctcccacctcagcctcccaagtagctgggactacaggtgcacactgccacaccaggctcatttttgtattttttgtagagatggggtttcaccatgttgtccaggttggtcttgaacttgtgagcccaagtaatcctcctggctcggcctcccaaaatgctgggattgcaggtatgacccaccacacccaacccaaattgtcttacctttctaaaattgtgaaggctgggcacagtggctcatgcctgtcatcttagcattttgggaggccaaggtgagaggatcacttgaggccaggagttcaaggccagcctgggcaacagagtaacactccatctctactttaaaaataaataaataaataaataaataaaattgtcatttccaaaacacatctgatccaaaggtcttgggataagggatgtggacatgtatttgtaatctagtgacctaggaatttacatgctagagatggttcagaagtcagcattaccgccctctgaggcactgctgagaggctttacagggtgacatactcctctgaattcagaaagatcactgattttacacccagcctttgtggttgagaaaaacctttaaggaagacttaaattaaccaggtttatagtgactgtggtacaaatgtacctttggatccatacctaggttcaaatcctgtttctctcacttgctatctgtgagtctgtggacaagttactccaacctttctgtcactgattcctcagttataaaatgagtataacatgccaggcatgttggctcacgcctgtaatccaccactttgggaggctgaggtgggtggatcacatgaggtcaggagttcaagaacagcctgactaacatggtgaatcaccgtctctactaaaaatacaaaattagccgggcttggtggcgcatgcctttaatcccagctactcaggaggctgaggcaggagaatcagaggctacagtgagccgagatcacaccactgcactccagcctgggcaacaagagtgaaactctgtctcaaaaaaataaataaataaaactaaataaaatgggtatgataaaagaaccaatatcataagatcattgtgagaattaaataaaatagtatttaaagcactagcacagtgtctggcacataagtgctcagtaaatgataacaaaaagctaaagtttatggaggtgtttgacatagtaatattcactaaatgtacacagtggtcaccattatatgaatcagtattccaatttattaattcacaacaagaaatataacttaagaagactctacatttaggctatctaactgatacatttattctctgaatgcaaactctttgggatgccaaattataagcagcatcagaccaaagttatatgttataggtatttagtggcattagatattgacatcaagatgcagtatctccatgttagagacatacctattaccagaatgtaacaggtttaatctttgggtcaaaaaaacttctatccttgccttctgatattagttctggccttctttctctagttctaaaatacttagtataatgatctccaggctgttccatctcttaaagatgatcttgtatatatctctgttttgatatatgtctcttttctttaagggaaggcagccttgttcccaggatcttggagagacccccaaaatcaccattaccttgtttactgatatatttttgtatattgaatcaatagacattaaatctgatgctcaaaatgagaccatctgtaactgacagggaaaggagggaaggatgagatagttatctatgataacttgaaggatgagtgatggggaaaatttctccattattgtgagtctgtgactactcaagagtttttgttggtgtagctttctggaagcataatgacatttggggctattgagtgtcccaaggcagtaactggggaagggtctctagtacattaaatgctatcaggatggctttaggagtccgtgctctcttaaatagaaaggagactacattctgggtgtggtggctcacacctgtaatcccagtactgcttgaggccaggaatttgagaccagcctgagcaacatagtgagactctacctgtataaaaaaaattttttttaaagaaaagaaaggcggggcacggtggctcatacctgtaatcctatcactttgagaggctgaggcaggcagatcccttgagttcaggagttagwgaccagcctgggcaacatggtgaaaccctgtcactacaaaaaatacaaaaatattagctgggtgtggtggtgtgcccctgtagtgagctatgattgcaccactgcactccagcctaggtgacagagtaagactctgtctcataaaaataaaaataaaaatctgaacagatgcagtggctcacacctgtaatcttagcactttgggaggccaagtccagaggattgcttgaggtcaggagttcaagaccagactggccaacatagcaagaatgccttaaaaaaaaaactacaggagtgagtgagagttgctgctatcatttcctattttgtaactgttgtaattagtgtatcttcgtagaattttgtcaagtactatttattaatttacttttattgacgtataattttcttccagtaaaaaacacatattttaagtgtataattagttgagtctttgcatttatttacagccttgtcactaatatcccaatcaaaatatgaagcattgttatcttcctgcaaaattccctcctgtccctttcctgtctgtcccatgccctagaaccagcgtcttgtgattcctgtcttcatgggttagtttgcctgtcaagttttcctcctgtgtgccagtagtagatggtcgaaggtacaacactggctatgtgtgcaacctcatatgcacttggaaatgaactaacatgtctctcaatgtggaaacagtgtttacatttatgcgtaaaggagaggaactgttgtgacatttgtccacgttcattgtccccaggtcttctaccatcaacatgttaaatgttctttgcaaagtacagtgtagcaagggtagcatattgagttggggtggtggggacaaggatgagtcagaaactacctttgggagaagtgatgagacatgcacatacgttattatcatgtaagatagaaataataagtgccttaagaaaagtaatatggcatgctgtatattaataagttcagaaggagacctcacttttagctgtgagagattcatagcaagtcagtgagtttattgcttgatcttcaacacagtgtactttaagcaaagtaaaattaacattcaaataaatttaagtgtcctcatgtaacagattcggggaggcattcctagttgttttttttttttttttttttttttttgagatagggtctcgctctgtggtccaggctggagtgcagtggcgcaatcaggggtcattgcagccttgacctcctgggctcaggcaatcctcctgcctcagccctccagtagctgggactataggcacacaccaccatgtctggctaatttttatttttttttaattttagtaaagaggaagtctcactatgttgcccaggctggtctcaaattcctgagctcaagcaatcctcccacttcagcctcccaaagtgctgggattatggcatgagccaccatacttggccattctttgctttataaaaggattgtagaattaatgtaaatggcaaggaaatcttccttactgaattttaaatatgtttgcacaaaactttttcagacacatttactttgtaaactcatatttatatttccaattaaacaggtttttattgattgcagtatatactggcaccaagctagattttatgagttaatttttaaacttaataagatgtttttagtacttagtatgtgctaggaataaactgaactaatcttctaaaagcttgcagtcctgttggagatacaattaagtagttacaatcaagatataatcaagtagttacttttgtgcttttgatttagtgctttttattagatattattaatctctaattgttttattgtaataatttaaaatacagttgtaaaaatttgattgaagaggactgaaagtttacagaaccggggaaaaggtttcccctgtgttacttgggagtgttgaatagcttgaattgggactgaatgggcatattttgagtgaattatgtttgttggatgagtaagataactgggaaagtggtctgggaccattcattgagcagacatttatctattaataataccttccaggtcccaggcattaattaggttctgaaagatagggtgggaataatagtaatgtaaagataatttttttttttttttgaaacaggctctcactctgatgcccagactggagtgcagtgcattgtaacctctaactcctgggctaacaggatccttccaccgcagccccctgagtacctaggattacaggtgtgtgccaccacacctggctaattaaaaaaaatttttttttttagagatgggttctcactatgttgcccaggctggtctccaactcctggcctgaagtgatccccctgcctcagcctccaaaatgctgaaattacaggtgtgagccactgtgcgttgccatattaaagcagatttaagactgacatttagctaaatagttcttagtatgttcttaaaattactttttcctaaggatttaagaaatggaccaagcaggcagaccgctgtgtgatttgagattattatgagctattctcttgagaatgcaggtcatctcattgttggtcattaccttgctctgactggggcctcttttataagggaattaatcccattcatgagggctctgcccttgtgacctaatcacttcccaaaggcgcacctcctaataccatcatcttaggggttgggatttcaacatatgaactttgtggggatgtaaacattcagtccattacagtatgtattcctataaatacatgtttctcacattaagtaagccatagaaggatattttctagaatagtttgtgaaattaattttggcaagataagttctactttctgatagacttatgtgactctttcagaaatttcttaccctgggaaaataaaaattgtttctgattttattaatttactgatttccagaaggttctttattctatagccagcaaaaagctgcttttggttgcttaaccccatcctagattacttctagcagggccttacaaatgtgttgattatatcaccaactattttgataatgtaacagttggaggttaggatctgtttctcagcttcctgggagcaccgggtcaatgccgagataaatatctgtttagatctacagaataaattgattttcacactgacagtatatcgaagagaatctagatatcctaaggtgtttgctrcctagatctaggcacacagtattgattagaatgtttggaatcagcattccttagatgtttctttacagaaaaagtactgacttttaaaaaaggtaagtgtcaagtggttataaagatggtagctagcgtaaaggccaaatgtttttttttcctttgaggcaggtttaacagacttagtaacacactaaaatctgtgaagtttaatttgtctttgggcagccgattttaattttctgaccaacataatcagaataagaatagaagcttcaaattactggctgttgaggcatagtacataaaattgagggttacgttaatgaaaatttaaatggctagctgtacttacgtgtctccgtcctatcatttattcaatattttttgagtttcctctgtgtaataggtcaatattctcctagaatttaaggctaatagggatgatgaaattaagtaatttcagaattgtttaattacagatttataaagtacttggcaggctcttaattatttatctttgttaattttatcatgaatgcacacaaggtattctggatcagagacatttcataataataaatgtattggcctgcttttgccctagtccttacccctaggatgatgctataaaagccaggtcaattgtcctgcgtgagtagccagacactctgtaggtgggggacaaggaaaaattatttttctctcctatgaaggggaaataggcaactgtccccctcccctcatgaaatggtcacttaggaaaggtaataagcctaaatcctaactccaaccctttggcatatctggagttttatctctttttacatacaaatatctagggagatagctgtaccccttttcttagcaccttggaagcttggcctagggaactgctccaggctgtaacctttcaaacttctctgggaaatgagagagggttttattatccttccagaccagttgaaaacaaaagatctaatccttatggcatgcagaaatgttgccaggaccctagagctttttagaagaacattgagaaatccatggacattttatgtcttagtctgttttctgttgctataacagaataccacagactagataatttataaaggaaagaagtttattttggctcatggttttagcagctggaagagcatagtgtcttcttgctgcttcataacatggtggagggcatcacatggtgagagaggtagagcaagagaggtgagggaaattgcttttacgacaaagtcactccatcaataaagagcacactcctgtgatagtgacattaatccatcaaggaggacagagtcctcattaatctattcatgaggacggagggattaggtttctaacacatgaacttttgggggatacactcaagcccataggattttattttcccacagtattatgggaaaaaaagggttttattatatccttgttagaagtgaagggttggctatctgctctagaggttcaggtaaagcttccctcctcagggaactgagggtaagtaggaattagccagtaaaaagagtgagggtagatgagtaaaggcacttcaggcaatgagaacaatccatgtaaaagtccttaggcaagaaagtgattggctggttcagggaactgaaagatgagtgtgggtggggcccagggatgatggggtattttgaggtaggctggagccaggccaagcagggtctctagagagagcaaattgataaatgtgcattttattttaagtgcaatgtagagccatgaagtacttttttttgcttgcttgcttgttttgttttttaatcgaagaagtaacctgatcagattcatgttttgaaaagactcctggctcctgtgtggagaaaggattggaggagaggaagaagagatagagaagaattagaaggtgatacaggctgggtacggtggctcactcctgtagtctcagcactttgggaggctgaggtgggtagatcgcttgagcccaggcgtttgaggcagcttgggcaacaaggcgaaaccccttctctacaaggaaaaaaaaaattagctgggtgtggtggcacatgcctgtagtcccagctactctggaggctgaggtgggaggatcacttgagcctaggaggcagaggttacagtgagccaaaattgtgccactgcactccagcctgggcaacagagtgagaccttgtctaaaaaaaaaaaaaaaaaaaaaaaaaaaagcaggtgatacaatattgggatgtattgtagagggctggattggggtggttgatggtagagatgaggttaaatgaaaggttttgagagtttgtttttctttttcccttatgacctcatgaaagaagatttgagagcttttatgagacagaaatgaggggactttgattgattggatggaagagagacaggatcacgagttagttttatacatattgagttttgttttgttttgtttttgagacggagtcttgcgctgttgcccaggctggagtgtagtggcgcaatctcggctcactgcaacctctgtctcccaggttcaagcaattctagctgcctcagcctccctagtagctgggattacaggcgtgtgccaccacacccggctaatttttgtacttttagtagagacagggtttcaccatgttggccaggctggtcttgaactcccgacctcatgtgatctgtccgcctcagcctcccaaagtgctgggattatagaggtgagccmccgcgcccagcccatgttgagttttaaatgcctttgagaaagccaggtggagatgtgctgagggagagagtggagaaaatgtgaaatagcccttgccgagaatgggagagcaagtctactgatgaatcatttcctgctcttccctctgcctgggactttgcccgcagattcttcactttactcggtcctctaattcaaatctcagttcttgtatcaactccttgaagagctttttcaagctacttaagttaaaatagaacctcctttcccaacaataactttctgatcatcactgctctaatttaaatgtgtcccccagcattcatgtgttggaaacttaactgcaacactgcaacagtgttgggaagtgggggctaatggaaagtgtttaggcagtccccttgtaaacagatcaacgccatcacaaaaagggctcgctcacttgtactctttgcctttccaccctctgctctgcgataaatagggctctcaccagatgctggtgcttggatcttggaattcccagccccttaaaacttgagaaaataaatttctgttataaattatgcagtctctggtattctgttatagtagcacaagatgcactaagacaatcaccttcctttattttcttaacacttatcaccagctgaaactatcttcttaacttgattttcttaggcaaaatatctactcacatcctttgcccatttttaaattgggttgtctttttattgttgagttgtgcgagttctgtatatattctcgatactatacccctacccagatatatatgatttgcaaatattttctctcattctttggtttgtcttttcactttcttggtagtgttttttgtttgtttggttggttttttttttaagacagggtctcattctgttgcccaggctatggtgcagtggcatgattatagctcatcataacctcaaactcctgggctcaagggatcctcctgccttagtgtgatagtgttctttaaggacaaatgtttttaattttgatgatgcccagtttattaatatttcttttattgcttgtgcttttggtatcatgtaaccattgctgattccaaggtcacaaagatttatacctacgtttttacctaagaacttaatagttttaccctttaaatttaggtcttggatccattttgagttaacttttttttatggcatagggtaggtatccagcttcattcttttacatatggtttaatcatcatttgttggaaagactattccctattggatagtcttggcactcttgtaaaaaaaaatcacttgattatgtatgtatgggtttatttctatacttgcaattctattccattgatcctatgcatatcctaatgtcagtaccacactgtctattattactgtggttttgtgttgcattttggaattgagaagtgtgagtcctccaatgttgttctttttttgaagtttgttctggctattctgggtcccttgcaaaaccactgaattttagcatcagcttatcaatttctacaacagaaaaggggagttaggattttgataggtattatattgaatctgtaaatcaatttagggagtactgccatcttaacaacattaagtctttcaatctaagagcatgaggtatctttctatttatttaggtcttctttaatttccttgtgttgttttgtagttttcagtgtacaagtcttatgcttcttttattaaatttattaataagtattttaccttttgatgctattataaatggaattgttttcttagttatatctccaaattttttaaatctgaaagtatagaaatacaattaatttttgttattgaatttctgtttgaaactttggtgagctcatttattagctctaatagtttgtttttggtgtggattccttaggattttctttgttgttgttgttttttgtttttgagacggagttttgctccattgcccaggctggagtgcagtggcacaatctcggctcactacaacctcctgggttcaagcgattctctagcctcagcctcctgagtagctgggactacaggcgcccaccactcccagctaatttttgtatttttagtagacatggggtttcaccatgttggccaggctggtcttgaacttctgacctcaagtgatccacctgttgcagcctcccaaagtgctgggattacaggtgtgatccattgcacccagccccctaggattttctatatggaaggttatgtcttcttcaaacagaaatactttaaactcttcctttctaatctagatgcctttatttccttttcttgcctgatttctctggctagtacctccagtacagtgttgagcaggagtagcaagataagacatttttgtcttgttcttaggtataaagcttttaatctttcatcattacatatgcggttaccttgggcttttcatagatgccccttattaactcaaagaagttcccttctgtttctagtttgttgagtggtttttatcatgaaatggtgttagatttttttaaaagtacsttttctgtgtcttttgagatgatcatgtgatttttgttctttattttattaatatggtatattatattgattgtttcttatacgttgactcaaccttgtattcttgggataaatcccacttggtcatagtatataatcctttttatatcttgctggattttgttcgctagtattttgttgagaatttgtccatctatrttagaaacagatactgttttttacgtacgattttttttctggttttggtattagaataatactagctttatagaaaaaattggaaagtgttcgctcttctatattttggaagagtttgtgaaggtatgtcgttaattctttaaacattttatagaactcaccatctgggcctgcgcttttctttgtgagaagttttttgattactaattcagtctttttacttattttacgtctattcagattttctattttttctttagtcagttttggcagtttatatctttcttggaatttattggtttcatctaatttgttgttccttgtatttccttagaatttttttgtttttgtaagattggtaataatgttttttttctttcattcctgattttagtactttgaatccccttttttttccttggtcagtctagctaatgatttatcaattttgttgattttttaaagaaccaacttttggctaggcacagtggctcgcacctgtagtcccagcactttgggaggctgaggcaggtggattgcttgagctcaggagtagcccgagaaccccttctgagtagaacatatcagttcgatattcccacytcatgggggtaatcctgttttgtcatccagctgaaaagacagtagcattcatttcagagtggtccttttttaaggtaccgggccttgtagctggaggcagagagagtgacagttactgggctgtagaccacatatctatttgtgccaatttgcttgaaaaaggacatttgttagcaggtttcagaacattggtaagataacactcagtaggaagattgctggcgttatgtcagctacctttctttcattaccagaagctactaggattcatcagaaataacctaatatttggtgaatggcattggcttagacagatttgcttcagaccaggaggtagctgaagatcactggcagctgggactttcctccttatctctgtgcttctcttgctgtgtaggcttgctttcttcgcatagaaggcacaggaccagtggcctctgtacctcacagcttcaagagcagataggagggagctcttccctttgccccggttgaaaaacttcctgggagatgactctgtcctgccctgtggggtagtgggtcctgtgattggtcagcttcctttatcagaaaaggctgtgtctggtgaaagcagtcacaccagcttccctatagccccgcattaaagctgagtggagagagggagggagagggccctgtgctattgtgaaagaggataatttgatgctattacagctcagataaggtctgggagaatgatttgccggacaggcatctccaactgtgcaactcagccacattttacatatgtaacactgggtaacttacttgatatccctagtgtcattttcatttttaatataggaataattcttaccatgcaaaggcttgtaaggtttactgtatataaagtgcctgttacataaggggcagcaatgagtgaggatctgctgcttctgctattgktattattaatgttgctattatccctttctccaagtcctcttatttaacggtgttatttttctaaaacacacctttaagaatgctattgccctctttgtaaacctttagtagctccccattaactattgaataaagttaaatttccttaactactccatgttttttttcagacccttcaggatctggtccctgtaatcttcttttcagcctcattttaaaaaatgtttaattttaatttttttgaaacagtcacactgtttcccaggatggagtgcagcagtgccatctctgctcactgcaacctccgcctcccaggttcaagggattctcctacttcagcctcccaagtagctgggattacaggtgtgcaccaccatgcccagctaatttttgtatttttagtagagatagggtttcaccacgttagccaggctggccttgaactcctggcctcactcaagtgatctgcccacctcagtctcccaaagtgttgggattacaagcgtgagccactgttcctggccttcagtcttatctgtaagttcctgtctgcaccctgtgctcttgtctgtacatctactctcctatgaataggaaagtaaagttttctacatctgtgccttcgctgatgttgtttccttgtcttggaatggcctttcccccactaccttccctttctttttatcagatttcttttttctttctttcttttttaaagccccaggttgaaacttgaaacctgatcatttcagttttgcttccttccctgatctttttccttgactgggaggagccttctggagtccacagcacttatttttgctctattacgattgtttacatgttagtcttttttttttttttttttttttacattttgcaagaatctaagccagttgttttgtagaatgtcacacattctggatttgcgtgattatttcctggttgtatttgttttaattattttcagttatctctcttagttttttcttttttgttgttgttgaaaaaagggttttgctctgtcacccaggctagagtgcaggggtgtggtcatggctcactgcagccttgacctccttggctcaagcagtcctcccacctctcagcctcctgagagctgggactataggtgtgtaccaccacacctagctaatattttgtattttttgtagagatagagtttcgccatgttgcccaggccgacctcaaactcctgggcccaagtgaccctcttgccttggactcccaaagtgctggattaggaaattaggaaacgactaggattataattggccctcttaatgttgtttaatttgtaaccctaatagttgtattaccactgggacctgtcttgccttttttctgtttactgtaattttatttaaaaaattgtgttatagtagaagaggatcaaggatgaatatattcttaccttgtttgggttaattttgcattctaacctcatcagggattttcaaatctaattattatttttgtgtatttcctttacacttgaagggaagataagtatagggtacagtaaaagggcgactaaatgcttaaggaatgttttcatcaactgttttctttcactgtgttattagtaaagaactcttttcaactctgcttggtattgagaaatttttttcctaaaatatatgattcctgatatttatagttagaacaaaaagaatactctgtttagtatctcggtaatcacttctgaacatgaattcttacggctcaagactttggatgtagggcatctatagtttcatgtgggataatcatctttaaaacataatcattcaatattggcttgttttgctgctttctcacacaggtggagtacaggaaaataccagttgttcaagtattaagtatttgttcaacttccattatttgagatgttactttgttgtattgcacatgactaatttactcttaggaatatttactgaatgtaaacatagcacttttgcataacataggctttgcttggctcagtttagtaagagacacagaaaggctaagttacatttcatcagtaaatgttttttgagcacctgatgtgtaccagacactgttctgaggcataagtcagatacaattcctaccccctaaggtatgtgtagtcttgtgggtgaagtaaaccagcaattataacacagggtgatgcatgccacaacaggggaacacacagaagactctgggagcccagggtggaaatctaaatcagacagagctaaggtgcttggaatgacaacgaggcagaacatttgggtcaagaaaattccaaactgagggacattggatgagaagtcacagaagcaaaaaatgttacccatttggggaattgcagaggtaaagctaaagcaatacttcttgaggtatggtcttctgtttgcctttgtcataattatctgggggcagctgggtgcggtgactcacgcctgtaatcacagcactttgggaggccgaggtgggtggatcacctgaggtcaggagttcgagaccagcctggccaacatggtgaaaccccgtctctatcaaaaacacaaaaattagccgagcatggtggcgggtgcctgtaatcccagctactctggaggctgaggcaggagaatcgcttgaacccaggaggcggaggttgcagtgagccaagattgagacattgcactccagcctgggcgacaaagcgggactccatctcaaaacaaaacaaaaaaaaataattatctgggagtgattcttaaacctccaggtgattcttagccttctaggtggttctctgactctctaaagtatgagaaacattcgtacttaagggaatgaagaaggaatgaaaataatgatgtaatatatgttacattaaaggtatgtgtaaagttctatgattaggttaatttatatagactgtatgacattttcatttaaaatctgtttattttcctatccataagtaatttctttttggaagagaaattggcagaagggatgggtattactgtaaatcttgtccttttatccccagatgattctaaaaacaatttaccagtctgttaatgttttattcattgaatgctttgtttttcttttagtccaaggacaaaatgatgagaggctctcgcagaggatgtgttagactcagagtgagtatttattcatttttatgaaaatcaattttgacagaagaaaattgtattctgatagaattatggaagtctaaatttagtttagcttccttacataattgttggggcaggtatctaagtctcagagagaaaatgtgatttctccaagtaactgttagtcagtatcagaaccaggactagaactcagttattttggcccatgattcaatgttgtatttatgacttaatgcatgttctgattttcttaaacctctactttacagacaagagacaagggctggaaattaagtgagttatggtgttggtggtatatcaacagtagaaaaaatggaaaaatcccaactgttagctgccgctgctttgtttttcctgttcagcactatttaatcatggtatatatagcagtgctgtccagtagaaatacaatgttagccacatctataatttaagattttctagtaagccacatttcaaaagtaaaaagaaacaggcaaaattaatattttatctaggtcagtatatctgaaatattgttattttaacatgtgattaataaaaaaaaattaagatattttacaatctttctttccatactaactattcaaaatccagtgtgttttttacacaaagggtacatctcaattaggactagctgtacttcagagaaggggatcaatagccacatgtgactagtggctgccttatggtgcagacctatagcttcatgctgctttcagtttccaccattgttcaaataggtaaaggcaagaaagaatgcatggctagggatgcagtttctagtatcccattgtatatgaagaaaagtggcctctatcataactaggttaatcagcttctaggaaccttttcttcaggaccctgttgacttctttcttccacctttttttctgcatccttacttttgaagatgtgaatatatttggtaaacatattattgcccttgttaacagtccttgatagaactgggaaataccgctgagaaagacaccaaattataatagaaaaatcctggcactgagataggagtaggtatgggagatttgcaggatggaaatgagacaggcttgtttcaatcagatggtatatatgtgatagcacaaagatttttaaaaattcaacttctagtttttgtttttttttttctaaaattttcctttggtttctcttttgtctgtttggtgtaattacttttctaagcacttgctgttgacctcagtcaccagtcagtctggtattaactgctcttttggcttgagataagttcagtagtgagactttagcagaactgtcttgacagagcactgcagttgaattccatttggatttaggccactgtctcattgttacagttaatccactggttttgtctgtctttatttttttgtttttgcttttaaatgtagcttaattaattattaacccttctaactaccaccttaagaaatagaattttgtcagctrtacctgaagcctctccacgtgccccaattaaataaattacatcccttatatgtctcctaaagtaatcacttcttacatttggttataacttttttacccaaatgtgtatccctaagtcctatagttttcttacctatttgtttaacttgatgtcttttgtttacaatttgtctgttgaagaatctggaccggctgggtgctggagctcacgcctttaatcccaacactgggagaccgagcgaggcagaggatcatttgagcccagtagttcgagaccagcctgggaaacatagtgagatccccatctctacaaaaaatttaaaaaattagctggatgtggtgacacatgcctatagtcccagctacttgagagactgaggcaggaggatcacttgagcccaggaagtcaaggctgtagtgagccataattgtgccactgccttccagcctgggtgacagagtgagaccctgagaccctatctgaaaaaaaagaaaaaaaaaaaaggaatccagaccctttgacctataagaattttccatagtatagattttactgattgcacggtggtgcagttcactacattcctctgtccattgtttttgctgcaaattggcagctggatccagagactggatcagacttaggtttgatccctttggcaagactgtaggtggtggtgtgttcttttagcaggaagaacatagtgtctagtttttgccctttgttgatattagcagctattgatgttcagtacctacacccattaactcactgagggttgcaaaataatgacaggctatcattttgttttaatttttatcagaaataattttataaggagacatttcatctattatttggttacccagtggtgcagttaaaataggcaagatgactgcttgattatttcctattatttaccaaattttaaaggtaatgaattggcttcaaaaacaaccacttatatatgtgtttatatgtatatttccaaaagaattggaaacagggactgaaacagatgcttatatatccatgttcataggatatataacatggatatatagcattatttgcaatattcatagcattatttgcaatattcacagtagccaagaggtggaaaggatccaagtggccatccactgatgaatggataaaaaatgtggtatataaatacagtctattattattattattattattcagtcttataaaggaaggagattctgacacatgctgcaacatagatgaaccttgaggacactagactaagtgaaataagccagttacaaaaagacaaaaagggtatgattccacttatgtgggattcctagagtagccaaaatcagagacagaaagtagaatggtggtttccaggggttgggagtacgggagatggggacttagtgtttaatgagtatggagttttcagtttggaaagatgaaaaagctctggagatggatggtgatgatggtgatcatcacatcatgaacaatgtgaatgtcctttatgccactgaactatacacttagaaatggttgaaataataaatttcatgttagtatgttttaccatacacacaaaaacacccatatatttcacagttttataggtcagacatctctgttgggttttgtgcttaaggtctcgtatgactgaaatcaaggagttggctggactgggcccttatctggaggctctgaagaagagtcctcttccaggctcattcagggcatttgcagaattcaattccttgtgattgtagaactgaagccctgtttgttttttgttttttgttgttgttggctgtcagttgtgttctgctttcagcttctagaggctgcacgtattcttggtcacgtgrcctagacccctccatcttcatgtcagcgatgtgcattgaatccttctggtgctctgaatctttctgacttcccattcggctatcagctgcagaaaatgctctgcttttaaaagacctcatgtgatgacatcggattaggtccaccaaataatctcccttttgccatgtaatgtaacataattactcctgcgatatcatattcatggttttcatccatactcaaaggggaggagattatacaggggcaagggtctgtgagagtcattcttaaaattctgcctactacacagcatgacagagaagaaccaaatatacctgtgtttgattcccatttttacccattcctttgttgagtggaaaagggaagctatcataagcttcctgagctttagtttcctcttctttaaggtggagataatactcttcttgcagaattttgtgacgattaggtcctggcacatagatggaacttaataattagaaacatgtatgtgtgtgtttgtccctctgtgtgcacacacgtgcattttactaggctttgtagtattttccaaaaattaaactgccgaggcttttagtcaagaaatatcttgagggtttgtttacaatacagttaccaagtccaccttctagataggctgctttagtgtagtgttctggaacctttatttttaaacagattatccaggtaattatgttgtgtaaccaagagggaccactggtgtagaaacaatcagagagacctggggctgaattttactcagctcttcccttactgactctgacattgggcacatttcttaacttttatgaggataccgtgatataactggtacggttgtwatgaggcttagcaattatgtatgtataggaaacagtaactgctatggatgacaacgatgatgatgatgatgaatatggtagtgatactgcatctagattccaaatgagcttaatgagctatcattgactgcactactgatcttgcccttgccccatccatcccatcctatatttgaatcacactatgtttcttccttttccctcactgtgcttcttcattcctcattgcttctgactttttctttttcttatatcatggaagttctgcaccccctatctgatgagctcatcgcttaagagacttttcaaatgttacctcatctgtgaagcctttctaatccgcatacttctaacaggtttaattctcccctatcctctacatttttttttccttcttcccccactcctgcttctcctccccctcctcgctctccccccaacttttgacaggatcttgctctttacccaggctggagtgcaatggtgcgattatagctcactacatccccaaattcctggcctcaagcaatcctcctgcctcaacctgctgagtagctaggactacaggtgtgcaccaccacacctggctaattaaaattttttttttttttagagacgaggtctcactgtgttgcccaggcagtcttgctaactcagtctcctaactcccgacctcaggcagtcctcctaacccagtctcccaaagcattggaaattacaggcaccagcgaccatgcctggcctatttttttacatttgtaatttagagccatgaaattacttgttacattgtattacatgttaatttttctgttgtctccacttggataataagttcctattcagtgtcacagttgcctggcacataataaatactcaaaaatgcttattgttaattttatgtatttatgaaaataatcagtaaatgttgggaaatttgcctttactatggtttgcatacaaaagaactgtgggagttatttatcttaaacataatgtgagccagtggtatgatgtattttctaaaaagaacaaagcaaaacacccacatgaacatagggtacataaaaggagaatggagaaagggaccatagaggaaacccagatcaggtgctgtgctggatgattttcatacacattcctatcataaccctgtcaggtaaatgctcatatttcattttgcagatgaggagactgagacacaaactactcttagtaacttatcaaggtcacataggaatggtgaatctgagattggacttgggtcttatttcaaagccctgttcaattcttaatgttactaggctcccattcctctggactagaagagtgaattcagatactgtaagtcattataaggtagtgtcaaaccagtggaggaaagcagaaaagtgaaaaaccttctttgtgttggttatgaagtgtgtgccactagacggtgccctttccttgatgaagaaataaaatgttgcttgagtcctgtggtctgatcctctcccatactagtcaaaaacaaaacattggcattttcagataatatctggaaaatggagacatgacaacattaaagaggcagtgtggcccgggcttggtggctcatgcctgtaatcccagcactttgggaggctgattcaggaggatcacttgagtccaggagtttgagaccagcctgggcaacataatgagacctcttctctacaaacaaacaaaaaaaatgaacaaaattggctgggtgtggtggcttacacctctatcccagctacttgggaggctgaggtgggaggatcacttgagtgcaggaggtcgaggctgcagtgagctgagatcatactactgcactccagcctgggtaacagagcaagaccctgtctcaaagaaaaaaaaaaaaaaagtagggtgtagtggcaaaaacaaatacagggcatgtatgtaatgaaattcagacttggattctgccacattctggcgttgtgacttgaggcaacttttcagctctgagccctatttcccatatctctggaatagacatcatgccatttactcatagtgttgtgagtaccagattagttaatacattttgaaaagtactcaaacacggtgtttggagcttaataggatctaaatgaatggtagttttttttttgtaattcataatttctattaatacagatgaatctcagattctgaagaattctaaagggccttaggaatcaccaaagaaaaatgaattatattaaacaaagttttaatggtaaatttattatacatctttgaaaactattaatctacatgtgatttagagtgaccctcttttactccatccagtgaaactaagtattccatttacctgttgtgctaggtatcagaattgaatgtgatttcctgagagatgcattatctattctcttttcttttagtctaccacaagagaggtcggtggtgcaccatgacagaatattaatattttcagtaatgacttctgttagtgccctatttcattgataccatcacttttttttttcacaatgcaataaggtgttatttttaggttaatgtataaccttaagaatgtcttcctttttcccttggatctgtatcctgtaagaacttttatcaattgtcttgttatttcacagtgaaaagtcactctattcattgtggcttttctcgttaattcagtagcctttttgtawgctctttctcttctctatgaatttaatattgaaaatatcctcccttgggcaagatgtaaacatctatttaatctctgtgattggtacatagatgtcattagtgctctattttatgaatgtttatactatttcataattacaaattaaaaattaaatgaaaaagaaagtgatggaagaatatattccaggcaagtgctaaccataagaaagctgggaaacagaattaatatcagacatagaatactaagaaaagaaattaaattgttatggaaaaagagaataccaaagacgcagtatcacatagataacattctttgacaacaatggaaaaaattagaaatcccttgatgaaacagtagccacccacctcacacacatacttctgaataattcattggtggaagtagaaatgataatagaaattgtgaaatatttaagtctgaacgataatgagaaaaccacatgttaaaactgcatctatggaagtctgatttataatcttaaatgaatatattacaagacagattgagaattaatgatctaaacattaaaattttaaaattaggtaaagaaaagaaatagcaaaggaaatagaaagaagaaaataacaaaaagaatacactaatgaaatgggaaataaacagtagagagcataaaccaactgaactgtgattctgtgaaaaaagtaataaaataaaccctggttagattgggaggaaaaaaaygaaggcacaaataaataatattaagaatgaaaaaaagaaaagtacgtaatagtagagatgaaaaattgtcaggaagctactacaaatacattttgccaataaatttgaaagcttatatgaaaatggataatttctcaaaaaagcataaatcaacaaaattaggctgtcaaagaacttgacaaggtgattctaaaagtcatttaaaatttgggaaaggggagagatatttttaaagaataaggagttggtggacttgccactccagatattaagtttttaactgaaactatggtaattaaaatggtatggtggtgttataagagacagaaatagattagcggaatggaagagaaagctgaaaaacagaaccatttggatttgggtcttggagaaagctggaaatttggtatatgatagagcgttacaaatcagacattatcacttagtaaatgaaactggatcaattgggtgtccatatgaaaaaaagaagattactctttaccccatgtgatacacaaaaacaaatttcagatgtataagaggtataaaatgaaattttaaacttagaaaaaaagcataggtgatatctttatgatgtcaagatagagcagaaagcataaaccacaatggcaaatatttgtggatttgacaacattcaaaatttaaaacctttgaacaaaaaaagataccacagtcaaagggaaaagacaactcatggatagaagagaaaatacttaaaatacatcagttggcaaaggattaatattctgtgtatatataaataactcctgcatattaataaagaagacaaaaagaaaatccccccaaatgcatacaaatctgtaaaaaagacaaaagaattctcaaaatgtagaaaagttacatactttcaattcatgtaagggggaataagaaggtaaaatattgaatgcaaaagcaaagcaaattgtttaccactctcttactggcatctaggccagtgcctagaaattcaataaatacttgttgaatcaatgaatgaatgatgctaaagtaggtcctccatgcagcgtcttctttagtgagcaggttgaactgcaagccattctgctcccttctatattattgattctgtcactcctctctagactgtatgttcctccagggcatagacatgttttgtatcccttggctgttactgttcttggcccagaataggtatttaataagtttgttgaagtaattagtgaatattgtttactgtcaccatgtcctgttaagaacaggctttggatcagggtttgcaagacctagtattcttctcccttttagttgttggacttttggcaaacttaaaaaaaattttttttaaacctgagtctcagtttcttaatctctaaagaagagtagtgacctgttctgcctaaatctcagggaccacatttaaatgcactatgtgaatgtaaatagacttccaatgtcatttaagcagtgatgaaaagtatgtggttgtagagttataatgggagtagctatgctgtgtattcttagcactgtctacattccttttaggagcctgtgagcaatctatgtctcagaggagtcatcattcttttttattatctttggaaccagttcaccagcctacttttcgcaaagggagattggccccaaaatagccagaattttgtttctctttttttaccccaagccgtgagagcaaaactatctgtctgtctttggcatcagaatgatgattcatgtctgaagtatgtctgtgtgtatagaaaaaaaacgaaaagagagaaagtcaggaaattcatccagtgggacaagactgtgtagctctagtttctttttggtgccttgatagtgtgaccctggagcaacaggcaccttggtgacctcaagtactgatagaactttaagaagctgaccatctgaaaccttcagaaaaaaatcatgagaggtcactgaaagatgtatatgtttattatgttggcacaatgggggtcataaaagtggagttgaaagaaaaacattgatatttttgtgggttagtataacaaataacttttcttaacaacagaacaccatttcatatatagattatcaaagggagttttgctttaccagatataatcaaaaaaatactctaaacccagataaagggagaggaaggatgtctcaggcagagggaacatgtgcaaaaaatggtggtaggagagaaattggggcaattggtaaaccttaagctatttaagtgtagaatagagaggtaggcatggagcaaatcactaagggccttgtaggctaggctgtggcggagagtgaccacatcccttaaaccagaactgcttgagaatgaaagggggatctattcattattgagccaggacaacaggaataatccaggattgttcctggcaaaccaggtcgtatggtcaccttgtgtgaaggtgaagaagaaccattggtgtggtaacatatcctccaaggaatggaaggttaaaataaattataaactagaggattggacagctgaataatcttgactaaaagggaatgagagaggctggccaattgcttggttaggacatggaattgaaaagggctgttgttaaagagtataaagacttgagtcttgagtatgtgtaaatgcagttgggaaaaagagagagagagacagagaagagaaatagagaccaggaagagagagacagaaattgaaaattggcagggatatggagcatgagtgtggaaggactgggttttcgatagaagaatggatgccttttccattatgataagtggaaaggaagcatgctgggtttagatgcaagtgagtcttcaggtgggagggcacatcaggaaggtttagaatttctacccgatggctgcttttgttgttgggagtcctagccaatgaataaagcaataaaagacatataaggtgtaaggcttggagtagaagtaataagactattattcacagcaacttaatcgagcatatggaaaatccaaaagaatctatagatataactattagaattgagaattgaatctagcaagataagcagatacaaagtcattatataaaaatcaacgaattttttttttttttttttttgagacagagtctcgctctgtcgcccagggtggagtgcagtggcgtgatctcggctcactgtaagctccacctcccaggttcacgccattctcctgcctcagcctcctgagtagctaggactacaggcgcccaccaccaggcctggctaattttttgtatttttagtagagatggggtttcaccgtgttagccaggatggtcttgatcacctgacctcatgatctgcccgccttggcctcccaaagtactgggattacaggcatgagccaccgcacctggccaatcagtgatatttctgtatactaacaactggcaatcagaacatgaatttttttaaatggagaacatttataatagcatcaaaaagcatcaaatttttaggaataaatattaacaaaagatgagtgagacctctactcaggaaatgataaaacattattgaaatttaaaaagacctaaataaatgacagtctatttatttagactggcaaatcccagtttatttctagtcatttgagtcattatgctggcaagtgtgtgtgtgtgtgtgtgtgtgtgtgtgtgtaaaacgtgtgtagctgactaaaaatttatgaagagtcaagagtatccattcctgattcctgccttctcagccaacatacagaacccagtagaaatggtgatttgctttcctctgcccctttggggatggctggctatgactatgttcaagatgtttatttattaaaaaactttttttaaattggaggatttactccacctgatatccaaatgtaaagccttccagaagataatgtaggagaatattttcatggccttgggactgggaaagacttcttaaaggagacatagaaagcagaactataaaatgtaaagtcaatacactgtcctacattaaagttaagaattcttcatcaaaagatatcattatgtgagtgcaaaagcaggcaacagagtagaagtagatacttgcttaatttataaccattgaagggctcatacccatgatatagaaagaactcctacaagtcattagaaaaagatagtccagtcttgtcaatggagaagaaacttaaactatttcacaaaagaggatcttcaaatggtcagaaaccatgaaaacatacttaaccttgtcagttattagggaagtggaagttaaaaccatgatgagatgtcactacttacctgccaagaataactaaggtgaaaaactgttagtgaagttattggaacagttgaaactgtcgtataccactgatgggagtatagctgacacaaccacttttgaggacgatttgatagtatctcctaaacctgatatatgcatatcctgtgacctagcaaatttactttcctagatttgtatttaatataaatacatgtataacaaaagatatgaataagaatattcataggagctttattctaataacgtaaaactgaaaacaacataaatgtccatgcacaatggaattgataattgtgggtctatacagaggaatgatatatatagcaataaaagtgaacaaactactgcttcatgcaacaatatggatgaatcttacaaacatggtgcatgaaagaagccagacacaaaggaaaataagtggtgtgagtccatttgtatacaattcaaagacagggccaggcatgatgactcctgcctgtaatcccagcactttgagaggctgggatgggtggatcacttgaggccaggagtttgagaccagcttggccaacatggtgaaccctgtctctacaaaaaatataaaaattagccgggcgtgtggtgatgcatgcctgtaatcccagttactcaagaggctgaggcacaaatatcacttgagcctcagaagcagaggttgcagtgagctgagatcatgccactgcagtccaaccttggcaacagagtaagactctgtttcaaaaataaataaataaataaataagttcaaagacagactaaactaattgttatattagaactaaggatagtatttatctttggaatggagggttgggttaatgattaggaagtgttacaaggggagcttttctgttcattgagctgtacacttgtgatttgtatatatgttacatttcaatgtagtgttattttcagatgagatagtatatgtaaaatgcttagcataatgcctcactcatgaaaatgagttcagttcaatagctggcagcattaactatttactgtggtttagtgctctgtgatgataagattcacggcagtgttatccaacagacctttctgcagtgattaaaatgttctgtatttgtgctgttcagtttcatagtcattagccacaagtggctgttgaacatttgaagtatgactagtgtgactaagggacttactttatttatttatttagtttttgagacagagtttcgctcttgtttcccaggctggagtgcaatggggcagtcttggttcacggcaacctccagctcccggcttcaagtgattctcctgcctcagcctcccgagtagctgggattacaggcttgcaccaccatgcctggctaattttgtatttttagtagagacggggtttctccatgttggtcagactggtcttgaactcccgacctcaggtgatctgccagccttggcctcccaaagtggtgggattacaggcatgagccactgcgcccggcctgagggacttattttaaatttttacttaactttaattagaacttaaatacccaatatgtggctaatggctattgtattggacagtgtggatgtagggtttttgtcataggaaatgaaggactgaaggagaatagcaatgtagttcatttgagtaattcaacaaatcaagacactgagagaccagagcatcagatcaattgtgcatatatacactgaagaatgctcaggatcatgacaagacctgattggagtaggagactgttagctaggttcgagtcttcaaagaagccttcgattagagaggggaaagtgcaaaggtccagaaagtaatgtttttttccatatagactatctaaagtacgcagcgagaaatgtttctgcagcagcaacaggtgctccagagaaatgttttgtgtatatatatatatttttttagagtctcgctctgtcacccaggctggagtgcagtggtgcgatcttggctcacagcaatctctgccttgaagtgattctcctgcctcggcctcctgagtagctgggattacaggcatgcgccaccatgcctggctaatttttgtatttttagtagagacagggtttcaacatgttgaccaggctggtctcaaacccctgacctcaggtgatccgcccgcctcggcctcccaaagggctaggattacaggtgtgagccgccgcacccggcctccggagaagttctgtacaacaaaactaaagtagtaatgtggtcattggagatctgtgagagagaagtttggtgccgtgagaggaaggaagccagcttgcaagagtggatggaaggttaaggtacagccaattttcaaaaagctcctctctgaaagcaatgtgaggagatgtggtagctagagggagatgtgggattttgcttttgtttaacaaatggtgagaaatagagcttgaagaatgaccttaaaaagtgaaattgcttggtgtttttaaaaatttaaaatattaaaataattattttaaaaatttaagatcctcagtcatactagtcatatttcaaatgttcagtagccacttgttgctagtgactattaaactgaacagtacaaatacagaacattttaatcactgcagaaagttctgttggataacactgccgtcaatcttgtcatcacagagcactaaaccacagtgactagttaatgctgccagctattgcactgaactcattttcatgagtgaggtatgtggaagaaatgtggaagctgaattcatatggggtgtctgtgaggtggggcagaaggaagctgggtgacgatagtggaaatgttggttgggccagattttgaacagccttgaatgacattatgaagtaatgctgactttatctgttagttcatagagagccaaggaaggttttaaacatgtgagtctctaataagagtctgtgcttcagaaatattactccggcaatagcaaggactgtgaactaactgtaaagtgtccagactgaaggcaggcagattgttaccaaacaagaaacgatgaaagcctgaattacagaagtagcagagaggatggagacaagttggtgaacttaatagttgagaggtagaatgagcacagcctgtggtaatggaacaaggggtagttgtacagacctggaggtttctaccagagttgactaggtgacttgttgagcttacatttgggttcttaattaaggaactcaagagaaagagcaggcatttgagagtggagtgagttgcaatagctttgttgagatataatacatatactatgcaatttatcaacttggagtatccaatttatgtttttagtatattcacagagttgttcaaccatcatcatagtcaattttagaatgttttcatcaccttgtaaagaaatctagtatacccattagcagccattccccatttcaccccaaccctcccagcactagacaaccactaatctactgtcagtctatgaatttacctattctggacattttttgtaagtagaatcatgtaacatgtgatccttagtgactagcttctttcacttagcatactgttttcaaggttcatccagagagagataacttttcgccctgtattatagtcacctctttgcatgttttatctcctgtactggatataagtgccttgaaggcagggcatatattccagagctgtatattgcatatattttggtatttagttatggctcaggaaatatttgatacatcacaagttagaaggttaactcagttaatcacaaattacattaaccagaatgagctgtttctgcacgtgcttacccactgaagtgtgtctgtatttgctgtcgtggaatagctaggttccatgccaatggtgatctggtactggttctgctgttaaggctttgtgtgaccttgggcaagtcattatactctctggagacactttccctatttgaaaatggagataaaatttcctaccccatctgacactgaggaataagtaaagtaattcaagtaggtggaatttggatagagttggggttcatccagatagcctctggggaagaaatgaataaatgtttgatcctattccctaatattcctggtataggagtagtccccctatgtagccttttttcatgggattaggtattttgtccccttgagtcatttcaactcccttgtcaaggtctctggttttatcaagggcacacggcttctcttatcacctgaggcatttgacctattctgtgttctgtagtctttctctctggaatacttaagatacttttttcttaaggacattgaacaatagattccctattttgcttagtttcctgtctcttatcttaattcctgttgtcttcacagaatgcatgtagttgaatattaagaaaagggggccaggtgtggtggcgcactcctgtaatcccagcactttgggagactgaggcaggcagatcacttgaggtcagaagttcgagaccagcctggccaacaaggtgaaaccctgtctgtactaaaaatacaaaagttagccgggtgtggtggcacacgcttgtaatcccagctacttgggaggctgaggcaggagaatcacttgaacctgggaggtggaggttgcagtgagccgagatcgtgccactgcactccagcctgggtgacagcctaggcaacagggtgagactctgtctcaaaaaatagtaataaaaaagtattttttaaaagggttaaaacctacccagtccgccttcccaaaacaacttgtaaattcagttccccattgtgtgtgcctgcccaccccccagtttggagagttgtttgtgctcttatttagaaacatatactaagtatgtacttaagtgccatgtatcaaataaaatagtccttgatttctaagatttcatagtggttctgtaggaagatgctgacatatgaacagataatcacagtatactgtgaaaagtgctcttggagggcaatgtacaagtggttatggaagcacttggaagaaggggttgggacagtgttttgaagcaaatgtcacctggcatttctacactaacaagtatatactatcacagaagcagcctgatgaagagcacctgccttctttcagccttacaacaacctggtgaggtgtaggtttttgactcccattttagagagcattctgaagttcagaaaggctcagtggctggctcttaaaacacagatcctagattcagcttctgtgtttgtcccttccgcctcccagcacatctatgcccttaaggaaggcatagaatgtacctgtacatgrtactagagtgtcctgccagctcctctcctttagttctttctccttaagcaaaactagagtctcagtttcctcttttctgtgtctagcctgcttccagtgtcgttggtgcattgagtattccagggctatagcagtagtgaatattgctgatgtcattgtttgccttattgggattttgctctttgtttcacagggagctgtgattggtatagacgatgaggacgacagcaccttcacaataactgttgatcagaaaaccttccatttccagggtgagctgaaagaagagattctttctcttcatagtcccatctgcttcttttcttctcttttgggttgtttgctggatgacttgaatggttttgcaactgatcctgcatgaacgagtgcataggaacattctggatgaagtggtactgcaggttaggcagggatttgtatctgcaatggatgtagatcgatttgaaacgactgtggatctggctgcagttggagatgaaaattttaaaggataaaaatcagtgaagggagagagtaatgggctgctgctgctgctggcttgtgtttacagaaggttgctgatcttctttatcaaggagtatggttctgcttctgcatgaagagtctaaagactgattgtgaaggttgcagtgtttgtctgtgtaaaactcaaaatataaattaaattgaagcttagtggcaacctttggcttaaaggttttgctctgcttcaagaactacaagtttgcattcatttcatctgtatttctgtgttttgtttgccagccatcatttctctgctattatcctttttatagttaaatgccatctgccactgctatgtttcggcattgcatgctatggttcaccggtagaaagggtaaggtactgtatgatcattctcatttcattttgctttgaaaactctaaaccagcaaataaaagtcaattttaatgatcttgtcctaagtacctcttgtctattaggagtgactgttagttttagtattaatggttttgttattttgcctttccagagtaatctctcttttatgtttcgagcagtycaagaaacttagaaatgaaaagatttggagaggttagcactttctctcaactacaagtaacagtgcactgttagagatgctaggtatgccaagataaataaatattaaatacatttattgcttaaaaatgttttggttatgaagtctaacagaggccagatatgttatatgaggtgtttaggcagctgttgtctttttgtgctaggatagtgaattgcagttatttttcttcattgtcttctttcagaaattgacagatagtaatgaaagatgcaggttatattcaacaaacctaaaccagtgtactcaatagtgatatctctaatgctttcttccacataaccttaaaatatttactgtgtttgatgatataatttattcagagctgctttaataacgatgctgtcctgaaattttctactatatttaacttcataaaacattttaaatcctattatgaaagcccagagtttttatttttaagttaaatatgtaatgctgcctataaatcagcaggtaattcctacactctggaactctttacttgaatgaagttgaatattttaatgcatttcaagaaagagctgctgggtgcaggtaaggctgcagtatggaattctcttctctgcagttactaagaaggagacacctcctttggaccctcagaagctgtacctctaccttctgatttacttttaaattatttatgtcccctttggcactctcatacttatttggcttataaaacaagaaatattcctcaggaaggatttaaatgataagagttatgcacattttaaaaatggattcatagttctgaaactgtcagaataattagtttattttctattgtagtagttatgggagttttagcatgagatctggattttgcaaagaacttggtaagactgtatttttttttcgttaatgagagctatttcacattcataggtccttgatcataaaatccctgcaaatttgatacaaagttatcagtgtctgagagatcttaaattcttgattagaattgaaagcaaattttagctatatatgtgaacatatctttaaatgtgctgaagtttttattgaatacaccagtttttttttaagcaaatgaaatatcagttgatgcattataaaacaaattctactgtcaactattaaagggaaagctagagtttgttcagatacattcatttattcattcaacatctattttagacattattctggggatacagtggtatacaaaacagataaaattccttgccccttgagtcatccattccaggaaaggagaaaggtaatcaacacgatcaacatgataagttagtaaaatataagtaaatgagagtgataagtcctggggagaaaaaaataaaatacgaaaggagaaaatgaaatagaggtgaggttgcagggagaggggaagtgttgaaattttaaatagggtagctagggaaagactcactgagatggtgcctttttagtgaagagctgaagaaagtcagggaacaaagtatatggctatgttggtgggggaggtggggtgaatacatcatttctttgcctggaatgacgtacccaccctgccttcctccccaacacagtcatatactttgttttgtttttctttttgtagtttatactcatatatttgaagaacagctagaggtcagctctggctggagtgcagataaccatgggtggagagtaatggggaatgaaatctgagaggacacaggaagtccaaccatatgaggcctttataagggcattgaatttgactgagataaaaggccattagaaggttttgagcagaggagtgacatggtgtgatttatgttttaacaggatgactctggccactgtgttgggagtaaaattcagaggggcaaggacagaagtagggaaactatttctgcagtaagaggctgttgtaaaccagaagagaggtggtagtggctcccacatggtagcagtggagatggggagatagtgagaagtggtcgaattgtgtgcatgtttaatcacctttattgaggtgtaattaacatacaataaaatgtacacaatatacagttaggcattttaatcagtttatttactcatgactaccaccacaatcaagatatagattccatcactccaaaagattcctttatgctcctgtcagtcagtccccagccccagcccccggccccaggcaactacttttctgctttctatcattgtagaatagatgttttgttaggagaatttcacataaatggaatcataccatatgtactctcttttctggctttattttagctcagcataatgtttttaagattcatctatgttgttgtatatattaatagttccttttatattgctaagtaatacttcattgtatgacagtatatttattctgaaggttgagctgtaacatatgacagaaagacaagtctaggttgagtaacaagaatggagttgccattaactgaagtggaagattgcaggaggaactagttttgggagggtgagggaaatgtgggcatcagagcttagctttggacatgtttactaaacaagttttaaatgtccaccaaataggcaaatggagatgtcaagtaggcagttggagttcagtggaaaagtttggtctgcagaaatagagttgggagtcattggcacatagatggtattgaaagccacaagaatttgggaataaatgttgagagaaaagaggtccaactacagagccctggggcactcaaacatttattgagagggcgcaagatgaggtaaaaccagcaaaagagattgagaagaagcaaccaaaaaggaggaggaaaaccaaatgaatgtggtactttggaagccacaagaaaaggtgtttctaggaggagagaaggatcagcaactatgtcaaatgctactgacagatcaaataagatgaggattgagaaatgattacaggatttaatactgagaagtttattggtaaccttgagaagagtgattttaagataggagtggagacagtgcattcaagttttgatgtaaagggaagatgagaaatatagcagtaaccggaaggggaaatgggagcaagggagcttttgttttgtttttgtaggataagagaaataatagcatttctatgttgttggcagtgattcagtaaacagggaagaattgatgatgcaagagagaaaggagagagttgctggatcagtgtcctggagaaagcaagagagaatgggatctaacacacaggtgggagcagtgtctttggcttggagcatgggcagtttattcatagtgttataacatagctgtggttgttgatgagaccttaaatagattaaagcagtgataatagggaggaaaatggactagatttgagattttaaaaaatctataggaactggggcacagtggtatgcacctgtagtcctagctattcaggaggctgaggccagaggaccacttgagcccaggagtttaagactgtagtgttctatgatcacacctggtgcatagccactgcactccagcctgggcaatatagtgatgccctgtctctaaaaaagttttttttttttttttaatctgtaggaactggtaattgctcagaaatgggaggtgagagaatttgggtactaagggtgatgctcttggcttggcttactgttggatgttgtcaactccttccttccttccttccttcctctccctctctctttctttcctttgttttcttcttcttctttttttttttttttcagggccttgctctgtcacccaggctggagtgtagtggcatgatcatggctcactgcagcctcgacttgctggactcaagtgatcctcccaccttagcctcccaggtagctggaactactaaaaaaattagcctgcaccaccatggctgactaattttttttttaataaaaaatttttattgtaatagttattttttgagttaaaatttatatgtgtgtatgtttaatcaactttattgaggtataactcactatgttgccagggctggtcttgaattcctgggcccaagcaatcctcctgccttagcctcccaaattactgggatttcaggtgttagccattgtgcctcactgtcagcatctgaaatagagaatataggagagcagaggtagtggtgagggacctcttatgtttaaggtgtctgtgggacacatagatgatggtaattggatctgagtctgggctggaaatggagatttgtgatcgtcagcatactgctggtaggtagaactagaagttgaaaatatgaatgcctaacggctaggcagataagtacagtcaagtgctgcataaggacatttaggtcaacgatggaccacatatatgatggtggttctataagattataataccatatttttactgtactttttctatgtttagatacacaaatacttaccattgtgttgtagttgccctcagtattgagtccagtaacatactctatagcagggcatcaaatcttttgccttccctgggccacattggaagaagaattgtcttgggtcacacataaaatacactaacgatagctgatgagctaaaaaagaaaattacaaaaaaacctcataatgttttaagaaagtttatgtatttgtattgggctgcattcaaagccatcctgtgctacatgcagcctgtgggcagcagattggacaagcttgcaggtttatagcctaggaatgatagccaaaccctatagcctaggtgtgtagtaggctttaccatctaggttcatgtactgatgttggcacagtgatgaaattgcctaatgatgcatttctcacgacacatctctcagaacagattccagtcattaagcagtgcataactgtaaatgagtgaagagtatggctgtgtaaagactagcaagttggagaggtcacaccctgtgtaaagggatagctgccacttagttccagacagttgtaggcttggaatgtttgcccattgttgtcagatcatccttttttttccaagagaagccagaaattaattaattaattaattwatttatttatttattttttgtgaatggggttgagtgtgtgtgtgtgtgtgtgaactctccagttttaggaacaattttttatgtagaccgaataaaatgcatctatgggctagataaaacctttggatttttagtctttgattaaagccatggtagtcttgagtgttatccttctggaagatcagagtgagaagagagctgatgattaaaccttggatcatactagggtggaactgctaacaggctcagaggaatgatcagagagtttaggatgaaagctgttagcttcaaccacatgaaattactgtttttaataggtgaaaagtagttgcacattagctgttcatatggctcaatctaatagaagactagttcttactaataattcgaaaaaaactaattatttgaattttaccttcaaataaaattttatctgtttaatgatttaatatcattcataatgttactgacaatatattgggataataataataatggttaacatttattgaatgtttattttatgagttttaactgaatagtgcctaccataaaataaacattttaactcatgcagttttcacaaccttatgaagtaggtactgttatactattagtgtttttattttattgattagaaaactgggagccacagacacatagctaatataagacagaactgaaatttgaacacaaacaattgtaccctagagccattttcctcttcattgttataaaatatattgtagagatttgtcaactagtttataattaacatttatcagaaaaggaattaagaggccgggcactttgggagaccgaggtggtgggtggatcacttcagaccaggagtttgagaccagcctggccaatatggtgaaaccccgtctctactacaaatacaaaaaattagccagggatggtggtgcgtgctgtagtcgcagctactcaggaggctaaggctggagaattgcttgaactcgggagtcggaagttgtagtgagccgagatcccaccattgcacccccgcctggacaacacagtgagatgccttctcaaaaaaaaacggaattaatataaaataagaaactttaaattacagtgcagtttaatgcaattaaaaaatttgacgctaattagccgggagtggtggtgatgtgcctgtaatcccagctacttgggaggctgaggtgggaggatgacttgaactcaggaggcaaagatttcagtgagccgagatcgcgccactgcactccagcctggccgacagagcaagactccatctaaaaaaaaaaaaaaaaaaaaaattgacaatgactgcaaaaatgataattatgtaaagtgacacatttgttaattggctagttcaaaccattccacaatgtatgtatacttcaaaatatgttgtacatgataaatacaattttaaaaaatgacaaaaaaacccaattgggcattgttaatgttctacatgttccattacttcgtagaaatattagtggcggtgttggtgtttgtggtagtggtaaaaactactattgctactaccaaatatctgttatgaaccaggcactgtataacaggcactgtacattacttacataattcctaaattccacagcctgtgagatagctttatgtctagttttagagttagagtaactgagtttcagagaagctaagtggcagagccaagattcgtgcacatgttggtctacatcagggattcttaaagtgtggttctcgaatagagggtcagcatcacctgggaacttgttagaaatgcagattcttgcgctctgcccctcacttgctgaatcagaaactttgggaatgggcccgctctagtgattctgatgcactcttaagtttgagaaccacaggtctggatccaatggttaaacatgttattccaatttactctcataacaaccacttacacataagaaggaattgtcctcaatttgtagataaagagaagtgagacacagagttaagtgacttgcccttgattttggattgtctgtatgtcctaacctatatattaggcatgtcttgccttaagcaaatctgatgtgtgaaaaatcaaataaaattttaaagataaaaattaagggtatgtatgtgattagttttccataaaataatccttcattttcaaaggactttacggaaaacttttttttttttttgagacggagtctcgcccaggcttgtcgcccaggctggagtgcagtggcacaacaacagctcactgtaacctccgcctaccgggttcaagcagttccctgcctcagcctcccaagtagctgggattagaggcatccaccaccactctcggctaatttttgtatttttggtagagacggggtttcaccatattgtccaggctggtcttgaactctggaccttgtgatccacccgcctcggcctcccaaagtgctgggattacagatgtgagccactgtgcctggctacagagaacattttttaagcagtgtgttctcaaaaataatttcagctgggcacagcggctcacacccgtaatcccagctctttgggaggctgaggtgggaggatggcttgaggccaagacttagagaccagcctaggcaatatagtgaggtcctgtctctacaaaaaaaaaaaatgaaaaaactcccctgagcatggtggcgtgtgtgcctgtagtcccagctactctgaaagctgaggcagatgagtcccttgagtttgggagtttaaggctgcagtgagctaggatcacaccactgcacttcagcctgggtgacacagtgagaccctgcctcaaaaaaataaaaatacgttttagtatgaaattggtttacaaatttatttgaatatactttcaaagcaatacaagttgcctaagacaaaagacataatttttaagcattaaaaaatgtaatgtaagtcttagtagaagttatctatggttggtttcacctcagttcattagagcttgcttatttattaaaatgcagtggccgggtgcagtggctcatgcctgtaatttcagcactttgggaggccaaggcgggcggatcatctgaggtcaggagtttgagaccagcctggccaacatggggaaaccccgtctctactaaaaatgcaaaaataggccgggcatggtgacgcatgcctgtaatcccagctactcggtaggctgaggcgggagaatcgtttgaacctgggaggcagaggttgcagtgagccgagatcatgccactgcactccagcctgggcgacagagcaagactctgtctccaaaaataaataaataaataaatgcagaattactacaaataaaccagttgttgatgttatggtgaaggaaagtgtttaattcagagaagttatattgatcaagtatattatggcaacatcagtgctactgcattaacatcaatcaatttagcaaggcatatctgcatcattaatcatttagtaaattataagactaaaccatggttgcaggcttaaagatcttctgctatctcaacactatcactagtaaacagaggccattatcagtaggactgttgactttaaaaaatttccctctgttgtttcatatttttgattttcatgtgataattattctccaaaatgaaaccaaataataagatatttccacactttatgtaagggaaataaatcagttataactaattttctaattagattttatcatttcaataggtgttagtagggaaatctactgaattcgtgtattgggagtttgttgtattattgaggagggtcggacttcactgatgtacttttcttcttctttatttgctttctgtacaagatcctccctaaatatttgaaattataatctttccaggtttaactaattagggactgtttggcttaatagctagcaaggttagagaggatagttttattttttgttaataattttattccaacatcctgttttccataatttctaagtagtaaaattaatacttgctcactttagaaatttgggaaaagtataaagtagtataaagatgatactaataatcattcataatcctaccacttgaagataattgttagtaacatggttgtgtatttccttctgatccttcagttgtttacagtaatcccctcttacctgaggtttcactttacacagtttcagttacctgtggtcagctgtggtctgaacatattcaatagaaaactccagaaataaacaattgataagttttaaattgcacactcttctgctccatcccacttgggtgtgaatcatccttttgtcccatgtatctatggtgatgatggtacctgcccattagtcacttactaagtaggcttctgggtatcagatttactgttgcagtgtactgcaatgtttgtgttcaagtagcccttattttatttaataatggtgccagagctctagagtagtgatgctggcatattgttataattgttctattttattattagttgttaatcttactgtgccttatttataagttaaactttattataggcaagtatgtaataggaaaaaatatatagtatatatagggttcaatactatccacagtttcaggcatccacagggggtcttcctatgataaagggggactattctgtatgtgtatgaatgtgtgcgtgttataaaattgagtcattctgccagcctggccaacatggcgaaaccccctctccactaaaaatacaaaaattagccatgtgtcgtggcttgcgactgtagtaccacctcctcgggaggctgaggctggtagaaccacttgaacccgggaggcagaggttgcagtgagccaagatcttgtcactgcactccagcctgggcaacagagtgagagaccatcttaaaaaaaaaaaattttgagtcattctgtataaataggttatccagattttcagttctaagtattatgtcatgatcctttccccatgacactgaatgttctaagaaaacatgatttttggctaggggtgatagctcacgcctgtaatcccagcactttgcaaggccaaggcggggtagatcacttgatcccaggagtttgagaccagcctagccaacatggtgaaaccctgtctctactaaaaaaaaagaaaaaaaaatttagctgacgtggtggtacgtgcctgtagtcccagctactagggaggttgaggtgggagaatcacttgaactcggggggcggaggttgcagtgagctgagattgcactgctgcactccagcctgggtgacagagtgagaccctgtctcaaaaaaaacaaaaaaaaaccatgatttgtaaaagttgcataatatttcattttataaataatatatttagccactcatctgtattgtacacatttttctccattttctccatttggttaatctttaaccaaatctctggttaactaaggatacttagattcataaaagaatttgtcagaactaaaagcataaatatttttaatatttctgaaacagtcttgcccaattgcgtttactcttctgttttcatcacacccctcatcagcacttagtattataattttaaaggcatgccaactcaatgtcactgcaaaaatatattttgatgtgtttgtttacttgtttactcctttgaccatttttttgttgttgttcatctttttttatatcctccttttttgaaagtaaaaggaaacagacttattcattaacrctatttattatttcagaaattgctgatatatttaataatgttttttcagtttggaatacattgcttggtaggtattagtgtgaggagtagattaagatatatagacaaaagcatttccctacctttgtatataatgtacctgaaaaaaatgcatggaagtaggctgtgtgagttgaacaaagacttgcatggtataggagggtatattcttaccacatactataaagtccttaatgacattttgccttttagagaaaatatttattcataagatttatttacacattttattcctttccttcaaaaatgaacatataggcaacggaccagagtctgatgggccaaattctatggattgtcccattgataaatatttactgttttcagcattcttaatgatttctcggttgtattatgtttattaaacttatgtttattattattcccattgccattttaatttttctgtttttctactaattaaagtaatgatagtacagccatttatggaaaacaggatgcaggtttctcaaaaaactaaaaattgaactgccatatgatccagcaattccactactgagtataaggttgcccctcagtatctgtggggaattggttccaggacccccactccccacccccagtaccaaaatcgcagatgcccacaccccttatataaaatggcacagtatttgcataaacctgtgcctattctcctatatactttaaaccatcaatagatttctagattacttaaagtacctaatagagcacaaatgctgtgtaaatagttatcatactatacttttaaaatttgtattattttggctgggcgtggtgactcacgcctgtaatcccagcactttgggaggctgatgtgggcagatcacctgaggtcaggagttcgaaaccagcctgggcaacatggcaaaaccctgtctctaccaaaaatacaaaaattagccaggcatggtggtgggcatctgtaattccagctactcgggaggctgaagcaggagaattttgcttgaacccgggaggcagaggttgcagtgagccaagatcacgccactgcattccagcctgggcgacagagcaagactccgtctcaaaaaaaaaattacattatttttactgttgtattattatttttaattgtttctttttaaaaatatttttaatctttaattggttgaatccacggatgcagaacctgcagatacagagggccaacatacatccaaaggaaatgaaatcagtatgttgaggagatatgtaacgcactccccgcattcactcattcactgtagcattattcacagttgccaagatatggagtcaccctaattgtccatcagtagatgaacagataaagaaaatgtgtggccgggtgcggtgtctcacacctgtaatcccagcactttgggaggccgaggcaggcagatcacgaggtcaggagtttgagaccagccagaccaacatggtgaaaccccatctctactaaaaatacaaaaattagccaggcctggtggcgcgcgcctataatcccagctactcaggaggctgaggcaggagatcgctcgaacccaggagggggaagttgtagtgagccgagatcacaccattgcactccagcctgggcaacagagcgagactccatctcaaaaaaagaaaaagaaaagaaaatgtgtatatatacacaatggaatactcttcaactttattttcctttctaattttttttttttttttggctaggagcagtgtgttgagaccagttttttgtttgtttgtttttttgagacagagtcttgctcctgttgcccatgctagagtgcaatggcatgatcttggttcactgcagcctccgcctcccaggttcaagcaattctcctaccttagcctcccgagtagctaggattacaggtgtctgccaccatgcctggcttatttttgtatttttagtagagatggggttttgccacgttggccaggctggtcttgaactcctgacctcatgatccgcccgcctctgcctcccaaagtgctgggactacaggcgtgaaccaccatgcccagttgagaccaggtttttcttttttttgagatggagtttcgctcttgttgcccaggctggagtgcaatggtgcgatctcggctcaccgcaacctccatctcccgagttcaagcgattctcctgcctcggcctccagagtagctgcgattacagacatgcaccactatgcccagctaactttgtatttttggtagagacaaggtttctccttgttggtcaggctggtctcgaactgctgaccttaggtgatccacccacctcagcctcccaaagtgctggcattacaggcatgagccactgtgcccagccgagaccaagttttcaaaaagaaggaaatcttcgctgggcttggtggctcatgcctgtaattccagtaccttgggaagctgaggtgggcagatcacctgagtccagcagttcgagaccagcctggccaacatgacaaaaccctgtctctaccaaaaatacaaaacttagccaggcattgtgacacatgcctgtaatcgcagctactcaggaggctgaggcaggagaatcccttgaacctgggaggtggaggttgcagtgagccaagatcgcgcccctgctctccaacctgggcgacagagcaagactctgtctcaaaaaaaaaaggaaattttgttatttgtgataaaatggatgaacctgaaggacattattcatttaaatgtataaactttaaaaattgaacttatagtagcagagagtagaatggtggttaccaggagctggaggcagtgaatgttggggagatgttggtcaaagggtacaaagtttcagttagacaggaggaatcagttcaagaagtcttatttatttatttattttttgagacagggtcttgctgtgtcaccgaggctagagagcagtggcacaatcatacctcactgtaacccccaacacctggcctcaagtgatctttccacctcagagtcctgagtagctaggactgcaggcactcactcccatgcccaactaatttatttattttttatttggtagagacagggtctcactatgttgcctaggctggtctcgaactcctggcctcaagtgattctcctactttggcctcccaaagtgctgggaatacaggtccgagccatgaagagatctgttataccacatggtgacaataattaataacaatgtactgtattcttgcaaattgctaagaaagtagattttaagtgttctcatcatgaaaaaataagtatgtgaggtaatatttgtgttaactggcttgatggagccattccacaatgtacatatttcaagataacatgttatacatgataaatatataaaatttgtatttgtcaattaagaaaaaaagtttatttatttatttgtttttgaggtggagtcttgctctgtcgcccaggctggagtgcagtggcatgatcttggctcactgcaacctctgccttccgggttcaagtgattctcctgccttagcctccccagtagctgggattacaggtgctcaccagcacacctggctaatttttctttaatttttagtagagacagggttttaccatgttgaccaggctggtctcgaactcctgacctcaaatgatctgcccacctcggcctcccaaagtgttgggattataggcgtgagccaccgcgcctggccaagaaaacagtttttaaaaaagaatgtttgaataggatacaaaatatattcaaatagttgcctgaacactgctcttcttcttttttttttttttttgcragagaatctagctctgtcacccaggctggaatgcagtggcaggatcatagctcactgtggccttgaactcctggctcaagttatcctcctacttcagccctacagcccttccctaggcagtccttcgcttctagaaaataccagtactcaatttattcccttcttttcatacattcatttttttctaaagaaatatttgagtgtttattgtatcccaggcattaagttagtttctgagtataaagggtgagcaaagcaacatgcctaataccaaggtttttgcattttgaaaaccatcctagaagaggcttcctggttgcacacaatttcaggcagttctcagacccaggttaaatatctctaagttaaagctatagtaattctggtaatgcgtagactgcactcactcacccttgtttttacttttagactgccaactggtaaattctccaagaaaatgcttacttctaccatgataatcttttttttttttgagatggcatctcactctgtcactcaggctggagtatagtggcatgatcttggctcactgcaacctccacctccagggttcaagcgattctcctgccttagcctcccaagtagctgggattataggcgcgccaccacaccgtctaatttttttgtagagacgaggttttgccatgttggccaggctggtctcgaactcctgacctcaagttatctgcccgccttggcctcccaaagtgccgggattacaggcgtgattcactgcacccggcccctactatgattatctttgtcttttgaacctcctccattaacctcttacaaaagacctctacaaggcattcattcttaggatcatggtgctttcattaatgtattccacatgtaacactgatacagcgtatagattaaagttaaattttatcattagattttcttaatattaaatttgggaccataagagagtttgaatacccaggaaaaaagaaatcgagttcaaataaatataagaaagtctctatctttgccaggggacctctgctttaggtaactgcccagtgggaggaatcaggggatcaaataaaagaaaattgaactggtccttgaatatggatgatttaaatcaagtggagatgggtgtcagtgggaatttttcttggaggggatgattgtaaattttttctggagaagattattatgatatagaagtgagcctctggtgcataaaaatggggtgcagaggatgcaaatgcttacttcgggttcagttaacgtgcagggagtataattctcctaggtacctcacacatacttaaaaagtaggtatttttattctcattttatagataaggaaactgaggcttgtgtaagtttttattccatgtcacacatgtaggaagtggcagagcctggattcaaacctatgctcttttcatcacatggtgctgcttgttcatgcctttccttccttgttactcttggctatactcatgtctgtctcttttaccatgscttaacctctttgcagctctagcttcactgctgttctctctcctaaacagcatagcatccttcctacactgactgtattagcaatgttttcatgctgtcaggtggttttggttgtcacgtttctcctgtgcttagtgtatatccatgttgatgcttgtcactgggcagggacccagctgaggcaaaggaactggggcattggttggaaaagatgggcttgagtcatggcatgaggcataagatgatcaagtctgttaccaggtgtgtgggaggtttggaaacctggccagagaaaggcctagggatgctccccgtatggatttaagggtcagggagtcaaacattaacctgtacccaatttaattttaatcctgttctaacacacagttctcttactgtgtcaactgagggagtattcccagattgttgaaggaaacaaaccaatatgttttctcatatttactccttctttgcagaagtcctgctttccaaagaagactgaatgtagagcatgaggttaccagtaaaataaggatgccaatgctgactctataagtgttgtgagattagagaaatgcatataaatactcaacatggtgcctggcaaatagcagggctcgaaacaccttagctgctgctgttactctgtatgaatttacttgtgataatgctgctgctgtttctgggattccccatttctcctttttctagtctagggtttggcttagtgataacccaaaattgaaaatcccacacactgaggatggcacaagggatacagaactgatggagtgctattcagggggtctcagtttgataggaggaatgactgatgagcatagcagctggtacagcaggaactgtaccaaaggcttaagtacatcttctcatttaattcttttaacaacccaaaagataactataaggaaacttaagcacaggatgcaaaataacttatgcatagtatgtaatttggaacaaataattacagtacaacataagtgccatagagacctatggaaatgttgaagagaaaactagtagaggcaaggaaaagcttcacagaagagataatgtttgatgtgggttttgaaggatgaaatagaggtggagattggcaaggctggaagtggaaagaaggatcacttagcaacctgcagagaaaggggcagcacattctaagcaaagggaaccgtgtatgcacaagcttggaagtgtggaaaaggatgacctgtttgagaaatgtaagaagtgtcctatattttagaatacacgggaggtgaggagaaggaggcttgagttgagctggaactagatagatcatcaaagatctcatacaccagaatgataggttaaaacaccttttctgtaaattaggaaagggcaattttagtcagggaagcctcctcgtcacatttgtggctcagagggaacactaggaaccagagtgaagagaagtgagattggagacaaggagcctagtgtggagcttactgcagaggctctggtgagagatggtgaaggtttgaaccaaggcagtaacggtggttgcttttacttacacagggtacatcctgattgtcaatggatggactatgaatggaacatgactattcgaagtataaaaattgacgcttgaccatgttctctctgtgggagtttttaggtagcttacaaaacttttgaggaatttacattttcaactaatgagataaatcagggtaatgccataaatgcaatgtgcagttgaattttagcaatgtggacaggttggttcatggtagagagaagtgaatctgagccatagcctatctgaaaagaaataccttttctagctttatatatagaaactagaactaagtttaacattgttgtctaatatatattttttggcatgtcatcaagaatttcttgggccaggcatggtagcctatgcctgtaatctcaatactatgggagtttgagtcaggaggattgctcaagcccaggagttcaagaccagcctaagcaaagaggcgagatccttttgaaattaccagggcatggtgttatgcatctataatcctagctacttgggaggctgaggtgggaggatcacttgaatctaggagttcgaggctgctgtgagctatgattgtgtcagtgcacaccagcctgggcaacagagcaagatcctgtctctaaaaaataaaaataaactaaaaaaattttttaaaagaattttaaaaaagtttttacattttgtacttaatgaatttgatttaagcatagtgatttggtataaatcattgtaagtcctaaatgtagggagggctgaatcagtgacattttactatatatagattgtgttttatgagatggagttaaagcttgtggagtgtacttggattatgtctgagtttatattgcagccttggtctaggactatatgctctctgaaagaaaggtgaagatattatattaacagcttatgctaaatatagagaagggaggaagtagcttactgctagttctttgccctgagcagaagtccttggaaagctactgagggcaaagagtgaagccttcagaaaggttgtttaccaggaatattataagattataatgcagaaataccttcactctaccttataccctgaagaaatatttgcatattctttttaagtctaaagggcttccttacctgcaatgtgtaaggaataacatctgttttcagaaaattctctaaacattttatttatagtaacataaatcagtcatggtaatttcttataatgtggttctgttactctgttaggccacatctgttttggctttgcttgccttggaagccaacaaaagaattcagtagcaaattcttttttcctatagatttatatttttggccttgctttagtttctttcctgaattttctaacaggcatttttttttctttctttcctttcattgacttactcaaaagttgaatgatgtgtaatattcttcctttctgaaactcttagccttggtaatcaatgggcaggtatttttgaagttctatattttccctcatgaattgagatttagctttagcttcttctaattacctcctgtcattcttctttctcttttcttccccagaatatgttaaagatatattttacattttggctttccctggagaaggaaggttaatattcaataaaacctcttttaataagattcttgcagaggtcaagtttaccaaatttcaggattagttgagtctgagactcttccagccccaaataaaattttggtaacctaccacctcctaatctgattttcttcctgttttctctatgttataaaacagcacttcatttacccaattagccaaatttgaagccttctgtttccctaagtctacattccctacattcctctctgtatctgatgagttaccatgtccattggattccatcttttctttatctcctgtcaatgacatgacccaggttcattctttctatagctttttaagcttcctgttctccctttttctggattcttttctgccaaagcaacctccttattgacatttgagtgaattctctaaaaccatcctatttctaacatttttgtagtcctttcggtattatattaatgtatcttaaagattaaaaactcaaatcctgatttttctagatttcaaaattaagaaataatgacctaagattaggccttctctgaagcctagagttaaaataggaaatatttactgtaggagctacattttttaggatatatttacagataaatttggtgaggctttccattgactagtaataatttaactaagaagcatgtgattttagaatgaactgaaaagaacccattaatctacatttggttttcattgtctgctttgagtgaatcactgatacctggttgcccactacagtgctgactttgttccagagactcacagcattgcctcatattgtcgaagtggaagttgtgggggaggaacacttgtgtaaatatttgcctgcattttatctgacagttttggagacttcagctaaaactattcataaattgttgaaagatccaattgtggcagctttaaaaggatcattaagcaaaaataaagatttcttaggaaatctaattttagtctctaaatataataatggaaccctgcactgaataataaattagtggatcatcattcctcattcagcaaatatttattgagcacctatatgggtggcattattctaggggcttgggatacatcaatatataaaacagataaagatccctgcctttgtagagcttatatttcagaagcaggagggagaaataaacatgaataagtatacaatcatgtgttgcttaatgatggtgatcggttctgggaaatgcgtcattagacagtttcatcattgtgccaacatcacagtgtgtacttacacaaacctagatgggatagcctaatgtacacctaagctacatgagatagcctattgttcctaggctacaagcctgtagagtattactgaagtaaatactgtagatagttgtaacacaatgataagtatctgtgtatttaaacatagaaaagatmcagtaaaaatatagcataaaagataaaaaatggtatgcctgtatagggcacttaccatgaacggagcttgcaggattggaagttgctctgggtgagtcagtaagtgagtggtgagtgaatgtgaaggccttggacattactgtgtaccactgtagattttataaacactgtacacttaggttacactagatttatttaaaaattttttctttcttcaataataaactaaccttagcttgctgtaacttttttttttttttttttttttttgagatggagtctcactctgtcgcccaggctggagtgtggtggcatgatctcggctcactgcaacctctgactcctgggttcaagcgattctcctgcctcagcctcttgagtaactgggattacaggcgagcgccaccatgcccggctagtttttgtatttttagtagacacggggtttcactagcctaatgtacacctaaggctggtctcgaacgcctgaccttgtgatccacctgcctcggcctcccaaagtgctgggattacaggcttgagccaccgcacccagccattagcttgctgtaactttttttactggataagctttttaatttttttaacttcatgtctcttttgtaataatacttagcttaaaacacaaacatattgtatagttataaaaatattttctttatatccttattctctaagcttttttctatttaagatttttttttatgttttaaagtttgtttttttttaaatgaagatacaaacacacacatgatcctaggcctacacagggtcaggaactttaatatcactgtcttctgcctccacatcttgtcccgctggaaggttttcaggggcaataacaggcatagagctatcatctcctatgataacaataccttcttctggaatacctcctgaaggacctgcctgaggctgttttacagctttaaaaaataaataaatagaaggcatacactctaaaataaagataaaaaggctgagtgcagtggctcacacttacaatcccagcactttgggaggccaggcaggaggattgcttgagtccacgagtttgagatcagcctgggcaacatagcgagaccctgtgtctacaaataatttttaaatattagccaggcgtggtagcatgcaccttgtattctcagctactaagaaggctgaggtgagagaatcgcttgagcctgggaggtcagggctgctgcagtgagctctgattgtgccactgcactctaacctgggcaacagagtaagacctcgtctgaaataaataagtataaagtaaaataatgttaaaaagtatagtatagtaaatacataaaccagtcacattgtcatttattatcattatcaagcattataaccatacatgtctgtacatgccatacttttttatgactggcagagcagtagatttgtttacaccagcattgccacaaacgccctgcaaagttaggacagcatcagggtggctatgtcactaggtgataggaattacaatcttacaggaccactgtcatatatgcaatccctccctccctccttttcttccttttcctttctctctctccttccttccttccttccttgccctccctccctcccttcctttctttcttctttttttttttttttccaggttcttgctatgtcactcaggctggagtacagtggcatgatcatggctcactgcagccttgatctcctgggcttagcaatcctcctaccttaccctcccaaagtgatgggattacaggagtgagccactgcaccccgcctgcagtctgtctttgactaaatgtcattgcagtccatgactgtatatgttagaagggataagtacaatagagaaaagaaaaagatagtgcaggataatgggaattgagaatgctcggttagggggccaggttttagtctatgctgtttagaagagttcattgagaagatagcatctgaaaaggtgacaaattatcacttgtcctataattatgactaccaattagttgctaagaaaatgtcaggctctgaaaattaagaaaatatggatcagcctgagtgtgatggctcacccctgtaattccaacactttgagaggtaggaggataggttgagcccaggatgtcaagaccagcctgggtaacataccgagaccctgtttctacaaaaaataaaaaaaattagcctggcatggcacttagctgtggtctcagccacttaggaggctgaagcaggagggtcgcttgagcccaggaggtcaaggctgctgcgagccatgttagtatcactgcattccagcctgggcaacagaatcttttttaagactgtctttaaaaaaaaaaaaagagagagagagagaaaagaaaagaagaaaatatagatcagattttatcccaaacctcagggatagctgagcgagggaagggaaaaaaatgtaaacaaattagagcattatagtgttgtagatgctttgacagaagcatataggaggcgtagtaaggcacacagatctttctaatgtgatctcacctctgttcttaatatgatagcagtttatttaaataatgactcagacttcgtggatatcaaagcataggcttagattactttaatctcagtcatgtgaattggtcattctctctcctcacctctttttacctttttaaaaaataccatcttaggttgaattaatgtgagctgattttaattctaaaaaatatatataccatctgactactcagcatgtcccaacttgttccaaactatagtcagttgcattttgaaccatctgattatctaagtggaatatttgtattcagcatccatgctgctattcgtagtgtaactacccacagatacataatgagcaagacactaaaatgtgcaaggcattttggaaaatgccagagatacagccatgaataaggctgtcaagcttctgctttctaggagcttacattctgttggaggaagcaatcaagtaagatatcacatgtattatataccagcagttcccagactttttggtctgaggatccttgtacactttttaatgttatttaaggactttaaacagcttttctttatgtgggttatatttattaatttgccagtttagaaattaaaactgagggattttgaaaacatgtacttatttatttaaaaatagccacaagaaacccattatactaacattaatgagaaaataataattttcccaaacaaatagtgagaagaatggcatcatgttagatttttgcaattctctttaacgtctgacttaatagaagacagctggattctcatatctgcttatgcattcaatctattatgatgagttgttcggattgaagtatatgaaaatgtagcctcaacagatacgtggttagaaaagggaggaatattttaatagcctttttagataactgcgaatattctttgatactcaccaaaatttaagtgatagttacttaaagtttagttgcaatgtgaaatctgaaattgtattaatgacgttatatgaaaatatttttattacattaaaatccattggtttgtgtggcactttgaatagatcttttatgctttgtatgagtttgtaacatcatgcgttggttatttgaaaatcaaatcggtttactgaattatatggatcttccaaatattgacacatttcattttatgacataaaaaaattacatttgttgatattgctccaaactaatcagaaaaggctttaagttttcagaatctgtcaaggtcgtggtggctggtgaatacatgttttccaaaattctaatgtttgcctacaagcttgaattttataattggcaataaatgttgtcaatttttcctgaaatgacaaactcacttcattcattttcggggaaatgtttgccaaacacccgagagtgaataatttagtttgtcatttgttctttgtagtaaaaatgatattctgttaacaaagtgcccattagttcccaactcagacatttgcacaaatgcttttccttgagataaccgttatactttagtgtgtagcagaagtactttatatgtgcttcccatttgtcacagagactatgtattaaatatttactcgagggtcaaaatttgatgatgtttactgcttttcttcaagggcattcttaaaagaaatagtaatgttttatttttccctgcaagcatgtagtggtaaagaatttagtgactaccagttctgattggtgccattgccttgatttgtgctcgtgtgccagcagttttaccaccattgttcttacagcatcattgcaaacatgacaaacgcagattatgtttcagtattagtacgaaaatagttttgcactgaggaccccaatctcgttggattcccagtgttattacataccttatttcccctgattttcacagtggaaccatgaggtagttggtgatattaaccccttttggacccaagtttcctgaccagagtttctgtcgttcattctttctgtttgctataatatctccaaactgtggaaaagtttatattgttattccttaagaagaactttgttcagcgaaaacagaatgggatggggtgagtttatttaacggaactaggggtgtctgaagcctagagattccattctcattgctgctttttaggtgctatgtcgttgtgaaatactaaacttttctgtttccttattctagaaaataaggataataataatacctatctcatgtagttgttgtgaaaatttagttaatacatgttatatgcttagaaccgtgctgacacaaattaaatgctcaataggtttagcttttattatttacagttagagatggggctcaggcattccagctgagggaacaacttgagcaaaagcagagaatcgtgtcatgtgaacagtacatacaatctaacagaatgtagtggttcatggaagagtatgtgggaaagtaaaaccgggaaggtagatttggacgctgattattgctggactagagctctaaactgttgatccaatttgtgtccctaatgcctaagacaatgactggtacatggtgtatgtatttatatattgcctgagcattggaatatttgaataaatttaaggaaggagagagcagctgctctcaccatgagcaacataggtggagaaagtgacattgtagcgtagcccagaagagtgaatagaattctagtaagcaaagatattagaggtgtgagacaaagcagcaaatttaagaaaatgagaatgtttgatgtttgcttgttctacttgccagaatttcacaaaatcccttgccaacaaaatttcacaaaggccctgactcagtgactgagcacagtcctctaaaaacaacaacaacaacaacaacaaaaagccctaaagacaataaataagatagaacacagtttcccacatctccagcttaaatcactgcatttttagaaaaggcaagttcagtgattctagtcgttgcctctttctgcacgtaagataatgtccaacaagattagtgattatgcctccgtaatatataaccagatatgcccttacacccaaactttaatgagattttgctctactataacttacaagcacatacaaaactgccaccaccaatttataaactgtgtctaaaaccctactttgaaacagtctaacaaaaattctctaaaagactctcctaggtaacagtcctcagtaagacttctaaataaaactaactttaattctttaaaagctcccctgtcccgtttttttttattttttatttttatcttttttgcttagttgacagaggctgatagaatgggtgaagatagttgggatataggctcatgcctataatcccagctgcttgggaggcttaggcaggaggatcccttgaggccaagagttcaagaccagctgagcaacatagcaagacccagccccacacccatctctaaaagaataaaaaattagctgggcgtagtggcttgtgcctgtggtcctaactacttgggagattgaagcaggaggatcgcctgagctgaggaatttgaggttgtaataagctatgatcatgccactgctctccagcctgggcaacagagtgagaccgtatttctcaaaaaaagaaaaaaaaaagaaagaaaaaagaaaaaagcgtgaagataatacctcaccaaacgatatactacccacccaagttattgtacttttcaggagacttaattacttgagatcatgaattgttttatccttgctcatataccaaacatagtaccccgtgcatattggggctcagtagctacctgagcagtgtctcagcagttaatcttgtaaatgtggtttttgtgtaatgtttttatttcacaataactttcagagaaaaggaggccttcctgattataggggttactttttttttttttttttttttttacttaaattgcagaacaggcaaataaccactttattttgtatacaggcagtaatatattcacagttgtttgtgtcttaaaggagaagatatgactttaggaggacagattcctaagcagtggatcaggaatggtaaggtataggagttttagaaagttgtcctaaaagctacttcttgtagtttaggttgtgtgagttacgctggaagagtgaaatcttttgaataacttcatattcttattcaaatgtgtataatatagaaaatgtgattagatatgtaataaatgagcaaagatgataaaatcctgaaaatgtattctacatactagataaatactgttttcctctgtgcaccttatattgtttccatataaaccaggcattattgagaattaggagttaccagtaatctcctctctactaattttctctggcaaattgttctctggattagtagaactagttttctctgttggattgatagaacatgtgataataataacatattggtattttcatgtatgtcaggcatcgtggtaaatattgtacagattatctcatttaaatctcacaaccttataaggccgaggtactgttaccatccccataggtaatattatcatccttagattatagatgagaaaagtaaagcttagagaatttaagtatcttgcccaaggtcagaatgaataaggtcaaagctaggtatcagacgaggatttggacccaagagtcagccctcttggcctttacactgtgcagcttaagagatactaaaaagcaacagctttgtgggacattggggtggcttagagtagtgttttctgaactggattgcagtccattaatggattataaaggtctatttagtgggcccaaatcagcattttaaaaaaatgaattacaacagacagaaaaatatcaatgtgtatggcatataataagagcaagcactcttttatgaaacgaatgttccagtttatatgtatatgtgtatgtacacatatgtacacatatgtgtgcatatgtatgtatgaactggctgaagttatcaaatgtacttcttattgtgggtcgcagtcaaacaaaatttggagcccactggcttagaggatggaaagcaagctggaaaatataatgaatagcagtggtagctgctagagaagaaagtctagagataagctgaatgtacaaataacattatttaaaaaagggaagaggagttaactttatatatttgataaaatactgtagtactcaaagttgttttaactagctcattaagttagaccctttgcaggattcactcagaattagtatagctttaattttacttctagagagttggctctgcaggtggttttgaattgtgtatatcattactgtatttttatttctcatatgaacaatttgttgtgattgaataataaccagacatctctggtgcttcatagacacaaagcccttttttctattagatccattagagtagaggtttgtttactgacatgctaggagaatgggagaaggtagattagattggtcagaataatattgactcttgaattttcagctggaagggagaattcagttcaacttccaattttaaggtgcaaaatgaatattcatttttttgagactatcataaaacagcacaaaaatacatattcagacaatgcaagtggcttattaaagtcaacactagaaagaagtagcaaagctacatgtatacattagtcctgctcctgctcctgtatagtaattttccctctttttttgtatagtatactaatttgccctcgtttgcttagtctgtcttttttacctggaatgtcttccctgtcagtgcccctctccttctccacatacccccacttttttctttctctctctctccctctcacccagacacacacatatacactcacatacctttgcctctaatttctactcagttttaaaactcagctttaatttccttgcctcagaagctttccctgagttcgcctttacaaacacaaatgtctttatttattttgatgctcaaattgtcctcaatttgaccagaggaatcctatttaagctgacctctgtgtccttttaacatgcccctgtcattctttaagtatttccttactttctggcacaaaaagacattccaggctcattttataccttctctgtcctagttctggaatcaaccatttttccagggagtgctgatttctaatgatatttagaaatcaacacccagtgctaggtgtagttactgcttataaagtgttatggctcccaggccctctagagagctaagaaacatatgaatgttatgtacatagagctaagaaacatgaatgttacatacataggggtgtgcttgtgtctacacatgtgtacatccatgttcatatttatttccatatgtatttatctacatgtatatcgaaaaccatgatgaggtcatgctgatacctccagttacagtctatcacaacagaaataattctgttttttcccttaccatatttaactccgttttccaaaagtgagaaaaactttatctttgttgtatttacttatttgatcaatccttctgtatgtaattattttccaatcatccatgtccttttgtaaatgtcaccatcactccattcagccttggaaaccttgtgccatgcggagcctgttcactgcaatgtggacaccttccttctttttcttgggttctgactcctcatattggactttcccattgtatagcttccctcttcctcttgctttgggctctcatgccctgtgctaggttgtgcctttacatgatgcatgccctcttcaccctactcaggctctaatgtcctgagccagatctcccacccatttggtacagtacttttaactaaactacagagctcatttgaattttccctctaatgctccttttctgttccaggattcaatccaggatgccacattgcttttagttgtaatagttctttatttgttttttatctttcatgaccttgacattttttatgagtattggtcagttattttgtagaatgtctctcattttggatttatctgatatgttctcatgattcgattgcaattatgtatttttggcaagaataccacaaacatgatgctgttgtttccttgtctcagtggattgtattcagaggtataggatgtcaattaatcttattaactggtgatgttaaccttgatcacttgattaagatagtgtaccagatttttccattgtaaaattattatttattcatttgggggagatactttattctcttgtgggagatactttgaatctatgccaatttcctgtttcttctcacttttgcccattgattttagccattagtggatcttgcctgatgtaattattgctgtggtgttggtctaatggtgatttttaacttttgtcagtccttctacacttattcattgtaattttttttttttgagatggagtctccctgttgtcacctggactggagtgcaatggcacaatctcggctcactgcaacctctgcctccccagttccagcaattcttctgcctcagcctcccaagtagctgagattacaggcacccaccaccacgcctgactaatttttgtatttttagtagagacgaggtttcaccatattggccaggctggtctcaaactcctgacctcaggtgatccacccgcctcggccacccaaagtgatgggattacaggcgtgagccaccgcgcccggcccattgtaattcttctaaaggaagagatgtctcatctcccctacttatttacttattcaattattttatattaatattggacttgtggatatttattatattctatgggttatagtccagtactctgtgaatttatttacctaaaatcatgagttcatactgaaacctccgattgtagttcaacatcacaaggtttattctaaccttctccctttctgtatttctaatttttttctgatagtaagaaacctggttctcattatctataacatactcacttgtctgtagttacagaattgctaacatgtactcctatgaaaatcaaatttactaactagagtattgtatttgtatatggttctttttttttggcctatcctttcactatatagtcaaaatactggttttttttgttttttttttatacttttaagttttagggtacatgtgcacaacgtgcaggtttgttacatatgtatacatgtgccatgttggtgtactgcacccattaactcatcatttaacattaggtatatatcctaatgctatccctccccgctctgcccaccccacaacaggccccagtgtgtgatgttccccttcctgtgtccatgtgttctcgttgttcaattcccacctatgagtgagaacatgcggtgtttcgttttttgtccttgcgatagtttgctgagaatgatggtttccagcttgatccatgtccctacaaaggacatgaactcatcattttttatggctgcatagtattccatggtgtatatgtgccacattttcttaatccagtctatcgttgttggacatttgggttggttccaagtctttgctattgtgaatagtgccacagtaaacatacgtgtgcatgtgtctttatagcagcatgatttataatccttagggtatatacccagtaatgggattgctgggtcaaatggtatttctagttctagatccctgaggaattgccacactgacttccacaatggttgaactagtttacagtcccaccaacagtgtaaaagtgtttctatttctccacatcctctccagcacctgttgtttcctgactttttaatgatcgccattctaactggtgtgagatggtatctcattgtggttttgatttgcatttctctgatggccagtgatgatgagcattttttcacgtgtctgttggctgcataaatgtcttcttttgagaagtgtctgttcatatcctttgcccacttgttgatggggttgtttttttcttgtaaatttgtttgagttcattgtagattctggatattagccctttgtcagatgagtagattgcaaaatttttctcccattctgtaggttgcctgttcagtctgatggtagtttcttttgctgtgctgaagctctttaatttaattagatcccatttgtcaattttggcttttgttgccattgcttttggtgttttagacatgaagtccttgccatgcctatgtcctgaatggtattgcctaggttttcttctgtggtttttatggttttaggtctaacatttaagtctttaatccatcttgaattaatttttgtataaggtgtaaggaagggatccagtttcagctttctacatatggctagctagttttcccagcaccatttattaaatagggaatgctttccccatttcttgtttttgtcagctttgtcaaagatcagttagttgtagatgtgtggcattatttctgagggctctgttctgttccattggtctatctctgttttggtaccagtaccatgctgttttggttactgtagccatgtagtatagtttgaagtcaggtagcttgatgcctctaggtttgttctttttgcttaggattgacttggcaatgtgggctcttttttggttccatatgaactttaaagtagttttttccaattctgtgaagaaagtcattggtagcttgatggagatggcattgaatctataaattaccttgggcagtgtggccattttcacgatattgattcttcctacccatgagcatggaatgttcttccatttctttgtatcctcttttatttcattgagcagtggtttgtagttctccttgaagaggtccttcatgtcccttgtaagttggattcctaggtattttattctctttgaagcagttgtgaatgggagttcacacatgatttggctctttgtttgtctgttattggtgtataagaatgcttgtgatttttgcacattgattttgtattctgagactttgctgaagttgcttatcagcttaaggagattttgggctgagacaatggggtcttctagatacacaatcatgtatcaagtcaagggacaatttgacttcttctcttcctaattgaagacctttatttccttctcctgcctgattgccctggccagaacttccaacactatgttgaataggagtggtgagagagggcatccctgtcttgtgccagttttcaaagggaatgcttccagtttttgcccattcagtatgatattggctgtgggtttgtcatagatcttactattttgagatacttcccatcaacacctaatttattgagagtttttagcatgaagggttgttgaattttgtcaaaggccttttctgcatctattgagataatcatgtggtttttgtcgttggttctgtttatatgctggattacgtttattgatttgcatatgttgaaccagccttgcatcccagggatgaagcccacttgatcatggtagataagctttctgatgtgctgctggattcagtttgccagtattttattgaggatttttgcatggatgttcatcagggatattggtctaaaattctctctttttgttgtgtctctgccaggctttggtatcaggatgatgctggcctcataaaatgagttagggaggattccctctttttctattgattggaatagtttcagaaggaatggtaccagctcctccttgtacctctggtagaattcggctgtgaatccatctggtcctgggctttttttggttggtaagctattaattattgcctcaatttcagagcctgttattggtcggtctattcagagattcaacttcttcctggtttagtcctgggagggtgtatgtgtcgaggaatttatccatttcttctagattttctagtttatttgcgtagaggtgtttatagtattctctgatggtagtttgtatttctgtgggatcggtggtgatttttcaaagttacttcatgttttagttagtttgggctgctataacaaattaccatagattacgtagcttaaacagcaaacatttatttcctcacagttctggaggctggaagtttagatcaggatgccagcatggtcaggttctggtgaaagctttcttccaggttgcacagtcaacttcttgtccttatatcctcatgtgttggaaggagagtgagacagctctgaggtgcctcgtcacattaaagagggttctaccttcatgacctaattatctcccgcaggtctcacctcctaatactatgacattgaaggttaggatttcaacataggaattttggggcaacacaaacattcactccatggcactgaggttcaattatgtgaaatattatggttctgagaggctgaatatatgcaaaaagatatattcagagtgttgctacctccttaattcttactaatttgttcctattcttcctggcttcccatcctttctcacctgtggcttgtaaggtaaccaatttatttagttttctttagaagctttatatttcttttgcacaaataagaaaatacttgtatgttttctgatattccttttttcttatagtaaagacacacttcactttttaaaaatcttttatttgatggtatgtctgaaaatcactccaaatcactaaagaaatcttcctcattcctgtttttttaagagatggggtctcactgtattgtccaggttggtttcgaactcttgggctcaagtgagcctcccatctcctggggctgcaggcgtgtgctgctgcaactggcttttattctttttgatacctgcatagtattccttgatttattcaaccattctcctctgtatgagtatttagggtgtttcatatatatatatatatatatatatttttttttttttttttttttttttttttttgagacggagtttcgctcttgttgcccaggctggagtgcaatggcgtgatctcagctcaccacaacctctgcctccctggttcaagcgattctcctgcctcagcctcccgagagtagctgggattacaggcatatgccaccacacccagctaattttgtatttttagtagagttggggtttctccatgttggtcaggctcatctggaactcccgacctcaggtgatccgctggcctcagcctcccaaagtgctgggattacaggcgtgagccaccacgcctggccccaatattttaaagttacaaaaaatgctatagtaaataaccttgttccatatatatttttgtattgttagatgttgatcgattttttttcacatattcaaccaactttgtatttctaaaataaacacaacttggacatgatctattaattttttaaggtcatggtcattcattcatttcacattttattcttagtacattccactgggagaggaaagagtcatgcatcagtatatagattgtgctattctgttgtactgtttttatataggatttttgcatgtctgtttattctgttagatttgcctataatttttctctaataacagtcttgtcagattggtgtcaaagttatgctggccttaaaaaagagttgtggagtgttcactctttttccattatctggaagattttgtattagagattggcattattccttaagaattctctggtgaaggcttctaggcttggatttttctttatgagatgattttcaattattttaatattagagtgtttttgacctaccaaaagggtactttcctgtggcccaacctaatagttatagcactatctaggtttttaaagttgttattgtggtagttttggtaaattgtatttccttaaataatattttccacttaattaaaattttcagttttatagtcagggagttatgagtatgtgcatcagttgtgatgtcctctttcttattcatggcattaatgatctgtgccatcatgtttgtgttgtcttcgtcccttcctcctcctgtcatttttgttagaggttgatcaatttcattagttatttttaggtaaccaacttaggctttagtgacctatctattgaatgtttgccctctatctcattaatttatgttctttatcaattccttttctactcattttgaacttcttgttgttttcagcctttttgcttttatatatatatgcatttaatatatatatgaatttatatatatatatatgcatttaaggctacaaatttccctttatgcactactttaactgtatccaatgaatccatatatcatattttcatttattcagttctacatgttttctaatttctagtgcagatattttttcctgacctatggattatttagaagtatttatttttaaaaattccaaaacatctcagtattttgttttatttttctttctttcattctccttttggctgcatacaggggactttattgatggtacatgacaaggtggggccttccaggcccctccctcttcagggggtctggcatggaaactgtgtcaagaagagatttttgcatgtctgtttattctgttagatttgagtgcagcaggtattccccagcagctgaggtcctctcttgtcctttagttagtgctcttgctggagctggtggtcctgggcacttactccttggaggccatgtggaccatgaggtccaccaccctgttggtgtagccagattcattttcattgtcataccaggaattgagcctgacaaagtggtcattgagggcagtggtggccccatcatggaaggtggaagagtggttctcacttaaagtcggaggagacacccgggtgttcagtatagctcaggatgccctttagggggccctctggtgcctgcttcaataccttcttaatgtcatcgtatttggcagggttttctggatggcagatcagatctgacatgtaggtggtggggacttggaagaccatgccagtgatcttcccattcagtttggggatgaccttgcctacaaccttggcagcaccagtagatgcagggatgatgttcttgagagcctcatggtcgtcatgccacagtttcccagaggtaccatctacccacatcttctgggtggcagtgatggcatggagtgtggttatgagtccctccacaatgccagagttgtcatggatgaccttggatgggggtgcagtgatcaattggtggtgcaggaggcattactgaggatctcgaggctattttcttacttctcatggttcatgtccatcacaaacatgggggtgtcagcagaaaggacagagatgaagacccttttggctctcccctctaagtgagtcccagccttctccatggtagtgaagttgttgatggacccaacaacatagtcagcaccagtgtcacccccatttgattttggtgggatctcactcctggaagatggtgatgggatttcccttgatgacaagcttcccattctcagccttgatgctgccatggaacttgccatgggtggagtcatactggaacatgtagaccatgtagttgaggtcaaagaaggggtcactgatgacaacaatacctgctttgccagagttaaaagaagccctggtgaccaggtgcctaatacagccaaatccgtttattccagccttcattttcaccatggtgtctcagggacacggctggtggtgcatgagaaggggcggctgtctgtcaaatgagaggagcagagagcatcaaaaaccctagtattttctaatttatcctttttttttctttttcttttttttttttttttactggtttctagcttaaatttccactatggttagagaatatatgatttcagtcctttgatatttgttgagacttgttttagggtccaatatttggtcagtttttagaaatattctgtgttctgcttaaaaagaatatctgttttacatttgttgtattcagcattctgtatatgttcattgaatcaagtttattcatcagactgtttaaatcttctatgtccttattaatgtttcatctgcttgctttattgattaatgcaagtgatgtaacgtgtcacttgtaagcatcatatacttttacaaatcttaaagcctttgtattttaattagcacgtttacttcactcacatttaattattgattttttaggcttaaacatttgccatcttactgtatgctttctttcagtctcgtatattcgatttcttttttctcctttcttgtcaatttttggattatctttattattggattttttaattttagaagttaaacacttaaaaagcttttcttttagtgattattttagatattataacatgaatccttcagttatcaaaatcattgataattttatcttcttcccaaacaatgtaagaaacttaaaactttttattccattttcccttttccaatctatatgcagttgttttgtatatacaatctatatgcagtttaattttgcatatatttatttaaaatcccatgagagccttttggtcccagcagcagcagagctgagcaagcagctccctccctccctccgctgcccgctggccagcaggatggaacaggccacactcctttgtcaaggacttactggccggaggcattgccctcgctatttccaagagggcagcgacccgagttgagccagtcaaggcactgctgcaggtgcaacatgccagtaagcagattgtggcgacaccgtacaaaggcgtggtgtggtgggctgcaaggtccacatccccaaggagcagggcacttgtccttctggaggggcacctggccagcaccatccactgcttccccatgcaagccctcaactttgcctttagggataagtacaagcaggtccttctgggaggcgtgcataagcatgcacagttctggagatattttgcaggcaacctggcttcctgaggggcggctggggccatctccctgtgcttcttctatcccctggaatttgccagaacctgcctggcagccaacgttgggaaattgggcatatagtgggagctcaaaggcctggcagactgcctggagaagatcaaggctgatgggatccgaggcctgtcccagggcttcagcatctcggtgcagggcatccatatgtactgggcaacctacctcagcgtgtatgatacagccaagggcatgctccctgaccccaagaacacccaccacatggtgagctggatgattgccaggccatgacagtggcccatgtggcctcctacctactcctcacagtgcgggcggatggtgatgcagtccaggtgcaaaggaggtgatattacgaacacgggtgcccttgattgttggcagaagctctcctaaaatgaaggggcgaagcctccttcaaggatgcatggtccaacatcctcacaggcatggggccaagtctgggcctgtattatgagctgaagaaagtcacctaagtgcatatgtctcctccatagaaatggcaacccagagaatcatgtagaatacttaactattgtagattatggaccttcaagaaattctggtcatctttgtcctggccagagatcatgtctgtagagggctgaggtaggctctagaaaaggggttcattgtgatcacattcccctttggcacctgattccatgtattgattactgggggtgggaaaatcatgacgtcattgtgagcacacaggcgaggcaactccagctcagacctagagtccagatgcttataggacctgagttgtgtttaagtatttatttaaataaaaggaattgtatttcccatttgtacttaagcactagctcttcttttgcacagtgagtatttgtaattatgttctgtgttaggtgtgctgctgcaaaacaataaaaacaggacactgagagccagaaaaaacccccataagatattattaaatattatgattgtatgtagagaatatttagttttagccacatacttataatttctgttgctcttcattctgtgcagctcctaccaccttccatcaggcattgtttatgcctagaaaagaatactttttagaattttatttaatgagcatctgccgatagcagattctggttttgtcagtctgaaaatgagtttatttcatcttaattcataaaggatatatttcagtgaattctaaattgacagttactctcttttagccattaaatgtcgtactctattgtctcctggttctcattgtttcttttgagagcctacctgaatttaattgttgtttctttgaaagtaacctgtccttttttctccctggctgttttaaagatatttcctatatctttggtttgcagtatttttactgagatgtgcccaacttgtggatttctttgatttatcttgcttgggattcctaggacttctgaatgtctttaatcagttttggaaaattctcagccggacagtgcttccgtgccatgctctcttttgtcttcttctggggttccaatcacatgtgtgttacattttctcatacgctgtattgcttacccttacttctatattttctttttttttttttcccaaggcagaagaatttttcttagagcagaacaaaatgaaaagtctcccatgtctacttctttccacacagacacggcaaccatccgatttctcaatcttttccccacctttcccccctttctattccacaaagccgccatcgtcatcctggcccgttctcaatgagctgctgggcacacctcccagacggggtggtggccgggcagaggggctcctcacttcccagtaggggcggccgggcagaggtgcccctcacctcccggacggggcggctggccgggcagggggctgacccccccacctccctcccggactaggcggctggccgggcagaggggctctttacttcccagtaggggcggccgggtagaggcgcccctcacctcctggacggggcggctggccgggcggggggctgacccccccacctccctcccggacggggcggctggccgggcggggggctgaccccccacctccctcccggacggggtggctgccgggcggagatgctcctcacttcccagatggggtggctgccgggcggagaggctcctcacttctcagacggggcagctgctgggcggaggggctcctcacttctcagacggggtggttgccaggcagagggtctcctcacttctcagacggggcggccgggcagagatgctcctcacctcccagacggggtcacggccgggcagaggcgctcctcacatcccagatggggcggcggggcagaggcgctccccacatctcagatgatgggcggcggggcagagacgctcctcacttcctagatgtgatggtggccgggaagaggcgctcctcacttcctagatgggatggcggccgggcagagatgctcctcactttccagactaggcagccaggcagaggggctcctcacatcccagacgatgggcggccaggcagagacactcctcacttcccagacggggtggtggccgggcagaggctgcaatctcggcactttgggaggccaaggcaggcggctgggaggtgtaggttgtagcgagccgagatcacgccactgcactccagcctgggcaccattgagcactgagtgaacgagactccgtctgcaatcccggcacctcgggaggccgaggctggcggatcactcgcggttaggggctggagaccggcccggccaacacagcgaaaccccgtctccaccaaaaccagtcaggcgtggcggcgcgcgcctgcaatcgcaggcactcggcaggctgaggcaggagaatcaggcagggaggttgcagtgagccgagatggcagcagtacagtccagcttcggctccacatgagagggagaccgtggaaagagagggagaccgtggggagagggagagggagagggagagggagagctacttctatattttctatctctttgacttactgtcttttgttctcatgggtttcttctaactgctcccagttctgtaattgtctctttggttgtacttaatctgctgttgaactcatctattaaattcttaattttgattatttgtcacttttggaatttatatttgatttgattattttataaatctaagtggaaaaaaaccctaaaaataaaaaaggaaaaaattatgtcatttatgcaataatctggagctcctgttgatctgtttctgttgtcttttggttctcatttatgtgtggttttgtctccaaaagtgtctccatttatgtgtacttggttatctttgcttatgtgctagacattgtattttaaaaattgtttatgtaaatttaatttagcagctaagatgatgttatcttcctacagaaaagattttcatttgcttttgctagtagatgcctggcgtcactaaaaatctgtgatcatttaaatcaatttcaggcatcaagatttttctgggccacccatatgaccaagcaattgttttaattctagtttatcactactcccacagagaagttgtttggggtcccaactagaacatggactgtttaccagagctcccattgttggtgggccctggcttccaacttctggcctgaaaaggcttgtgtggttggttttttttgtttttttattttattttattttatttatttattttgagacagagtcgccctctgttgcccaggctggagtgcagtggcacgatcttggctcgctgcaacctccgcctcccgggttcaagtgattctcctgcctcagcctcctgagttactgggattacagggacccgccaccatgcctggctaatttttgtatttttagtagagatggggttttaccatgttggccaggctggtcttgaactcttgacctcaggtgatccgcccgcctcagcctcccaaaatgccgggattacagtcatgagccactgcacccagccagtttttttttgttcttaaattaaagaagttttaggttcacagcaaaattgaacagaaagtagagttctcatataccagcttccgccacacactgacaagcttttaagtgcattgtccggtctgcaattcctctcctggaatttgcaatgcctccatgagaagtgtccctaaatacaaggtttatcttctaaattttttgtcttctcccagatcttggcttggtaattctttattaccttgttggtttgtgatgccttcaaccagttgttttttaaaaatcagtctagcttttctagttgttctcagtgggaaggttggtctgaactatgtagcctgctattattgaacacaattattccctttcttataaattgttgcaagtagattgcatatctgtaaaaaatattaatagatcaagctgaacctattaaggaaatggtacaactaaaaaccttttctgttagccatcatagttttaaaatgatattttcaaatatggagatatattatagaattaaacttttaattttaatgtataatcttttattccagcccgtgatgctgatgagcgagagaagtggatccatgccttagaagaaacaattcttcgacatactctccagcttcaagtaagggtctttacatggtttccagatagttcattagttgttgctttctttttttgtctgttttctgttttttttttttaaataactgtggtatgatgtaataggaacttataatttctgagttgcttatttttcctttacagttatagtaaagttatactcatttattttctcctgctttctgcagagtaaaatactgatttttgtctagaaacaagacagtgcaagacaatgttgaaagtgaaattctatgttaaaatatgccagatttattttaagaatttaatatctgtagtcagttatcaatacaaccaaattacataattatgcatgataataggtaaatactgagaagttcacctcattttcttgttaaaggatttggctattaccgtatgtgtcagttagtactcttttgtrtggtagtgaaagaaaactcaacccaaactgattcatgaagaagaaagtaaatctggttagatgtggtttgaattaggtaattcatgtcatgaggactcagatctcccatctctatttctacgttccacttttgcattggcttcattttcggttaggttctcccttggtggtggtaaggtggttgtagcaatgtcagcctcccatttttggaaccgagtccataggaggctattctttctagaccttaataggagtaacacaattattgctcatcaccctagctttggccatgtgtcaaatcctgaccagtcacaatttcacagtcatagattctaccctggagctgggatgttactggcctcactagaaacacattgctgatagggtagaaggtgtgttcatcctacccaacccgacccgcaccaaagtcagaatagggaaaaacagatgttgggtgacatgcaactaacgtctgccgtactacactgaagatatttttctatgtttattctccagtgaaagagcttatatttgtggtacataggggattttgttttaatttagaaaatttaattgtagaaaacatgttttataaccctttctctgtactttgttctatatcaggaattgacttgattagataaggtgacatagggtatcttaggccctacaagatagtaaaccccccatcacttgaaagtattcagtagaggcttaaaaaacattattaaaggatgtggttattaggggactttaagaaatgaatatgaaattgaagtaggaaatctttaagctactctgtgagttatgccttttaaaagcaatttgtaattcctgtagatttcttttaaatttaggcagtttcataaatgactatagcatcattttagcaaatttgtgatcctgtaagaggaggataagtgttttttgtttgtttgtttgttttttgtttttttgagacagagtctcactttgtaccccagaaagtaaatctagttagatgtggtttgtctcggctcactgcaacctccaccccgtgcgttctagcaattctcctgcctcagccaccacacctggcctaagaggggaggataagtgttttagtgatcatattagactgaatgtggcagatgagatttcccgcccccccattgttggttagactgacattcaacattcaacaagagccacctgcccttgtaggcatttctgccactatacccctacataaacctagagtgctattgcttacttgctttccttcaaatacattttttcatttgtggcctccacattcttgtgtgtgatgtcctttctctgtgaaatgtcttctaccctttttttcaaagcctagtttagaactgacctcttctatgaaccctctgccgactggcctttccttccccagtcccccaagttcaaaatgatctctttcctttgaatactatagtatttgcacaattcactatctccttatcatattcttcttgtttatttgttatcagctgatgttgacatcataagttcaggttcctaactagatccaatattggaatttttcagcttttgctaagaagagagcttgtatgtctttgggaataatgggcagaaaaagataactttgagaagtcttagacttctaatagctttgatatttaaaagtacatgtaatacaagaggtttttttcctacatttaatgcatggagaagataggacatttagaaatatggaattaatgttcatttgactggcaaaagattattttctcagatgtagtgaagtgtggtaaagaacttcactctagagccagaatgtctgtgtttgtatcccagagcccaccacttacatttaaccattaacattcaacttactgtctctgagtttcagtggcctcatctataaaatgaggataataagagtacctacttcatagagttgttttagtggttaaataaactaacgtaaacttgctagaacttgataaactaatattggatgagaactggttgaaataatgcctggctatagtaaaaacttggtaaatgttagttgccattacaatgcaactactgttcctaccattccctctgccagtgcctggtattcagtagcactcagtaaatgttagttaaatgaagaaataactgaaggaatgaatgaacaaatggttgatgtagagattgcttttccattgttgtttattgaatattttgagatgtataacatactgtctgttaggcactgtgggatgggcactcacggagctgtcttccaaaggggtataggagaggagacgcagtgatctcagcaacctacctttaaaacatatcctagtatctactgccatgttaggttctcttcttttgctttttttaaaaaaaaattctcacaaaactccccccacccacttcagtttatagatgaggaagctcctactacataatagtgcttcccagtctaattcttgacctcattgtatttatatgtcctttttttttttgacagagtctcactcattgcagtggcacaatcacagctcactgcaacctctgcctcccctgctcaagtgatcctcccacctcaacctcctgagtagctgggactacaggcatgcaccaccacgcctggctaatttttgtatttttttgtagagatgcggttttgccatgttggccaggctggtctcgaactcctgggctcaagccatctgcccactttggcctctgagagtgctgagattataggcatgagccaccattcccagccatgttttcctttttcattgaastttatctactttagccattaaactccactccattggtcttgtcattactaagagctgaaccacctgcaaaatattaagttaaaaagcgttttctttgacaacagttttcttttcttcatcttcctctatcactttacttctgaacttttattctctcattttgatctgacccctacttctctgtttttcctggccatttagtactttcttgttttgctcatcccatttcccagtggagaccttctggtctgctgctttatcactggttttgttagaagacatacaaatggcaaggaggtatatgaaaaggtgcctaacatcattgatcatcagagaaatgcagaccaaaactacaatgagatatcatttcaccccagttaaaatggctttttttttttttttccaaaagacaggcaataacaaagtactggtgaggatgtggagtaaagggaacccacatacactattagtaggaatgtaaattagtacagccactgtggagaacagtttgaaggttcctcaaaaaactaaaaatagagctaccatataatccagcaatcccactgctaggtatatatccaaaagaaaggcaatcaatatacggaagagatacctgcacacccaggtttattgcagcactattcacaatagccaagatttggaagcaacccaggtgtccaacagatgaatggataaagaaaacatggtatataaacacaatggaatactattcagctgtgaaaaagaatgaaatcctgtcatttgcaatcctgtcttgaatagaactggaggtcatgatgttaagtgaaataagacaggcacaaacttcacatgttctcacttatttgtgggagctaaaaattaaaacaatcgaactcatggagctagagaatagaattatggttaccagaggctggaagggtggttgggcgtataagtgtagggggagtggggatggttaatgggtacaaaaaaatgagaacgaataagatctacttgataacacaacagggtgactatagtcaacagtaattatacatttaaaaataactagaagagtataattagattgtaacacaaaagataaatgcttgaggtgatggatacctatttaccctgatgtgattattacttatttcatgcctatatcaaaatatttatactccaaaaatatatatacctactatgtacccacaaaaatttaaaaatttatatattgtttttgctatcacctttagaatttcttgtcattggatagttcgtctgtataccattctggtcttcattccccagggcccccgttgtctgatttttctgcttctagaactgttagaggtcacaaaagcaagatggttgtatctatcacaatttttgtctgactttaactgggtatctgttacgatttagtagtcatcttactgacttcttgttggtttccaattgaatcctcacagtagactgttttcattgtaatcagtatcgaattatagcctgttcccttcttcataaatgaaggctttcttcttcaacagttcttagtgacttcacctgtactttatttctctgctttgaatatttcgaagaaaacatattcttgctctttcccaaggttaacactacatacattaccttgaccacaggatgttttcttgcagattgtgacctaattccatcacccttcagcagcccccaccgttttcatggattcagctaaaccttctgtaagatgactctttttccccctaatctttatatctcttttgatatgtagctttagtctcactttttttccttttggattttgccagttagatgtctccctggaattccacttcagcatggctaagactaagcttgtcttctctttcctccccaaagcaaattgtaattaggatagactgaaggtgacagaagataactaagatcttcttcatcctttcggctcttatggaagctgaattccagtagtcattctaaatttgttgtatgtcagcttatggtatcttttcatgtctttacattcagccaaagaggaagttccttgaaggggagaccagagggcgtgctgtgcttcttaatcctctctttcttaaccagtaagaggcattcagtagatatctgatgatactgattaatagaggggaacttttcagattcttttttttttttaaccctagtaagctttagtacaaactaaatgctgagagattatcaagtaagggattgatcatcacaagaagactcaggatgttacatcctgtaggttttatagtttcctatattgtaaaaaatatgagttatagcagcttgtctggatgtcatacaggtataaaaatcagttttataaacttgagtaaattggggcccattttagaaaaaactcttgcaggctgtgaatgccaatatataagtaaagtattaagtataatgttatttaatgtgggcaaacataaagccaggtgtaaattttttaggtttaaaatcttatagaactatacatccaaaagaaaatttcaagttaaacataatacaaagcaatacaatctaaattaacattaatttaatgtgatgaatgatattgccttgctaaaagtgggtcactacttacaatgtgcaaatggtactcatcgttagggtatagattcttttaaactatgacatacgtacactaccatgtggaacgtgatgatgtgttctctgttctaactactgggaagacttccttggcatagcacatgccatggggtcagttggctttgacttcatatagataygccatttacttggtcagtgtcacttctatgacaagtagtatgttgtgccagtttgattataagtacaaatatgggcaatgaagtaacttggttttaaggttgttactaagctgagtaacagtgtgtggctatacaaatttttataggctatcaggaatgaaaacacaggagattgttgtagattcaagtattttagattcaagtttgaagatgctcatgcagatgtttaactgagttgtatagacctttatgtttctttctttttctctttttttttttttgagacagagtcttgctctgtcacccaagctggagtgcaatggtgtgatctcggcttactgcaacctccgcctcccaggttcaagcaattctcctgcctcagcctcccaagtagctgggattacagatgtgcaccacgacgcccagctgattttttgtattttagtagaggcggggtctcaccatgttgtcaagatggtctcaatctcctgaccttgtgatccacccacctctgcctcccaaagtgctgtgattacaggcgtgagccaccgcgcctgactgacctttatgtttcttaactttatgctatacatcagttgatatttcaaaaatttaaatggtttctatgattattctttgggctaagaaattgggcattaattgtcctcatatgtatggtttttgtggctacttcatgtagattttatttttggtggttatcaaattggaatttttttttttttttttttttttgagacggagtctcattctgtttcccaggttggagtacagtggtgcaatctcagctcactgcagcctcgacctcccaggctcaagcagtcctctcacctcagccttctaagtagctgggactacaggcacgcaccaccacacctggctagttttttgtgtttttagtagagatggggttttaccctgttggccaggctggtcttgaactcctggcctcaagtgatccacctgcctcagcctcccaaagtgctgggattagaggcatgagccaccacacctggctgaaattggaatttcattggtactgcctgtaattttatgttaatttttttttttttttgtcgtcactagcttttatctaaagcccctagagagaaaggccatgataccttgtatacaaggttataagagtatacaagggaaagggagggctgaagggaacagggtgggctggtacaagcctcattagaaataccattgagtctgtgagtaaaacatcattatatgaaaaggagatgtggttttagggtggtccaattacttttgcaccagcctaataaaattacaagtcattatcaatagagacattgtaaaacctttttttttcccaaaagaagtatcaggtatgataattacatgtctgcccaactttcgttatagattaacataacttaattgtatttaaggtacaatttaggagagttgctgaaaaatgaatcttyagtattgggatgccttgattctaccctcaatagctataatggattatgtgtctgagtagattaataaaaatcttttgagcatttttcttgaactacttcactgaagattagctttttgagcatccattttaatttctcagtatataaggatcggtttatcacaactgtattgttttccctggccttgttagattatattttcatatcatgtagaaaaataggtgtattcgttctcccttgaagtcctttgtctcccaaaggaaatggttgcaatacagatgtgtcacctcttccacaggtaaagtggaatggagaagtagccagttaaatagtgcatgctcaatttggaacatttagagcatacaggaaagttatttatttggtaaatattttttaagcatttactatgtttcatgcattgtactagttgtagaggatataattgaatacaactacatgtagcccttgactttatggaactagtctagtataaagatttaagattgcctggcatggtggctcacgccactaatcccagcactttgagaggccaaggcaggattgcttgaggccagaagtttaagagtagcttggtcaacataatgagactccatctctaaaataaatagatagatagatagatagatagatagatagatagatagatagatagaagtagttagacaacacaaagcagtttcactcatcttgtggcaaggagttatgtatttctaatcaaatttggcaactcaagcattttcaacaaaatctacatgttttttcagaataaagtgaccaacacagaatgttacctgtaaaaatcagagcaataattgctatctaaaataattttgaaaattaagtggtactgaaaggctcatatagcaaaaatatggcctcctgtcattgtactttcctacttcccagactcaccattttcaacattttttagtagtttattttgccattttatagcatagtacctgacattttatttattcaacagacatttcttaagtacctaatacatgccattccttgtttgaagggatgctaaggatacagtggtgaacaaggcgttgtggggttgtatagagggtattcattcctaaccttgaaccaaatatttctttctgttggataatgcattaaaaattgcaaacagtttacaaacttttggagcaatggtggccttgatcataaagtagggactgcttctaccgtatacatgcttggtggtgtatttgtgatatctggctaaagtttctacatggaaattgactgactttagttttgagacttctgggaaccagtcaggcaaaatagtgaaactgtgtatcctgtttccaagagttgtcttttaaggttatctgcttcattcatttggcctgacttgctaggcaaatgcctagggtaaatatgatttgattaactataacaacaacagcaacaacaacaactttattttttagagcagtttgaggttcacagcaaaattgagcagaatgtacagagattttccctatacccgcttcccctacgcatgtgcggcctcccctactatcaacatcccccaccagagtggtttgttacaattaatgaacctacattgacacatcattatcactcaaggtccgtagtttacattagagtccactcttggtgttgtgtatgggtttggtcgattttataatgacatttatccaccattatagtgtcatacatagtaattttgctaccctaaaaatccagtgtgctccacctgttcctccttccctcctccctcatccctggcaaccactgaactttttaacatctccatagttttgccttttccagaatgtcatatcattggaatcacacagtatgcagccttttcaaatgggcttctttccgttagtaataggcatttaagtttcatcctcatcttttcatggcttgatagctcatttctttccctccctcttttcttccctgtcttccttccttcctcttctttcctgtttcctctttcttcttccttttttaagagacaaggtgtctcactctgttgcccaggctggagtgcagtggcccaatcatagctcattgcagccttgaattcctgggctcaagtgatcctcctgcgttagcctcctgagtagctgggatcacaggctccagtcattttagtgctgaataatatttcattatctggatgtaccgcctattcattcacctactgaagaatatcttggttgcttctaagttttggcaattatgagtgaagttactataaacattgtatacaagttttatgtggatgtatgttgtcatctcccttgggcagataccaaggagtgccattgttggatcatatggtaaatatatctttagttttgtacagaattctaggttggtatttttttctctctcagtcctttattttatttggagacagtctcgctatgtcgcccaggctgccatacagtggtgccatctgggctcactgaaacctccacctcccaggttcaagcgattcttgtgccttggcctcccaagtagctgggattacaggagtgcgccaccacgcctgctaatttttgtatttttagtagagacagggttttgccatgttgcccaggctggtctcaaactcctgaccttaagtgattcacccacctcaatctcccaaaatcctgggattacaggcctgagctactgtgcctgatctctctcagtactttaaagaaatatttcattccacttttcttttttttcttctttttgagatggagtctcactctgtcgcctgggctggagtgcagtggcgcgatctcagctcactgccacctccgcctcctgggttcaagtgattctcctgcctcagcctcctgaatagctgagattacaggcgcccaccaccatgcccagctaattttttgcatttttagtagagacgggggttccaccatgttggccaggctggtctcgaactcctgacctcgtgattcgcacatctcggcctcccaaattgctgggattacaggtgtgagctaccacgcctggcccactcttcttgcttacatagtttctgaggagatgtcagatgtaatttttatttttgctcttctgtaggcaagttgagttttttccccctctagcttctctcaggatttttttctttatctttgattttcagtagtttgaaaattatatgcctagctgtcagggttttttgcttgtttgtttttgttttctcaggtgtgactccagaaaggttctaaagaggagctttacaatctcttctctggggtttatggagacttcctttacccttctgtgttagccccttaaagcactgcrtcaaccttaaaagggcacaggaaagggtgtctatgccatttttatgccatttatcctgcttggtgttttctgagctttcttcatctgcggtttaatgtctcacattaatttgtagaaattctctgtcattgtttcaaatttttcttcagttcttttctctgtttcttcttctggtgttcccattatgcttttgtggttgtcgtacagttattggatattttgttccaggcttttttttttccagtctttttttccttttgcttctcggttttgtaggtgtctgttgagatactctcaagtgcagatattctttcctcagctttgtctagtttactaataagcccattaaaggcagtcttcatttctgttacagtctttttgatcagtagcatttcttttttattctttcttaaaatttctgtctttctgcttacattgcccatctgttcttgcatggtttctactttgtccattagagttcttaggatatttatcataattatttcaaatttctggtgtaacaattccaacatccctgcaacatccaagtctagtttcgatgcttactgtgtctcttccagctgtgttttttcctatttaatatgtcttataattttttcttgatagccatacatgatgcattaggtaacagaaactgctgtgagtggacctttagtaatgtggtggtaaggtgtgcatggaggggaaacattttcagtctgttagtgaacttttgtcaacttcacatgtgcttctcaagtccatcctgtaagtgggagagtagggctagagaggactgaagttgggtatatattaaatactttctcctacaaagaagcctagaggggacgcattaggggattttttttcccccagtattcactgtgatgacccttattgagctcctggaggtaaaactcacaaaactgtggttctcccccctgcccatattactacatgtccctggagtttatatctttcagacttgtctgcactgagcttccaccaatttgtcaaatacagatcaggtttccctaccacccgtgcagttgaaaacccacatacaacttttgactcctccagagcttaactactcatagcctgctattgactggaagccttgccaataacataaacagttgattaatacatattttatatgttttctgtattatatattgtattcttacaataaagagaaaagaagatgttattaagaaaatcataaggaagataaaatatatttactgttcattaagtggttcccatgggtgctggttcccatggaggttgccccttgtgagtttttgctcagggaagttgtgattctctatatttgcctgttggtctcctaatttgggagtcatcagttttccctgtgacctcacttctcttacagagttaagaacagttgttggtttttcagtttgttcagtgttttacatgttgttagaacacagtggtacttctaagtttcttaacatgctagatcagaaacctgaagtctcacctaatttggctttttatattttttcttcttttttttcttccattgctaccaaagcatttttcatctgtgtctggggtgacattagagcagaatgtgatttctaggtaaacattattgggctccctagcagaaaaatttttgaaagtagtacatgaattctgtataattaaaattttcttttcatcttaataggtataggtaataggcacggcctattttttttttgctcaacagtctaaaatagtaatttaatcacctaatagccttagttatatagttgaaagaagagttggaaatctgattcatgggttggaaatcacctgtcacatatgagttttaggcactggtcactttattttgaaacagctttggggttttttcctttttcaactcataataggctttaacagcttttagttttgtttctgtttttttaacagcatgagttgccaaatttggttatagcttcttggtacaagatgggtaaatttgctttgtgttgtgtaattactttttattttaaatgctacctcttttatgaacactaactttacactaagattaggaaaatgagaattgcatgtctgcaacaaatagctatctgtagtattaaattgtgaaaatgtagactttggattggagctggcatctcttaatatgtaattgtaacatagagtaaataagtattttgtcccttgtagggtcaaacagtacagtgcatgggcagaattagagatgtaggcttttttttttttttttttttttactggcttagagaaccgtttgatcagctaatatggaattaagtccctagggctgcccaggcacaacattaactgctattaaaggaaaatttaaaagagtattagtgaaggttaaatactgaccatggacatctggcaaaattgatgttttttttcccctccaccattgtttatagtttattgttatttatcagagaattaatgtttattttcagaatctattaccataagaaatctgtttgaggacttcgtatgtgccaggaattctactaaataatgatataatgctgaacagaattagataggatcctcacttcgttaagcttacagtctagtggtatagatcaacattaatcaaagaataacacaaatagaaagcagagcagtggttcatgggattgactgtagagaagcatgagggaagttcccaggtgatggaaaatactttatttcttaatcgtggtggttacatgtgtgcatatgtttatgaaaatatattgtacatttaaagtggatacattttatcacatgtaaattatgactctataaagttaattaaaaagaataactcaggtaaggtggtgtgtgcgcctgtagtcccagctatttctgaggcaggaagatcacttgagcccaggagtttgagttcagcatgggcaacatgagacctgtgagactttgtctctaaaaaaatttaaataaataactaagataaatgtaaaattacagctgtagtaagttctacaaaggagagttacatgggctatgacgatgtaagatagcaagaactgacattggcagggaggaaatgatgatgagtagaagtaaataagtgaagtgtggggattgatgtcaaggggacagtataaaagaaataacagcatgcgccaaggccctaaaattggaaagtccttggcaaattaaaggagtttgaaaaaggccattgtgtgcaaagcagaaaataggtactacaaggtaaaagatggagctaagcggtaggtaaggctaaaccttgtcagccattgttaaatattgaattgtatcctaagcacaactcagtggaaagcagttaaagttctttaattgggggaggcaatgaaggggtaataaaattggttatagaaatactgctctggctctagtgttgagaatgaattggagtagccagagtagattcaagaagactttagtaagattattccaacaggccaggacctgttatagggtggtggcaatggagagagatggacagaatggagagtgtatttaggaggtaaaaatgacagaacttggtgatgcactgaatgtgaaatggggaaggtgtctaggaggactactaggtttatggtttgcgtattagggtggatgatagcagtttcatttactgagacagggagccctggcagagtacccagcttttagagtgggtagggggaaggggagagtgcatctggtgttgggcattttgaagtgatttacatacaacaaactgaaggtatctttaacactgagtccagcaggttagcatatttattcagcaagcattgcacctttttttgttgtttttggggtcttcaactcctggcctcgaatcctccctccttcccccgcctctcccagcctccgcctcccaaagtgctgggatttcaggagtgagccaccgcgcctggccagcatcgcgctgtttgtgcagtgtgccctgtgctaggtcttgcagtgggtaccagtagagacataaaagtacaaaagataattggacgtttagtagagtcctgaaagggggcgggataggaagatacctaaccataagaaaaaccagcaagagcggaaaaggagctagtcctccagatcaataagttaatcacttatgtttgtgattccctgcattttgggtgattctctgtcgaggtcctcttaagtccagacttttgatataatctgcagtttgcgccatttggattcctgaagcatctttacaagccacctacattccttatggagctgtggcacaacagcaagcccacgatgtctcaccggattaataaaaatataggcgctcacgcttttgtttaccgatatagtatctcctcctcccctcactccatcaacccccacgcgacacaactttccggaagtaagcaaaatccgttatcaaggtgaaactccggggaccaggctccacagctgccataaactggatggcaygttaraagccggtgggtgtaggtgaggcacgctggcgcccgcgggcccttctccagccgctacccagtgggaatccgcggggctgaagccccgaaaccaggctgagcgtcccagagcgcaacctccctttcccccagcagcgccggcgccgcagaagccgcgtgtccccaggcgcactcccccaaggtgaacccccgccccccacggaggcggctgggtcgcgggtctgggcggggcgctccggacgccctcccgccgctgcgcacccctcccgcgagctgccagctccctcggcctctccacccaaaactggcccaaccgccaatcgtctgcctctcacctcctacagcaggtgacccatggccaatcgccaggggtctctttgccaggagccgccagggccagccaatcggggcgacccctccgccggggaggggacgggaaaggggtggggggtgaagggggtgaagggggtgtcccgggggacgggctgaacctcagtcaggaccgcctgcaccgcagtccggggatcgggtcgaggggagaagaaaaaggggtgctcgggagcagcccccggctacctcccctggaggcacagagggcgggggccttggcgaatggctttcttgctggccacttgcggagtgagtagaccccgagggtctgggagaggggccggcccctacccctgagtccccggggtcccggccgccaggccggagcgcgaatgtcgtgctcaccctgcctccttcccgccgccccctggggtgagtaggacgacgtggctgcccgggcccctcttccttgggagttctcagttcctcagcctagatggggtggaggctgaggtcagggcctccagttccaccgagagggcattcgcccccaaatgagactttggaggaggtctctttttttctattcatttttgtggaactctgttttccttttgaaagctgtctcagaatatgattttaagcagaaaagttaagctttctcttatgtgaaagcttaattttgaccagttgcccattaatagaatctccagttgcaggccaagtgttttttggtggtggtttatttttggcacggtgttcgtgcctggccctgtattttttgtgtataaagtaattacggatgctattgtttttgagtatgtgtgtcgggaaggaggtgattttacgctttttgggtagcttgtgcaaaaatactgaaaactttggtatagttttatggggttcttagcccagccgagttatggaaagttgagtataattaatggactaggaagcatatttgagtaatgcactttttgctgacattcatactgtattataagtatttgttatgaaaggttgagagatgtattgaacaagaaaaccagttttgctaatttgaagtaatactttgttttgctttttgattaaactgtttacttttagctgtattaaggaagttaaaatcaagtaattcctagtttctcagtggagaagctggaagcatcttagaatagtagttgtagttttaaaagtttttacagtgaactttgaaactggaaattctcacgtagttaattatgaataatctctcttgaacactgcctgtattgaactaagtagttgatgaaaccctttaatgaatactgttagcacctgtcatttatttatactttaaatatattgctttactcccccccacctttttttttttgtgcagcccgacaagagacaacctaaataaaaataccgtattaccttttctagttcagggaaggtgtatgattaaaagtcagatttgggccagtcgtggtggctcagactgcaatcccaacactttgggaggctgaggcgggagaattgtttgagtccaggagctggagaccagcctgggcaacaaagccagaaccttccccccgcccctgccccaataaaaatttaaaaatgagctgagcgtggtggtgatgtgcacctgtgttcccacctgcttgggaagctgaggcggaaggatcccttgagcccagaagtttgaggttgcggtgagctatgattgcaccgctgcactctagcctggatgacagagagcaagactctgtctcaaagcaaaacaaaacaaaacaaaaaggcgggcgcagtagctcacgcctgtaattacagtgctgcctataatcccagcactttgggaggccgaggcggccggatctcttgaggtcaggggttcgagaccagactggccaacatggtgaaaccccgtctctactaaaaacacaaaaattagccgggcgtggtggcgggcgcctgtagtcccagctactcgggaggctgaggcaggagaatcgcataaaccctggagggggagcttacagtgagccgagatcgtgccactgcactccagcctggcgacagagcaagagtctgtctcaaaaaaaaaaaaaaaaaactcttaaagaaaaaaacagatttgtagtctgatttgagagcttaagtgagaaacaagaaagacaacagacaagtttcatctgtttacaaagtgccctgagtttggctttgacagagatgacgatgaatttggaagtgcccttcagtaaatacgaggatgcaaaggctgtctactggtcacgttcattttggtatttctaaagttctatgatatttttaatgtgaaatttttcaaatgttttttaatgtgaaaagattattatattttgtacgctcagccatccccacttcaatctctgttgatattaagattagtagggaatttaactgtaagtttggttcagccaggaaagagcattattttgttagcaccatgttctgctggttggaaagtcaggcactcacatggtttgcacgctgttgattaagaaaggggacgatgacaagaaaatctgataatcaggcttttgttcagagaagcaaattctaggatgtcccctggggtatgttgagttctatctgtagctaaactttatactgtagagcgaaaacagatatttatgatgattcttatatagaaaaaagactttgtgattactgtagtatacttagaaaattatatttaggaagcttttcagtaaaggtttaaacaaagattgttaagcttgaaagaatagttcttatactgacaatgtaattaagccacgtattcctccttraatattttaatgaarttctaccacacacaggcatttaaagctactttccatcttccttattttccatctccagtcaccaggtcctgttatgtttgccttagtaatatttttcagattcgtcacttttttctagatgataatgctttaattcaggccatcatggtctctcacctagacttttgcaaggctttctgactagtctgtcactggactccccttaccccatcctttttatccaaaaacaaatttggaatgggttgccgctcttatagttaagaatgtgttttggctcctccttgccagagtccagctgcccagcatgtcctggaggcccttcttcatattctggtcctgatttatctctgagtccagactcagctccaggtgctttacccacggcatccactgtgaactgtttctcattgagaacatgccatagcctctcacagttatttgtcttttcacagcctttccttcttgcttagattaccccactgtatctcaagtggtaagcctccagttcttccttagcatacagctcctgtgttaaccttttctatgatgccttccttcaggcagggtgagtttgttactcttgtgtgtgctactacagcactttgctcatatctccatatcacagccttcactaagttgtattgtaaatttttaaacatatgtgattcttgcattaaaccctgatttcctagagatctggggttctcactcatctttgtatccccggggcctttgtccctagtttagtgcatggcacatagtaggtgttcagtaagtgcttaagtgatcaaaatatgtgacgataatagcttaagtgtgtaaacctttgactcagttttactggagttaggtttttccctgtgagttaaaaatgcttcctaggtcaccaagctccctggttgctaccagacatgagaaacgggggattggaaaaatgtttagaaacagtgctaaaaatggtgagcagggccgggtgcggtggctcacgctgtaatcctagcactttgggaggcccaggctggcagatcacctgaggtcaggagttggagagcagcctggccaacatggtaaaacctcatctctaataaacgtacaaaaattagctgggtgtggtggtgggcatctgtaagcccagccacttggggggctgaggcaggagaattgcttgaacctgggaggaggaggttgcagtgagccgaggtcacaccattgcaccccagcctgggtgacagagcgagactctgtctcaaaaacaaacaaaaaaaaaagtgggcagacttccaggactccccaccttcccctacccaatctataggacctctaacatgattaaaataatactaatagtagtacgagtactaattggttctggagtattgttagtatcataggaaaaagcatgtaggctagctagaatgtcagggaaactgctttaaaggtgaaatttgagctcattccagatgattaggtaatgcttaattatatttgctattaatattatctctattgtccttaaagacatcctttgaagatgatgatagtacctggccataatagacattaaataaatatatgtgtcatgaatgaatggtttggttgctctgtatgtgtgtgtatacatgtgcgcacgcaggagagagagaagagaactgtagttcctgccatattggagttcatttatttctggagacacctttaggaacttggcttctttgctgtattgactgaacaactcgtttttcccaaaatgtgccacttcaattaagttattctgcttactccgttgtttctttgcattctctgcattccagagcatgttttaaaatctggttgtgttagtctttctcactcagtttcaaggttacactaaatgacagagtttgcttgtgttttgacatattttgtcataccgtggaggacttggctgcagttggaacctgtaaattcttactgtgtttatttaaatgaaattaatttttattaaggtgaatacacgggccccaggttttccaatatggttaggaatttatcctcctggtgaacctagttgtttacctggaagtattggcatcacacaatcctagagctggagagaattttcaaattctaattccatttctacctttttaaaaatttttattattgtggagaaatcagtctcaaagcagctaaacgacttgcccatggccacatagctagagagtaaatgactagggccagagcctagatgactcttgctcttttattttctccagagagactcagggtgctgccctggtagtctccaccccttggtcgcctttcccccccaaaccctagtacttattcccatttttagccactaattttggtttccttgagattcagcatccagatccaaaaaatatacattcttctgtaacagaatattgttcctcagttggcctccttgtgcttctcagctcctcagtttgggaatatgccttttctggttattctccattttcttgcagatttgttctctggccttctctcttccgtgctctaggaggctgacttttacagctttcagcatctgggatcctttatcccttggcttctggttggggtttagcaaatgggaagcagtgacagaaaatggaagggaaaaaaggcctttggagtatttgttccttctgctccttccatgctttgaggcaattctggcagtgactgttttacagccgtccatgtccactggccggtgggaaccttgtttgtttccttgccccttcaggctacttgcagctcttaattcctgagtacctcagcatctcttgttagttttcttagccctactctcacttctgtgggtactgtagtcacttgattaaagaaaagttcaaacattgtatctgattatgctgtttcctgccagggcccactagcccggtggagtactgctttacccctcccatttctgtccaaatcctacactctaaattgcatcctctgtgaaagctttctcgtccttataactttctcctttgaatttcttcgtgcttttctgataacattttaccatgcttgaatcaattatttgtagacagatatatattccctctaatagaatgaaactcttttagatctgtgtctgcttcatcttggcatccccaaaggatccggcacagggccatagtcataagagatgctcagtgaataagtaattattgtaacactgaattctaaggtccagcatagtatgtgtaaaaatgtgctcaggataagatttagtgtgagataacgagtttttagagagacaagaagattgtcattgcctcatcttgtttcttgttttactaccatttatttcaatgtgtttttctcctagttagtttctctttcttcttaaaaacgtttagccttggaaaaattcagcagccatacattacagcaaccaactaatataataaatcccttaaaataactctatgagttatttatgatttttccacgaatattctgatttataatctgcaagaactagttccttgattactttttgtgtttaaatgttaacaggtgggcacattgcagaattccttaattcatttacaaaatttttattgaggacttgctacaaaccaaacactagcccggtggagatagtagagaataaaacgaagtcctgttttcattggcttgtattttatatcatcttgatagattctgacaattaaactaaatcagtaattttgtatgcactttttaacaactttagcgaaaaccgaatctgttttcttctggtactcattggcagctaaaattagatatacgaagacagctttggcatatataatttctaagagataaatgtcagaacaattgttgagtctattcaagtcagggtcgttgttttattttgtttgcctgtgactgatcatctatctgttagtcctgactagctatcaccttgagtgttaatttgtcaatttgttatattctgctgtagagattcagtcttgttagattaatatatcaggttttgtttttgaaaacatttcataatcaaattttcaagaagtattaggctataagaattttgcagttatttcagaacctgaactaactactaaagtactcagtttaaggattcacgtatttaatgttaatttttcctagttatttgtagaacacatttccaggaaatttactcatttttgatggatccttaaaagtagactccagataggctttccaaaatgctcttaatctgaggttggggaatggaagaatatttttctttcatcctgtactagtaaacctctcagagtttatttagatcctggaatgatttactccatgacttctaagaaagatactgcaagtagcctaaccaactaaagtatctcagaagaaaagtgttggctgattgccagcactacatagtccaacagtgcttttgttaggtggtgtgctgtagtaggtgttttcttctttaagagattgctttcttggatgttgagtcatgatcatgttgttggcaggaaggaggtggaaaaaaaaaactttgccattttgcttggttatattggccacttttcattattttatttattccagtatagtgattacgaagttttaagtgctttttgctagtgcgtgctttacctttaaatgatattataaatttgctrtcctacttttttgcttggaaaggtgtatctgagcagctttagcatttgccagatttactcctggaaaacattttakaattttatagacaatttcaaaagaataatgcttatgaccttgcatgctaaaatggttataaaattttctaaaaatgttcataacctgtagcttctgaacatttttacctaaagcttttgaatgtaaattataaaataaatgcatatttattttaaaaaattaaacaacatgaatgtgtaaaataaaaactcagagtcactgtctcacatgccctcattcctcagtcccattccctaggggtaactgcaggtgttttgtttcttttgtttcatgtgttatatttcaggggkgtgtgtgtgtgtgtgtgtgtgtgtgtgtgtgtgtacattttttaaaatgaaacttctagtgcgtaagtaaaattacataaaactgcaacttgagtattattcatgtgtgtacttatctagcataaggtaagcactcagttaatattaactgcattgaattccagtgtcttttatttctgtagcttgctttctgcattcagaacctgtaaactcatttcattttaggttttgtagttttttaaaaaggcaatttgctggattctgaatcatctgaggcaattttatatgcctttcataacatttgtgtcttaaaaatcctagctatatcctatatagagagggtgaccatgtaatttattgcctaaactgggatacttgagagtgaaggaggctgctaataataactttgctgagacaaccaggcataaactgaccatccaggcaaactaaaatatacagtcatcctatttacagacttaagttttttgtttgttttggttagtttagtaacttcttatatgggtttgttgaataaattgggagtgtctgggaaagacaagctgtcagtgatttaaatagagaaaaatggtacgaattccagacctttattgtttagttgtataagtaaccaaatcactttatggagttagtatttgtgttttgttctataagtcaaagggtgtattagtatcagatgagggtatcatgaagagtaaggaattgtgctaagggttatgattgaagttcttgcattttagctgtacccgattcctgtaccagattttagctgtaccagatttattttttagcagaaactgaacattacacataaacctttctttgtaaatttaaagataaacgcaattctggtttttcaaagcactaacatatgttcaaaaattagattcttttatgaaaaaaactttctttatattgtttgattctttgttaccaaggtaataattaagtacagtttaccttttgtggttcagtcataatacccagtgctttcctgaacatctcatattggaatatttttcctgctctgttttccatactgtgttttaccacttgttttgtctgttattcatttcttttttattaccattctctattatcttcttgggagttcatcaacttatagcttgtttttaaaacagatgttaaatacaatttaacttatgcttatagcctttacttgattgtagatctatatgaaaattgcctgtggttatagtattatctagttcttgattcgttttgtttttatccatccgtactcattgagtgccttctatgcgtaagggcctggagatatagtggtgaatcctggttatctaaggctccaaattatgaaggggaagtagaacacctaccactgtgttactttacatgtattactcatttaatctctccagtaaccttgagtagtttattattatactcatggatgagaaaatgtaagtgaaaaaagtaatttggctagatcacacaggtaattcattagaaagttgcagattcaggatttaaaactagatgagtccttaaagctgtgctcrtttccactatgtcaagggccttcaggcagtttttagattacattttagtgcccttctgtcattaattccttttaaacatcattgtgatttaatagaaaagtataatggatttggtcaaaggactaggttgatatcccaattgaaaaaaaattcagctggatgatttgggtaagcacttataaaacaggtttaatatctgtctaccttactgtattataatgctcaaatgagaaagcttgtaaagtgtctagtagagtacctaatactctgaaaaaaatttaatatacattgtgcatccatgatgttagagctgcttacttagcattacagaaaaagaccttacttttcagggcattcttgaggtacctagcagttggtaaggtaactacagctaccatgttgacaataaagaacctaatttgaagccttagattatcaagacattggtaaatggaaaataacttctctaaggtatagtgaaaggaaaggtttaatactaggctcaattttatggatattttttaattgatgatcttcactccaaatgaattgatagttgactattccttaggattaaaagagatgaaaatcttaaccccagaacttccctgttcttctaagtcctgttcttcccttagcagaaatggataaaccacrgggacagtagggattgtaaatgtttccaaattttcagtaatccaaggaaatcacagattagtgtgcctcacataaaatcatggtataagtaatatttctggtctctttaatatactttttttcatcgtcaaaccacttttggtagggagacaagatgtcatttctctaaaaacttaatttgctaacttaaatttctaagaaaggccattatgtttggcataatctttttttttttaacttgccacttgctgctcatgtacctacttttcctctgtgtagttacagatttttctcttactattcctttacttgattattgatgttagactcacagcatggtaactttctattctctcttttccttacttttatggaagatcagtaccacacttgcttttttccagtcttctggtatctctccagttcttgaattttcaaaaataattgtaagtgattgaattgtaagtatgctctatacttctttcattggatgaaagcttatctgtgatgcatgtcatctcaaattgctaattgtgaacataaactttccaatattctcatattttaatcaaaattacattcctgctaagttttcattagttttattatagggtatgtgttttactaattaaaaaaaaatgtctgcttttgtccagattcatgccatttatttttcattaggaggcttgttgtgtgttttttctttgttaagtttttaagctattgtttaatttacagttctactactgataacttacctgtttttcttgttattctgattttttctatgagacaaagaataacttacttctaatatattttctttttctctttttacaacatatttttattatatatgattttgccctataagaaagtactgcatataggacacttactcctttaagttttcactgtgaaataaaattagatatgaaaacaattattcatttgtgaatttctttttacaatgttattactcagccttcctgttctaccttattctcggttcctcaggttgcccataggtttcttaatttccggattctggactcaagaacttcacctttatctccactgttcattactcttcctctgtcagcaggaattactttaaaagctcctactctgcctcaggaattgactcttgtgttgttttactaaggaagtgtctctccaaagcaactataatttatatgcacttcagacagttttaaggacttctcttgcagtactccttttaatgggggtaaaacattcagttacgtgtatgtgtaaagtataaatagtgtttaatgtcccaactgaaatcattaagaattgattttgctgacatttgttagcttttaagttccttctgaaaaaagtagtgttatttaacttaagtattagaaaggtagtaggaagtaccgacatacagttttgaggcagtttgatattcttctacaagtctagttatattattttagaaattccccttaaattggcccagatgtgtatgtttctctttctctctctattaaactggatacatagattctggatgatatagaagtatgtgttattcttcttgactttatgtatctactttagattttgcttcttttctttctctctttccctctctccttccctccttccctccctcccttccttccatccttccttctccctctctctcccttccttctttccttccttcctcctttcctttccttcccttttttctttacttcctcttccccttgcccttcccttccctctctccccactccctcccccaacctctctttctctctctttctttcttttttttttgagggtcttaccctgtgcccaggctagagtagctttattaataaagtgtttttgaaaaacagagactttttttttttagcatattcaccacagaagtggtttttctttacataggtttctaaattttatggttagattgaagtttaatttctattgagattcttctaatttaatttcttgttacatcacagaccattttgtctttatttctctataattgttgtgtataatttaaactttaaatgaattcatacaggaatcatctaattagagctgtggctcacatcagtgtaataaaccaaagagcagcaacctctttggtcctgagtgccaataatgcgacataatcccttcagttactactgaaggacctggacaaaagagaaagaaagacaacatggagaaaaggcttgagggagtagagaataggagaaagagaacagaaaggtaagagaaatctcgggagaggaggtcgggggaagaccgatgttgtggcatcaacaatttccagtcactgtagccagcgccatgtgtgttcatttaacactgagctggccctgatgggtatagtgatgaatgaatggcatagttcctgcccttgtggagttttaatccttcagagaagtcactcaaatattcaattatgataaaatgtgataaatgttagagcaagtacagaatactagaatgtgtatctacttgactcccagcttacttgttctcaaaagctactgtaagaagtatgaagtcacactgtctgaaagaatttgccctattctcagttcttttcaaagacagaccaccctcaatatggtaaaggactatattcttagtcctgtttaaaactcggccgggcgcattggcccacaccttgtaatctcagcacttttggggacactgaggtgggaggattgcttgagctcaggagtttttattttattgcggagacagggtcttgcaacatagcaagaccctgtctccacaaaaaaagtaaaataaaaaattatctgggcttggtggcacatgcctatagtcccagctacttgggaggctgaggtgggaggattccctgagctcaggaggttgagtctgcagtgagccctgattgtaccactgcactccagcctgggtgacagagcaagaccctgtctcaaaaaataaataaaaataaatctccattaaaaaggattaatatgaataagtgttgtggcttagtgttctaaatgttgaatggaaagagaaacagttaacacttcaggagaattttaatgaaatattctacattaggaagtagtgggtttctcatctcatgagatacttaagacaagactagatgactttcaaagatgttatgaaaagaacttctgtgaatgggaggttgaattaggtgactgctgtaagtcacaatataaagtcatacttgtgctttcttctagagtattagttttactagatttgagaaaacacttgttaactacttgttcatgttatcgatgaattttacatgatattttattggttgcagatggggcaactatatacataaattttccttttaaatacatgaaaaatttttgcattactatgcaagggtgattgggccagttctgggactgtcattataaacctcctgttacacattacctaaagaaaaatggattgatgagtagatctttggcttggaccttgtgaagtgtgaagtttattctagagttaaaagaaggttatggaagactatctagaggcaagtgtaagaagagagtcaaggtgaggtttatatgattctacaaacatcaaaaagttgtttctgaagaattgatttaggtaaggtttagatagcagtaatttaaatctgtttccattcagtcactgaacaatttttaatctaatcggtaatttgtttaaaaaggatgttttagttagatttttacaatgttaattctaaatggattcagaagagtgaaaatacttaaagatcacttttcccctctcatttagatgctttttttattcatttatgaatatgccattaaccttttaaaatatttactaaaaacaatgtatttagctgattttaactgggtcttgatagttaattattgataatcatgttacattgctgtgtgaaacaaaaccaaaaaacaagccaaacagtcctgatttttctgtggcacagtaacatggaaataagttgctcatttctttcatagtacagtrctctaatatctatgaaatatgatgtacttatccatttctatgtcttttgtcaccaaactgtatattttaaatgtctctaacaggaacttctttgggttatctttaaaaatgaagaagtttaaacacagttttataaatatatctggattttgtatacattgtttattaagattttttttttcaacttttgtttttgtacatgtcatctcattgggaaggggctttgtaatactcattgtcaaacagtttcttgatatgtatgtaaaatagacatttatcgcctttgaatttgaaaaagaaaacaaattatgagataagttgatttttcccatggtcttaataggacttagatttttaataaaattctattttttctttggttccaaatttttgaattttagtttgggaagagcaacaaaagtactataatagtagtaattgatagtgtcattagttgttgtctttagtagaggtagtagctgctgtactaataataggaggaggaggatgcccgtatttggctggcaagaaaacccagatttggacagccacaatattgtgttagtgaatgcactagaattagaaaccagatttgccagcccattactgtttccataataccataccatcttaatttgatgttttgagataatggttgtaaaagtgctttaatgataaagtatacaaagatcaggtgttgctgtaatataaaataaactttggcttcagtttactaaaatgagaatgtgaaaataatcagcatgctttgggcgaaggcagggaggagatgacaagtgaaagtcaagtgtgagatgggtatgttgatcaagtatattttacccatttagtgcagaattttgtggttgggttgggatttttacagtagcagttcctaaccctcagtcccctgcttaacagtatgatgactgggcatgaaaatgtggcagtcagagaagattaagaactcaaaagtttcttttggctaaagttaaaacataagaatcccatgctcttggagcttaaactctttacgtatgcaaaaagtaggacatgcaaatgctgcacttttagaccgagaaataagtaggccttctaaataaataaacatctataccacgtctaagtgtagtgttcatgccaagggtgaaagtgagtaggaaacttgattaggacaggtgttgttactttcacttagagaggggccacctcttagaagaggagaaaatttagaggttctttctttagtaggggaggagggaggaaaacttcagagatcatggggtgggttgaggaatgggagaactaaacagtgagaatatgaagttaacattaagggaagggaggaatgaactgaatgaaaaaggggaaaatagaagtaacctaggtgggttttgtttatgttcctttgttaaattactgttgttctagtggtgactgggagccaattacagggtttgggggagataagaaagtgattctggagagaagagtaaatccaatttgagcagcagcatgtgtaactgctgagaagggaagcagtgctccaagttaatgaggaagattgatgtaccactgtttaaatagacctaactgttaaatagacctattatttgtgtcaaaatagaactgtattttaaaaattgaaatgtcttcatgtatgaagggaaaagtattttttgtactattaaacwttgcttgggttctggtagatttattgsaaattctctttctctagggtttggattcaggatttgttcctagtgtccaagattttgataagaaacttacagaagctgatgcttacctacaaatcttgattgaacaattaaaggtatggcattagtttgtatattaaatttatataaatagaaaatgttactgagcttgatttttgagtaaaaacagttacttgatgttaatttacagccctcatgtggttcttcagcagtttttaaagcagacttaaaagatctagctgacttattcaaaggtctttatctctaattatattggtaaatagcatatttacataatgcttttttggtcattaagaaaaaaaaggtaaatatgtaggcataattagaaaaaaataaggcaagatttggttcatattctgtttaaaatttccatgaaactgtgttttagtggctcaatttctttttttgtttgtttgttttttgagacagagtctcactctgtcacccaggctggagtgcagtggcacgatctcagctcactgcaacctccgcctcccgggttcaagcaattgttcttctgcctcagcctcctaagtagctgggattacagaggtgcccgtatttttagtagagacggggtttcgccatattggccaggctggtctcgaactcctgaccttgtgatccgcctgcctcggcctcccaaaatgctgggattacaggtgtgagtcaccgtgccctgcctagtggctcaatttctaacacttttttaatttgagggagatggaatatggggaggtgatttctctacctcttttatcattactgaaatgaattgtctccttcagttcctacttaaaattaattaaaagcagaggtgctgggaaaaggactgttgataaacttggaaaacaaagcagaaaaaaaacttcaagtttgaattcatagtttaattttttaaaagtcatctgttttcttttgcttataattcttccagagtgattgatcttgaccagttaaaatgatttcatacaatagaatttgactttgattgagtgctcgaaaaaaaatacatgttgtcttgaaaataacatataaatcatccctggacaaaatgtgtttaagaacaaatgtttgtttttctgtgtttagtgaatgtacatcgtatagtaaagtggcttgatactataaccattttttaaaatcttgtagctttttgatgacaagcttcaaaactgcaaagaagatgaacagagaaaggtaacttccataaccgtgcttttgacgttaaaaattttaaattcagccttttggagaacactaagtatcttagtgtgtttttacttactataataatattattgacctagtgtaatattactgccatatggacctcaagggtacttttctgataaatttctgttatggtttcataattaaacaaaaggataatatacagagttgtggagtttttttggttttgttttgttttgagatagtcttgctctgttgcccaggctggagtgcattggcacgatctcagctcactgcaacctccaccctctgggttaaaatgattctcctgtctcagcctcccaagtagctgggattacaggcatgtgccacacctggccaatttttgtatttttagtagagacagggtttcaccatgttggccaggctggtttcgaactcctgacctcaggtgatccacccaccttgacctcccaaagtgctgggattacaggtgtgagccaccacacccagcccagagttttaatataataccttttctgtatcatattcctaggagtaagttatttccttttcatgtatcatatgttgaaggtagaaagttggttacatatggtcacttcagataccaataaaccaaccagcaagaatgttcagaataaataaaaagccatatatgaagaaacaaatcaaatactgctttaattatggttctgctattgtcccccacttgcatttctgacagcyactttgtagtttgcatattgtcttttttctaattaacatttttcctctccttggcttttttttttttttttttttttttgctcttctgttgactgtatagccttgcgtttggctcttttatacctgttaatagtaactcatgttataactcacctttcatttttagttttgggatttagtcccatgtcgttttaaaacaacttaggaaagataaatgtgattttaaaataagtgaaattcgtagaaaagccaaaacttgctttcaggtaaggaataagaattttttgttgttgttttttgttttgttttgagatggaatcttgctctgtcgcccaggctggagtgcagtggcgtgatctcggctcactgcaagctctgcctcccaggttcacgccattctcctgcctcagcctcccaagtaggtgggactacaggtgcctgccaccacgcccagctaattttttgtatttttagtagaggtggggtttcaccatgttagccaggatggtctcgatctcctgacctcatgatccgcccacctcggcctcccaaagtgctgggattaccggctcaagccaccgtgcccagccaggaataagaatgttttatattattcttacaaaccttaaattgaatcacgtgaattttattaaagagaacatataattcataaaagtctggaatttttatacamataattgatttagataaaaaacaaaatacaacaaaaagtactcccttcccaacttgcttgtactcacttagaatgagtacattttggtaaaattctttaaatgactagccagtaaaaaataaccgtccttctttgtgcttctgattatttctgtttaaacttattatttttcacagaaaattgaaactctcaaagagacaacaaatgtaagttatatgtttgatacattctgactttgcattagaaaatgttttaaaaagttatttctattttaagctgccactattgatgacagcaattgagatgttagtttttatgaatattatacaggggtgcttaagcattgtatttttttttaaaggaatttaaaataatactaatagaataagccccttaatcgaaattgacttcatgtaccatttacctgtttctggtctcgtttgaaatcttgataaaaggtgtcttccacgcacagtggatatgttatttcatattttaaaaaaaataattaatttctttgattcttaaggcagggtcttactatgttgtccaggtctcaactcctgggctcaagcgatcctcctgcctcagccttcaaaagtggtgggattggccgggcgcggtggctcacacctgtaatcccagcastttgggaggccgaggtgggcggatcacctgaggttgggagttccagaccagactgaccaacatggataaaccccatctctactaaaaatacaaaattatccaggcgtggtggcttatgcctgtaatcctagctactctggaggctgagacaggagaatcgcttgaactggggaggcagaagttgcagtgagttgagatcgtgccattgcactccagcctgggcaacaagagcgaaactgtgtctcaaaaaaaaaaaaagtgatgggattataggcatgagccactgcagctggcttctttcttattaaaatatattataattcaagttttctgatatagtggacttctgacattatataatgggctacttatgagatgtgtaccttgctcaaaattttaaaacaggtaaaataataatttgattcaccagtgttttgacaggatcctttattctccatacttccatcaaagtctttttatttttttttaagaaacagggtcttgctgtgtcatccaggctggagtacaatggtgcagtcatagctcactgcagcttcgaactcctgggctcagacaatcctcctgcttcagccatttgagtagctagggctataggcacacgctaccacacacagctaatttttattttaattttttatagagatgggattctgctatgttgcctaggctggtctcctagcctcaagcgatcctccttccttggcctaccaaagcagtgggattacaggtgtgaatcaccatacccagcctatcagtgtcttaggtagatttcttagggttgcttgctgttgatgtaagaattcgtaagttaatcagattcgtatgtctttctgtttgaagtgttgaaaaaccatttagagccaagcacggtggcatgtgcatgtagtgccagctactcgggaggctgagacggggatcgcttgagcctctgagtttgaggctgcagtgtgctataattgtgcctgtgaatagccactgcaatccagcgtgatcagcatagtgagaccttgtctcttaaaaaaaaaaaaaaagaaaaaaaaattagatattatttagtataaattaacaatttgtggcattcgttaaaattcatagaactgctaatgaataacttcatttggcattatcagcatactagaacccactagatccaaagaggatatttcttgtgtagtatagacttaaactctatacatctgaactgatttttatattttaagctttaacattatatatccatttatttgagccaagatcctaaaatcagtgttttgtttttatagagcatggtagaatcaattaaacactgcattgtgttgctgcagattgccaaagtaagtaaattttactttcaattacctttgtgtatggagttcaaaaattataatggygtttttctttaatagcaaaaaaactcagatctgaaacatagtacctttctacattaaactgtattgtgagcttattctatggaacaactgttgtgtttggctattatcttagctactgtttctggtaatgtcatttctggtagctgggaaggaggggagcatgtttgaatgactcatcccttccttccattttatccattatcactgcttagaacagggacatattttacaaaaccttccacaaaaaaagtttttcttagaaaatagagaagtaagttctgacagttattgtccataatgaagaatataatagagatatattttttaaatttttacggatttttttctggtagtgaactacgttagtggattttaattattcttccttattcatgaaacaaaatatattttgaattattgtgggttaaaaatttcatatatgttgtctctttttctgaaaaattttggtgtattcaacctaaatatatattttattgcctgagagtttctgaaataagaatattattgtttgagaataggaatttttaaaactatttctacctcactacacccctttatttccagcaagtggctagcaaggggtgggtgaccagctccacagcccagttgagaaatgttgtttgaatgagtttataattactcatctcttttacttcttcagttgcatatgtttgtttgccaaatcatagagacttttaacctactgttgttaatgacacaatagcataggacagtccatttgcatttggatagtaaggatatttagcttataaattaaatggggcaatgtcattttcttttgaggcctgatttaaaatatattttttattttttgagacagtctcgctctgttgcccaggctggagtgcagtggcacaatctcagctcactgcaacctctgcctcctgggtgcaactgattctcgtgcctcagcctcctgagtagcgaggttacaggcatgcaccaccacgcctggctaattcttatatttttagtagagatgggggtttcaccatgttacccaggctggtctgaactcctggcctcccaaagtgctgggattacaggcgtgagctaccaaacccagcccaatgtattatacttaaagtgtcagaacttagggcttatgttctgtttctagatgttagtgatatctagatttcctatgtatgtgtctaaatttttcatttcctgttgtagatcatagtatattccaaagccaagcagaaggaaagataggattggaggcacaaaagagataaagtttttattttagtttttcttggctctggaattacataggtgagtagaagcacctatagttatccaaaagcttacctacagataaccagtaaaccacaccatgccctgtttgagtgactaggtattttagggaatacatactgccttctattgaagattggggaagcagaggagctgatacagtgtttaagccagtttgggtgatctctgaaaatcattcaggactttagatagttgtacagtaggtcagcctagcctatttcagtagctcactgtttagccactcatcgagaacatttttagtgtaatttgtacttgctacctgtctgtgttagcccagcttaataaaactacgttttagggttcttcgcaatggataacttggatcacgtaaatgaaatttggccttttatttattccagaaggaagttttattgttgttaagtcttcttatgtacaaatacaatcctcaattatatttgtactgtatatggactctgtatctttaaacttaatttaaatgtaaatgagaccgtgtcacttgcctgctcaaatacccctgatgttttccatctcatttggaatgaaatagaaactacttacgttcactgccctcttacctgtctcctacccttgcttggtcacaccattccagtaacattggctcatttctttttctcaggcaagacaagcttcccccctccacccccgcccccggctttagggatttttacttgctgttccctccacgtggagggcatttaccacagattgccactaggctcactctctcactttattcatatttctgccacaaggaacatctttggaaagacttttcctgactcctgtatctaaaatagcctatacctcccactggtttctttttcttcgtggcctcgtatcactagtcaagtttacacgatatatttgtttgtttatctctttattgactgtctaccctagagtacaatcttggtgaggaatttgctcgtcttaccacttgtattagtctgcatgggctgccataacaaaataccatagactgggtggcttaaagaacagaagtttattttctcaccgttctggaagccagaagtccaagatcaacattctggcctgttcagtttctgatgagggtccttctcttggcctgtagatagccatgtcttcacatagtctttccttggtgagtatgcacagagagagggagcgtgcacgtgtgagatagcaagctgtttggtttctcttcttacaaggacactaatcttattgaatcagggccccacccttatgatcccatttaaccttagttacttctgtagaggtctcatctccaaatatagccacctttggggttagggcttcaacacaggaatttggggagggacacaaacattcagtccataaccccattgtatcctcagtgcctacagttgcttaccatataggaggtgcctgataaataactgaattactgagtgatttttctaatgcattacttttaatggttgcatggtttagtattttcactatatgtatgattttttttacttagccacctctctgatgtgctgtgatgaccatccctataaactaatctttaggtaaatttaatcagttaatctatgattaagataaaagattttaaaataataacaacagtcaactttgcatagtcttaaagagcgtggattatggcccccagactgagtttgaatccaagccccaccactggagcaagtttatttatcctttctgtgctttggtttatattccatatacaagagggataatagtaatgtctgtctcttactgatgctgtgagactaaatgattatttgtgatgctcttggtagctggcatgtaataagctctaaataagtgtttattaaatttaaaaaaagaaggatgcaaattttaaagtgacagtaacacatctggtaaaagttggagaacttccattgagtactgatggaaatataaattgttatagccactttggcagactcttattcactggcaggttaataaaataccagaatcaactactttgagggagataatgccatttgagaccccacagtgatatgagaagatagctaatttgatacctttcttgtttggggctgattagtatcagcttcttagaggcggcatgctgtaagtaaaaattttaattttaagctccttccagttttgattctttgatttgaattcctattcccagtagattctctcctgcctaaatgattagtgtattggttcctaaactttactgcatattggagtcatttggaaatcagttctgattcctggctcccatccctagacattgtgttataattctgttgtgtggggtatcacctgggtattgggattattttaaaccccctgggtggttttaatgtgcaacaaagttttgagaccacctggttagtggaattttcaagtgggctttgttatctcagaagacatccctccccttacccttggtggagacagctgatgttcttctcctgggagactgcagtggagctggggagtaaggggagagaaggggagtagggcaggacagagtgaagataagctaggaggcccctgcaggtggagacttaaccagtatcacagtcaggtgatgtgaccacataccacaactcagaatgcctgtcagaatggcatgtgccagggggttgactgtgatttactagaacactatttttgcattgtttaattatcactgaaattgggaaaaaggctatgctagacatgctttggttttgaggtatagttgctacaaacttaaactctggttgattttcaccagttaaatcatgcggtaaaacagtatttcaatacaattaaaatcaggcactttaaatggtcattcttacaggcaaagatagagactattaacatttttcaaggtagacacagatcaatttgatttatgtagtttttatagtcttgcataaaatagatgcaaataaatactgttgattacttagaatttgaggctttaattttgtcagttcctgttgattatcctaagtctagaccagtgctatacaataaaaatatgagagctataaatgtattttaaaattttcttataacatttcgaaaggtaaaaagaaacaagtgagattaattttaataatgtatgttagtaacccagtgtaccaaaaatattatttcaacatgtaatcagtataaaaatttactaatgagatagttcatattctccctctctcttctttcttactctctctctcattttttaagagatagtgtcttgctctgtcactcagactggagtgcagtgtcacaatcataaataactcactgcaacgtcaaactcctgggttcaagcaatcctcctgcctcagccacctgagtagctgggactacaggtactcaccactgtgcctgactaatttttaaattttttgtagagacagggtcttgctttgttgcttagactggtctcaaactcttggcttcaagtgattctccgtcctcggccttccaaaatgctggcattacaggcatgactctttctctttttgcaccaagtcttcaaagtcatggatgttctttaagccacccagtctatggtattttgttatggcagcccaagcagattaatacaagtggtaagatgagcaaagtcctcaccaagattgtactctagggtagacggccaataaagagataaataaacaaatggtttatttcaatggtttttgttatatttacaaaattgtacagccatcaccataatctaattttagcatacttctatcaccgcaaaaagaaaccctatacctattaagcaaatattttctatatagattttctatatagatggtccctgacttaataatggttttacttaggattctttgacttcatgatggcagaaaagtaatatgcgttcaatagaaactgtactttgaattttgagttttggttttttcccaggctactggtaatgctatatgatcttctctcactatactgggcagtggcagcaagccacagctgccagttcgccacgcgatcacaagggtagccagctgaaactctgcactgtgtactgtgttgcgagatggtttttgcccaactgtaggctaatgtaagygttctacaacacgtttaaggtaggttaggataagctatgctgtttggtaggttagatgaattaaatgcatctttgacttaacaatattttcaacttaagatgggtttattgggaggtaaactccattgtaagttgaggagcgtcagtgcctccctttctcttccaacagcctcctactcttcaccccatccagcccttggcaactattaatctactttctctctctagatttgtctattcttgactcttcatgtaagttgaatcttacaatatgtggtcttttgtgactagcttctttcacttaacatcatgttttcaaaggttcatccatgtagagatcacttttgcctggaattttgaaygtgactacagttctacaggatatttccacgatgaacttagttaaatccctatatagaaaaataattgccatgctgttggtgttgattgttgtgtagccagagttagaattgtgtttggctaagaatgtacacatggaattaaaatcttagtggaggcagataaatcatgttctaacattattacttacctagtaaataagctttcttgtaggagaaatacacaaggagttacttacatgtaagaatgaagttaatatttttaacatttttccttaaggaccagagtaatgcggagaagcacgcagatggaatgatagtaagtttaatgtaatctttttgtttccctttacttctgcagagcattataacsagtcatatcaggagaagcctgaattactactcatttttcaatgccaactactcactgctttttgttgttgactcttgcagtttcctttaagctcccttctttcagcaatcatttgcaggggaaatgacaatcttaaaatttttctaagtgtgggttcagattgaatcactttgcatgtattaacttgaagggttaatcatggtatgaatactcagcttttacaattaaataatgcataactcagtgccacatttcttgtctaatttctatttttctcagatgaaagtgggggtgggggagtacaatattgaaacacaccttaatctatttgaatatatttataggttcctattatcttttatttttagtttttgtgtatgtgttaaccatcattgttaatgtggtatgtactgcatttttgttggaacaatttacaacatgaattctttctcttataaccatcttctcactctttcctctctcttatctttttacctttcctttatattcaacttcccctccaaaaagaaagaagaaaattgtattgttagtatttcccagatggaaataaaagagtttgaaggtttgtggtttgtgcttaccctagttttatggtaactgagtgaccttagtctgtattcctgaagcaggaggcagcttttttgtttgtcctagactttacaaatgccagcttgtctgagatctggaaaaacattctgtaaattttcaaaaacatctcctgattgtacttgaaaggatgagcatgttatctttatatttggtttaaaaattttttttaagttaaatctgtgtttgcgtatttcttaagaaagcagaagtaaaataagcatgtttggaatttgaattaaatatatcagaatttttgtcagttcaaagtatgatccatggtgatataatacaattgtatgatataaatgtaatacaaactgaaataatatctcttcatgagatactatcgaagattgttagcctcataggaaaggactgtatgtattgtctagcattttatggtctccaaagactccaaaggaaaaccatgttggctgttatttttatctcttttccctcaaagccaaattagttatattatgttaaataaaacaggcaggattttataaaacataccaaaaacacttgatcatttgcaatgaaaaacatctagaaagtttatactcatagaaaatttaacctaatagaaaaatatctttgaatcatttgcccagggactagagcatattttccttaagaatttttattttgaaaaaatagaggaactattcatggaataggccttagaggcaggctgcttgggttcaaataaaatagccctgccactcactacctgtgaccttggcaaattacttaacctttctgagtcttaatttcttttcctgtaaagaaagctgaaatgttctaccttagaagtttgttgtaaggtacagaacaagcgcatagtattcaatgaatgttagctatatgtacatgtatgtgtatgtgcaatacattgtattacgtgggtttcattaatgtcaaaacagattagggctgagtagtattatttttgcttctcaagttctgcacatttatttttaaagcaagttgtagaatgtaatgtgacatatttgagcctgaagttggctgaccaaggactgtggataagtgtagcatagttattttttctatcaaaaacaataacaaaaagattgagtacttttaatatacatgttgtcaaaagacaaaattacaacaaatttaatcatagatctaattggcttttattcaagatgcatgaatcggatcagcctccattctacaaaatagaatgagaggtctcactgggcagtggcaaagcagtgggttttgtaaggtgagaactgtaacaggaaaaaatgctgattggttaacatcagattacttttcttttaagggttaaaacagtgagcatttccgtattacactgattcgggtagactggaatctcctattttcagaaaaaaaaaaaaaaacctggtctattttgggatccacttgcttccttagagtttaatgatacggcatttaacaagagtgactccattttggtttggtctaatctgttgggccctagtacaagagctcagtccaaaacagtggcctctcataatttttgtttaacagtgcacaaagtttttaagtgttttctttggttgaccagcctaattgtaagaacgtttcatctggaaaataaaagattacatccaaaagagaattctggtcccttgttccaaagttattttatttcttattcccttcagtgggaggggtaaggaggtgtgacatattctcactgctatatatcaaagcgttaatggtggaattttgtctttgtaaagcatttggagttattttcgagaaaagcgctgtgtaaacaaggaatttattttaagaacaactccatgtttgttgagatacttgtttagttattatggcttggtctagtatctgaaaatagaatcaaagtaataaccagaaaacccttagcacccatgtaaatacagactttttattttgcagaccgggaaactgaggcccatagaggataagagacttaaagattctaagctattaaaaactccaagtctctgtttctttgcttttcwcagtgcttcaaaacattccccacttcagtttcttagttgtttttttttttaattattactgattgttttgggggtgttttctctaagtgtccttcatttttcagttaaagtatttgtggcagataaactattttagtgacaagaatcagaattcctgtgttcaagtcacttgatcgaaaagaccttatttaatgagttttagatattcatgcagaaagagggctgggtttttttggttttaaattttctttaacagtcctgaacacagtgtatgtttgtttttcacatggcctggaaaaaaatttttaacttagatattacgtgagaatgctacaaaaactttaccattacctcagtttctattattaggtgattttaagtttttacarctgcttttttgggcttatttattggcaaagtatttcccttatatttctgttttagtatcttctgttataagcactacttaatatatatgtgaagttcagttttccagatcaattaaaggtaaagaacttacatttttatttcttgggtttgcccagtttagtcttctaaatggtaaatgtaaactttgctgtggcaaagactttggtttaacatgtacacactcgcacccccctgctgccctatggagttttctttttaaaatgccttcatgctgtcagaataatttcttgacttagaatcagagaatcctagacttttctcccctctaaaattaactacatgtctgaatttttctccctctcttctgaatcctcagaaagcaagccctcttctctacactccccagttagaagatgcatctctttctctttagtgaccataaaactagacacacagtcagccttctgcatctgtggattcaaccaaccatggattcaaaatatttgaggaaaaaaaaagtacctctttactgaatatgtatatactgttttccttgtcatgatttcctaaacaatacagtataatggtgatttatataatatttacataatattaggtgtcataagtaatttagagatgatttaacttatatgggagcgtatgtgtaggttgtatgcaaatactacacgatattttatcagggacttgagtgtctgtggattttggcatcctcggggggtgcttggaaccagtccccctggatacctgaggagtgactgtactgtgtgatagcagcagtatgggatggaaagatgagatcctagtggtgcaggtacatcagttggacatttggtgtaactcaccaaaagtgaaaaaaacagagaaacaatatttgtggtgaattaagagattgagaagcaccgaattgaattgagaggtggttttgacttcctgaaatctccccacaccattttataactcctcagtttttccatttagctttaccttcttctgtgacagagattcattcattgtctttccttactatgctttaagcaactcttacacttctgtatagaaaaggtgtttcattccctcttttcattttgatcaacatatctatatagctaccctcaggattttgaagtcataaatgtgggcatttgggagggtagcatgagaagagcatttaattaaaaatagctatattgtgtttctttattttagagtactattaatcccrtagatgcaatatatcaacctagtcctttggaacctgtgatcagcacaatgccttcccagactgtgttacctccaggtaatttgggaaaatgtttcttagattcattgatgagaaaaaaataatttgtgtggctgtcatagcagtcttagctattactgtttatttytgattttccttgtttttaataaaagsactcaaaaaataatacagccaaaagtgaactgaaaaaagatgataatgttttgatattggggctttactgaagtgtgatgaaagtggttttgttattcaaagtgagatagaaaacaaacttggttactacgatttggattcactggtagaacaggattctatgactcagaattcatggctagcgaggaaaaattactataccttattctggataatccagggatgttccgttttggggtattctgtgtagctctgaacaatacaaatggtatgttcatggtagattttaagataatgagaaagtgaagagggaaatttatgatgcctactgatcacatgacatctgggttttgttttgttttttttttttttgtataaagcaatacatgcaattttttaaaaactggcaaagaagggctcagggccaatacctagctacactgactgattccttttgcccttttgttatatccaacatttctatgttctcgatggcatagtgaagtcagaaattgtactgtaaaatggaaaactctttttaaaagtactagtaagtatgtgaaatccttttgtgagtttttacttcttaagtgaattagcttaaactacctcttggggctaaagaggaacaggtactgtactccacttcagattttttgtggtttgaggctcagaaacacattatcatcagaagcatttgttggttttacagcatagttatactgcagtattggcctactgtggctggttttttgatatcctgcctggtatcttagtactctgtagcctatcatcattgagtttaagaggctaggaagtcaaaaggaaggagtagcatggaactagacttaatgaaataaagtttcaaaaattactggcctttaggattttgaatcccagacaattacagtcaatagaatgtgtgtttggctgtttctgtaccttattttatacgttcaaatctcctagaacctgttcagttgtgtaagtcagagcagcgtccatcttccctaccagttggacctgtgttggctaccttgggacatcatcagactcctacaccaaatagtacaggtacagatttgcataatttctttatgtctcataactctattaacatttgaggtttgtttgtgacctctgatgaggagggggaaagttgaagaaatgtgttgtatattttctgttggagatatgttagttttaacattatagttccatacatgaagtggttagctttgtgtttgaaagagaagctttagttaagttttatttatttttaagtttttaaaatttttatttttgagacagggtctcactctgtcattcaggctggagtgcagtggtacgatcagggctcactgtagttttgacctcccaggcctcaggctcccaagtagctgggaccacaggcacacacaccacacttggctgatttttaatttttgtagagaggagtctccctatgttgctcaggctggtctcaaactcttgggctcaagcagtcttcctgcctcagcctcccagtgtgctgggattatacaagcatgaggcaccatgcctggaataatttaaataaaataaaatattacagagttttgtttgtttgttaccttaacatttatttggtgatctatgttgactttttgaaaaatttactccagctagacttgcatactttcttattatgaagctgacacagaagtgcacagaataaaaactgcaagtcctctttactctccccccagtaatttgcatacatgtatgtgcatatacacttatgtcgtgtatttttattgtttttgtttaaacctaacttaggttatgtgtttctgtgacttgcgtttttcctttaacaaagaacacttagagcactttccatgtttgtaaaattaggtctacagcattctttttacagctgcctgggcaggtattgcttgttttttccactgatggaagcaatacttcagtgatatccttgtacagcacctttggcatatgtatatttttttagaaaacatttatcagtctttcacctttttgccagttttatagttagaaaaaagatacttcattttaatttgcattttctttttgtttgtttaaacgttttgttttttgtttttgagatggagtctcactctgttgcccaggctggagtccagtggcactgtctygactcactgcaccctccacttcctgggttgaggtgattctcctgcctcagcctcctgagtagctgggattaaagatgtgcgccaccacgccccacaaatttttgtatttttagtagagacggcatttcactatgttggccaggctggtctcgagcttctgacctcaggtgatctgtccacctccacctcccaaagtgctgggattacaggtgtgagccaccgcrcccagcctgcattttcttaattcgtttaggcttagggtctttattttttctctgttttacagggatactatcagtgttagatactagatttatcttgttttaaaattaattaaatgtatgttgaataacttgtagaaccaaactcaaggaagcatctagcacttttcacactgttaaacctggaaaccaaaaccaaaaccactcttgaagaagtgggagatcagccccttttgttcatcctcagatttttttcccgggtaggatttttcctgtgtaatgatgaataattaccctgtgatttaaaaaattcgaattagtaaaagtactgatgctattactttgatctttactatttaacagcatgggcagttgcctttgaattttgaaagaaaaaaaatagctctcttacttgaagctcttgggaaaaggctgataagcaatttgaataatgaaattgaaatattttggctgacttctgtatttcctgagctgtgtcacctcttcttcatttaaaaaatagtacctgtttgttgttgttcgtatttttatgttggaattttgaaacaaccaaaattccaaaatttttctgtttggaaatacgtaaaactagcaacagactttgagaaagtgagaagctcttcttatgtatattaatttttgtaaaaattacttccagaagataatcttctgaaaactatttcagttgaaggtatttcaaaaatctaacactttagagtagatttaaagaaaaatttaaaattaaattcctgtgatttatatcttatttgatttttcatcctaacttcattttctccacttttctttcccttacttctcttgttaatacaaaaaagaaataaaggaataagataaaatgtttgctctcctaagtaaatctcagatcttttgtttgcagttcccactcaaacttttcttcttagatacagtttcacttgtgtgatcacctggaatatttgcatgctacttaatcatttgcaattcttgatcaattttttttttattccaataagaaaaagctgcttttctctcttactttttctgttgggtaataaaaagaatatgaagttatttactaataaggtgagctacctttggaatttccaaaataagcattaccttttaggggttaaactttttgtgttatctttttaaaatacctttgtgaatatgatgactaaatgtggcaaactgatgtgctttttttcacaactattgaaccatacatataggaatgggcaaaaaatccgtaagtgactctggattcttttttttttttttttgagacaaggtctcactctgtttacccaggctgtaatgcaatggcacaaacacaactcactgcagcctcgacctcctcagattaagtgatcctgccccagcctgtcgtgtagctgagaccacaggcacatgccaccatgcccagctaatttatttatctatttttttaagagatggggctctcactttgttgcacaggctggtcttgaactcctggcctcaagcagtcctcccaactggtcctcccaaagtgctggaattacaggcatgagccattgtgcctagcctggattcatttttattgctgtcttcaatttcttccagaactgtggccctggctttcagattgccatcagtgtcttaataaactttagtcttcaccagacatctgtagattagtataaattgcctgactgacagcccttaaatgctcagtaagttaaattgatcttaatactccatttgtcgattggtttgatacttttttgttcttgctttactagtagataaggtaccagatgatcatctcagagattagatggcaggcttctttgtctgggtcttcattaatttccatttctttagttagactatttaggaatagaaaaatgttcttctgaatcttttcattttctgcattcttctcatcgtagtcctctatttttatctccacctctgagcccctgacttaggtggaaaagaggagaggaatttggatggtgtgtgtattttccatgtgattgccaaaaaatattgaatgataggaatgtgatatcctgcaatattttaatgtttatgtggtcttaatattcttttcattttgcattcccagtggctcactgctgcatttttaggtatctggatctgcagtgtaaaataagagtcccggcatcccattgtaatcatatctgttgttggacttgcaactccacaactcatataatcaaaagggcccccttcctagtattaatgataatctttaattatagaatgaggacatagctttttgtttcatttatttaaaaggctgtgtcctcattttatatcatgatttgccattttctgtgtggagtttaaatgttgattttctttataaatactgtagcgacttttacaaacttaaccaaactcttttttgattttagaaaagtctgctttgactccatctccctagtttcttctctttcaccaatatttttctctaaaacccttttaacttcctaggcagtggccattcaccaccgagtagcagtctcacttctccaagccacgtgaacttgtctccaaatayagtcccagagttctcttactccagcagtgaagatgaattttatgatgctgatgaattccatcaaagtggctcatccccaaagcgcttaatagagtgagtagatgaacagaatatgtatttaaatgattctcctgatttttaaaaatctaatttgattttgagactagtgttaatgacagacttgcctcatcagttattatttgggaaaattaaaagggcaacctttttaatagaagtttttttattgatgtataatagttgtatggacaacttgtttttggttggcttattgagcaaagccagttctgtgagagttttgattttagtcctaagttaatccaagtggaataaatagcatcacctatagtaatgtgccagcgttattagttgaaccctggccgtttctacagtaccaacattaggagagggtccaatgagagtgaataagctatgaagcattatacaaataagaggtttctattacttttttctttttttaattagagtggaaatattcaacacctatcagccaggcactgtgctaggttgatatcaaggttacaaagatccaggccctgcccacagggaacttttgggggaataggcagacatttataatctaatgaaatacgtggtatggtatcttagtccctttaagctgccataacaaaatacagtaatctaggtagcttataaacaacagaaatttatttcctacagtgttatggagcaaaaggggcttgctgcccaatgtgctagaagccattactaagtcccaggtttttgaggaaagaaaagctttttattgcaagtctacttacagggaaatggaagtccacctcaaatctgtctctctgcactggctttaaggcactaattttatttaaaaacgtttagggaggccaagtgtggtggctcacgcctgtaatcccagcactttgggaggctgaggctggcagatcatgaggtcaggagttcgagaccagcctgaccaacatggtgaaaccatctctactaaaaataccaaaaaaaaaaaaaaattagccaggcatggtggtrcatgcctataaattccagctactcaggaggctgaggcaggagaatcacttgaacctgggaggcggaggttgcagtgagctgagatcacaccactgcactctagcctgggcaacagagcaagactctgtttccaaacaaacaacaacaacaaaaacagtttagggagccaggtgtggtggcttatgcccctaatctcagcaatctgggaggctgaggtgggaggatcagttgagcccaggagtttgagaccagcttgggcaacatggtaaaaccctgtctctaaaaaaatacaaaaattagctgagtgtggtggcacacgcctgtcgtcctagctactcgggaggctaagatgggagaatctcttgaacacaggaggtgtaggttgcagtgagccgagattgggctgctgyactccagcctgggtgacaagagtgagactctgtcttaaaaaaaaaaaaaaaagaagtagaattactgatttactttcattttacttgtgtttgttgtagatgtattaatagcttagtttttgttgggaattacttctaattctgctttctcaggggactgttactatactgttactatagctagggtttttgctttttaacacagtacaaatttggaaataattaaatgtaaatttgcaagccaattaccttcagccagtcctatgtggtctaggtgaatatatatagttaagacgtggaagggaggtttaaatctacaactaaagaaggccagtgtagcagaaagggcttagtttagcatattggtttctttttttcattttgaatgttaaaacataaactattgagaaaccattgttagcagtttgccaatagaaatttaattttggaaaaaaagtttttataataatggggttaaaagaaaataagcatttggaagaaaattcgaaaatgaaaggttattattaatttttsaagggttcagtcattattttatttaaaagagaattaaagaccgtctttttttttttttttttttttttttttgagacacagtctttgtcgcccaggctggagtgcagtggcgccatcttggctcactgcaagctccgcctcccgggttcacgccattttcctgcctcagcctcccgagtagctgggactacaggcgcccgccaccacgcctggctagttttttgtatttttagtagagacggggtttcaccgtgttagccaggatggtctcgatctcctgacctcatgatcagcccgcctcggcctcccaaagtgctgggattacaggcatgagccaccgcgcccagccttttttgagacggagttttgctcttgttgcccaggctggagtgcaatggtgcaatctcggcctcctgggttcaagcaattctcctgcctcagcctcctgaatagctgggattacaggtgcccaccaccatgcccagctaatttttgtacttttagtagaggaggggttttgccatgttggccaggctggtgtcgaactcctgacctcaggctgtccgcctgcctcggcctcccaaagtgctgggatcacaggcatgagccactgcacctggcctaaagacaatacattagctattgttctaaaaaagtgcaattgaatgtcacttgctagtaaatcactcatgtatccatcctttaaaagcatatgactgtattcagtaaaagcttgataatatgtggttagctcttggtaacatcactgatagacactctctggctccgttttgagggattctcccaaaatttctatgaaatcgaaacatttaaaacacctgttgtacctgtaataggcaggtctacaaagtcatgcacaggctcatgggcttcttctattcctgctgttaaggttccttctatgctctcccagtaccctgtcccataataaacacacagttcatgaacatctctttgaaagggtccagagttaagtttttatgtccaactaacccactctgtgttccttttctccctcaatttcactcttccttgtttgtatattctaatctagaagcccaaaccagtaaggactgcagatgttttatttgggcagcacagtgttctgttgacttgttttttgttttgttttaacaaggctttagattctttcaggwtgggtatgctgactccccagttccatatatatcttatgtcttggtcctatccacatattctctgcctggcatctgtagctatttgagcttgtgacacctgctggtcatcagctgctactgctgattttctaactctgaggtcaaatttctttttactattttttgtttttctctttctgaaggaagagaacttgaaagcttaagtcctttcactgttctttttctaaagacctatactaatgatagcttctgtgtaactatggcactgagcactgtagtttacacatttataaattagataaaagtacatgttggaaagaacttgtactttggagccagacgtgtttgaaatggctccactactcaccagctgtatgacttcagaccagtcattgaacctccgagcgtctgtgtattatgagcgtcattgtgttttccttagggttgtaatgtagatatagacataccgtgtatggtgcatacaaggtactcgataaattattattataattcatagctttaaattgtttttgcatactttatgattttatgcctaaattctagacaacttagcccattgcagataaaactttcctgtatacataggtgttgtttttaactgttttctttatatcatttgttctgaacaaggtaaattatgaaatggctgaaaatttatcccattttttttcaatttacagtcttactgagtatttcacttggctcagacatggtttctaatcatgggtaaggagaaaaaacacagcataaataggacctttgaaattacatctaaaataagattcatatgttataggatttggggtttttaggtcaattgatttaaaagattgactctattttgagatacatcacagaggcacaaagcattttaaaggtaactttcatgcttttttttgagacagagggtctcactctatcactcaggctagagtgcagtggcacgaacacagctcactatagcctcaacctcatgggctcaagtgatcctcccacctcagccgccccagtagctggaaccacaggcacacaccaccatgcccagctaattttttttttttttttgagacagaatctcactctgtcgcccaaactggagctggagtgcagaggtgcgatgtcggcttattgcaacctccacctcccaggttcaaacgattctcatgtctcagtctccaaagtagctgggactacaggcgcatgccaccacgctcggctaactttttgtatttttagtagagatggggcttcaccatgttaaccaggctggtcttgaactcctcacctcaagtgatctgcccaccttggctttacaaagtgctgggattacaagcctgagccaccatgcccagcctaattttttattttttgtagagatggggtctcaccatgttacccaggctagactcaaactcctgggctcaagtgatcctcttgccttggcctcccaaagtgttggaattacaggcgtgagccatcatgcctggccccagttctgtcatttaatgatcatttgatttctcttacctgtatcttttagacatattttccattgcctctcaaaactggtgaggtggacattagttataataccttgtgatatatactactaaataatcaaagaagtaatacttagttactcaagaaattttgaaaaataggtaagtaaccagggcaaactagaataacataatatattctaattttagaatatcctaatattctagtgttctaatacaggcagagcccagaggatttttacagcagtgaaactattctgtatgatacaatggtggatacatgttgtcatatatttatcaaaaccgatagaacaggcaactccaagagtgaaccctaatataaactgtagactttgagtgataatgatgtgtcaatgtaggctcattggttgtaagaaatatacctctctggtatgggatgttgatcatgagggaggtttgcaggtgtggagacagggaatgtatgcatgctgtctatattttctgttcagttttgccatgaacctaaaactgctctaaaaataaagtttattaatttaaaaaaattaaaagaagttaagtaacaagggcaaattatgattagattagaatacatgttttcgcacgtgtagagttgtaataagactcatgtgtactgttttataaatatctaaagcgtgagaaatttgatttcaatttttacatttaataagtaaattgtgtgccttttttatttttcctttatttatatacaaataccaactgggtgtggtggctcacacctgtaaacccagtgacttgggtggctgaggtgggaggatcacttgaggccaggagttcgagtccatcctgggcaacataaggagaccttgtctcttaagaaaaatataaatatacgtgcgtgtgcgcgcacacacacacacttccatsggtaaattatgatcacaggtatgataatctattaataatagaataatctttctttagacctgttaactggctcataaaagccagttagcatgaatttacttgcataaataagatgtttttttattttataatttcaagtacagttttttaatgattaggaagagtgttaataccaatgtgggcttttattaaaggatctcaaacataaagacaagacatgtttctgagacttgccgtttctggaattgttgccaagaattgtgacatatttagatttatacccagtaacaaaatcataaaaggaactctagttttaaacttaaatgcagaggcaaagatctcactaatttttgatgacttctaggtcttgactatcarcatggctttgttgagcacatcctgtgcataaaggataagacaagagaccttgtcatcaagagaattctaaagcatatatatgcrtgcatgtaaccagctaactgtacgagtctagcttactatgattctaaattgctttctttagcttaaataaggtaattaatgtttttatagttcttctggatctgcctcagtcctgacacacagcagctcgggaaatagtctaaaacgcccagataccacagaatcacttaattcttccttgtccaatggaacaagtgatgctggtaagtgacctttgataatttaacttttttttctttaaaaatatttgtggccagatgtggtggctcatgccgtaatcccagcactttgggagaccgaggtgggcagatcacttgaggtccggagttcaagaccagcctgaccaacrtggtgaaaccccatctctactaaaaaaatacaaaaaattagctgggcatggtggtgcgtgcctgtaatcccagctgccmaggaggctgattcaggagaattgcttgaacctggaagatggaggtttacagtgagccaagatcgtgccattgcactccagcctgggcgaaagaatgagactccatctyaaacaaacaaacaaacaaaattgtaattctagtatcaggacagattggcccaatttagcaccattctaataagatctgctttattttagacctgtttgattcacatgatgacagagatgatgatgcggaggcagggtctgtggaggagcacaagagcgttatcatgcatctcttgtcgcaggttagacttggaatggatcttactaaggtaagaccaaatttgctgtaagtctgtgtgggtatgtatggattctcagtgattgcgtggtgagtgtgcctgcaaatgtagtaaaatgacataatttctttttatacctgtgtcttcttgtgatttaatatagatgtagataagtaaacaaaattttataaatgatgaaataagtcaagctaggataatttcatagagaacagtgtgtatgagttgtatggattaagatttggtagagttctaatcttagggtcagaggatctgtgttttcgtcctacctctaatattagcaaaccacgcacggtcttcagtgagtttcttctgtttcttcctctgtggacttcagggttctctatgcaaattggacacatagtaacctgtttcagagggttattgtaaggattggaagaggtagtaaatgtaaaattgtgacatatttgtgacctctgtctcccaggttcaagcgattctcctgcctcagcctccttggtagctgggactacaggcacgcaaaatgacacatattgagtcatgcaaaattaccatagtctggatttgaatttgaatttaaacttggagctctcaacagaatgcatgcttgaattaggagactggtgtatgggtgcctttgtatattcctgccactgtgctagaaaaccccctcctttcacttaattctcaccacagtaccacagagtaggtgttattaacttcatttcatcaggaaactaaaactcagaagttaagtaatgtggctgagtcgtgttaagtcatattaagtggcagactgagattctaatctgctccatgattttaaaacctgtaatctttccactactgcctttgtcttgaaggcttgaactgtattaactttcatattgattattgttctgccgagctttggggagttgattaaatttagagttctcacttttgttagggcaaaatcaattccagtgttatagtctttgtcagtagtgaactcctttttgttttggatttagagggccattaagaaaaagactaattcataataccttcaagtaagtgtctgtaataaaaccttttacccctaatctaagtgagaacagagacacaaggacaacttttatttgtggagcccaacacacttactaggaatgttctaggtaggagaacatttgcaggagtttgtccccggaattgcttcagtaatcattagattgtacagctgctggcgtygttgttgttgttgttgttgttgttgttgttgttaggaaggacgttgttttccaggagtggctcattaggcttcctgttgaatctcattggccagtatcaggcatatgctcgtgcctaaacctgccactggcaagggggaggctaaatgattggtttaaatgaatccacattcaccccttgagacgtggaagagaaggccatggcagcccacagctgaacctgaactgaatcagagttcttgggggtgaagcatggatggggagaggcaaccagatgtatttgccacaatcaagtttgtaattcttgcctcacataattttctctgccaaataaaccatatttgagtccatagctgctaaaagcttgttatattataaatgatattatcataattattttttactgaatgtgtttaaaataagtcatttttgaaatttttattggcacaaatggctgtgattgccaacagattctgaaatcttggttccttttatgcattccaaagtattgttacaataatgccttaaatttgtgtcttttataagaatgttttctcacttcagatactttccaaaaagagtttgttttccaaatactttgtagtttttaaaaatactacacagtcacatcccatttaacctcactcagtctttaaaataaaagaaccctaacatataagcagggcatgtaattatcttccttttcaggtacttagagaaattgagttaatttttcagggcctcctcacagctaagaagaggctaaacaagctcttgaacccaggttgaagacagctaaacccagctctcttcatcactgttacagcagtttgacttaatagcatgtatcagtatagcactacaaacattgaagaaaatctgttaaataagagttctcagaaaaatcctaagtagaagaaaaaaatatttattttttttaaattacgtgtgaaattaaactttttaaaaatgttttttggctgttcagttcctttgtccatttatctactggagtagtgatcttcatcttgagttgtaagagctgtttatacattaaaggtatttatccatgttttcttcttcagcatttttactcggtggtttataattctgcgttatctaaagtggtaagaagttgtaccaaggcagtatataagcttccctgctaatctaaccctatttggattatgaatttacatgttctgtggaagaaaaatgtttacctaaaatttaaatgctgagagtctgataatagagattctaagtgttacagtcttagtgtccctttccaagcttgtgttcatcagcccactttatattttcattatatgtccagccacactggttcactgattaatccctgtcacacccctcttcctatcctttccttgtctttttttttttctcccgtctccatgtcttgttcttttatcacagccttactcttctttaaggcttttctctagtgccacctcaataaattgtttcccagctctgccctcattctgttcccccaaacagagcatgatctttccttgaactgaacttccagggtgcttagagcattcttgtatgatgtttgtcacattccacctacaatttaaatgctcttgttattctctcatacttacctttgtctccaccatagcttgcttgcatttatttatttatttatttatttagagatggggtcttgctctgtcacccaggctggagtatagtggtgcaatcttggctcacggcaacctctgcctcctgggttcaagtgattctcctgcctcagcctctcgagtagctgggactacgggtgtgcgccaccacactcaggtaatttttgtatttttagtagagacggggtttcactgtgttggccaggctggtctcgaactcctgacctcgggtgatccacccacctcagcctcccaaagtgctgggattataggcacaagccagtatgcccagcctccaccacagcttttaacayaggaccttgaatatagtggatatgtagttattactaaatgttaagaaatttttgcttactctggggtgttctacttcgtaatgaataattgataatctgatactcatttcaaaaactcttctcccattcccattctctaatgaaattcttctctttttttcattggttaatcatctttctcatgtcttcccgtattccagtttgttggttcccagtctgtattcttttcttctttttgtttattcctttaattgctcatttaaaagtttcttactgtgtaaatagtagtgagagcgcgagtgtgaataaaacttaattcttggattgtaggtgctcatcatgtatttcctatacacttgtctaatgatgatagagcaacagcagtagaaagtgcacacacgccccaaactcagatccagtttgaattccacattaataatgggacaattaatagtgggacgctgagcttcatatttcttcactgtaataatttcttcatcatagggctattgtaatataatatgtatgtaatatacaaataataaaataatgtatatgtaatgtccagcagataggaggcatcaaaggattcctctgagtgagtttgttgagtagtttgttgttgttactatacttagggagaaaaaggaagtttcacagaggaagtgacatttgaacattcaaaagtctttctctgtttttgatctgctaggcaggttaatggtcatttctgaatctgacaggttgagaattagtttttggagcatgcctgggcaatatgtggtggatgttaccatgatttgaatgaggtggtgttttgttttgttttcttttttttttttttagtctgtttatctgaagagaaatttgatcttcaagggtcaaatgtgtatgtttttcaggtagttcttccaacgtttattcttgaaagaagatctcttttagaaatgtatgcagacttttttgcacatccggacctgtttgtgaggtatttgactgaacatggtagtttccaacgtttacagatgttactcagcagctttctgccttttattttgcaggayagatggattccttgtcacctttcaaacatttctgggtattctgtggtattgaataatgtgtttacactggttgcctgtttgcttaaagttatatggtggcgatgttaggcaaccaagtttaacactttaaaaaattctcaagagcccgttaataggtagccaatattcacaaggccaatggtataagtttatttaatccaggcactggcaatcactgtcaaattatttgtactatatcctaatgaagcttaattttctgagttcagcaaacctttccaaagcacctgttgtttgctaggcactttcttacaagttggagaaaggaaaagtcatgtctgcccttgagcttacaatatagtatccaaattatagatgatttataaattttaaatataaagcttgcaatattatatatgtgtatatgtatgagatagaagtaatgtaaaggtgaaattgatttacaaggaggtgagttcacattgcctttcgctggtagcaggaaatttttttgtaatggggaatgttgttagttcgtcttctctgcattccttagtctcagactgtggtttactgaagctagatacatatcactgaagtttcttgctgggtggatacattggctgacattgataaatatatattttttttttcttgatgaagatttaaaagaataaccaattccccaaaggcagaaatttaaataaatatggcagtgtttaaattaacagataatttaagaagtaaaatttaagcatttattagtaacgtgtaagcaaaaatggaacgtaccagttgttcattgggtatagatttgagatttaagggtagtttttatgtgtgagaatttaaactttgaggcccccagaactatttacaggccagttgcagtggctcatgcctgtaatcccagcactttgggaggccaaagtagaaggattgcttgaagccaggagtttgagaccagccagggcaacacagcacaaccctgtccctacaaaaaaaaatttttaataataagccaggcttggtggtgtgcacctgtagttccagctacttgggaggctaaggcaggagggtcatgcagtcccagcaatttgaggctgggactgtgagctataatcacaccactgcagcttgggtgacagagcaagaccctgtcttaaaaaaaataaaagtacagttcaaaagccagtagataagattaaacggaatcatacaaatactccattaattctaagaaaggagaaaaggagaaataatggcatgaacaaggaacaaagggggcaygtagaaaacctattaaaatggtagagttaatcccaactatatcaacagttaccactccatttaatgtcagactggattaaaaaagcaggatttatctatatgatattttcaagagagaaactttaaagacactggttaaaagtaaaaggatggaaaatgagatactatgcaaaacactaaacatagcaaaaactggtgtatctgtataagtatcaaaggagacttttaagacaagaaatattattagagacaaataggaatattttgtaatgataaaagcatctatttatcaagaataaataatactcctaaatatgtatgtacctaataacacagcttcaaaatacatgcagcaacaaaaattgactaaaaagagaaatagccaagtccacaaattcatccgtcagggtctcatgaagcaagtagcctctgccttcaccacctccccgcccccccaaaaaatcaggaaggctatagaagatttaaacagcatatcaaatcaacttgacccagttggcctttctaaacactacccaacaattgtataacacagagtcttttccaggtgcatgtgaaatgtttatcaagatagaacatatatagggaagtcttaataaatttaaaataattggaatcatacagggtgtatattctacacccatgaattaaattagtaattgataacatacagaaaatctccaattatttggcaattaagcaatgcacttacatggacttaatctatgatactagaaaccagaagcagtgtttgcctcagagtaagtaagatgtggcgattgtttggaaagggagatatggaaactttctggattaatggaaatattctgttttttgattaagtgacgattaattaaatagatatatacgtttgtcaaatcctcaagcaaaacactaagacccaggcacatagaccaatggaacagaatagagaacccagaaataaagccaaatacagccaactgatctttgacaaagcaaacaaaaacataaagtgggaaaaggacacccttctcaacaaatggtgctgggataactagcaagccacatgtagaagaatgaaattggatccacatcactcaccttatacaaaaatcaactcaacatatatcagagacttaaatctaagacctaaaatcataaaaattctagaagataacattggaaaaacttctggacattggcctaggcaaagactttatgaccaataatccaaaagtgaatgcaacaaagataaatagatggaacttagtcaaattaaaaagtttctgcacagcaaaagaaataacagagtaaacagacaacccagagagtaggagaaaatattcgcaaactatgcatctggcaaaggactaatatccagaatctacaaggaactcaaacagatcaggaagaaaaaaaaacaaaaacaaaaacaaataatcccatcaaaaagtgggctaaggacatgaatagacaattatcaaaagaagataatgataataaaataaatggttggccgggcgcggtggctcacacctgtaatcccagcattttgggaggccaaggcaggtggatcacgaggtcaggagagtgagaccatcctggctaacacagtgaaaccccgtctctactaaaaatacaaaaaaattagctgggcgtggtggcaggtgcctgtagtcccagctactggggaggctgaggcaggagaatggcgtgaacccggcaggtggagcttgcagtgagccaagatcgcgccactgcactccagcctggacaacagagcgagactccatctcaaaaagaaaaaaaaaaaaaaggccaacaaacatgaaaaaatgctcaacatcactaattatcagggaaatgcaaatcaaaaccacaatgcaataataccaccttactcctgcaagaatggccatattaaaaaaaaaaaaaatagatgttgatgtggatatggtggaaagggaacacttttacactgctggtgggaatgtaaactagtacaaccactatggaaaacagaatagagatgccgtaaagaactgaaagtagatccaccatttgattcagcagtcccactcctgggtatttactcagaggaaaagaagtcattatatgaaaaagacacatgcacacacatgtttatagcagcacaatttgcaattgcaaaaatggaactagcccaaatgcccatcaatcaacaagcaaataaagaaaacgtggcatatatatactgtggaatgctactcagccataaaaaggaacgaaataatggcattcacagcaatctagatggagttggaaaccattatgctaaatgaagagactcaggaatgaaaaaccaagctggtggcaagcacctgtaatcccagctactcgggaggctgaggcagagaattgcttgaacctgggaggtgaggttacagtgagccgagatcacgccactgcactccagcctgggtgacagagcgagactccgtctcaaaaagaaagaatgatacagtggactttggggcttcaaggggaagggtgggaggggtgtgaaggataaaagactacacattggatatagtgtacactgcttgggtgatgggtgcaccaaaatctcagaaatcaccactgaagaagttatccatgtaaccaaacacaccacctgttccccaaaaacctgttgaaattaaaaaaaaaagaaaaaaccactaagaccaatgcatttaattatatatattatactcaattttaaaatgaaactgtaagctaactcctggtcctaggtcctcagtcctctcagcctgacttaggtggaccatgctgggggttgttgcatcatcttgtcttgtaccagaaagcaggacattaaattttgtctttctcccttgcagcattagtgaccagaaggatcccaaggatcgaatggttcaggttgtgaaatggtacctctcagcctttcatgcgggaaggaaaggatcagttgccaaaaagccatacaatcccattttgggcgagatttttcagtgtcattggacattaccaaatgatactgaagagaacacagtgagttctgcattgacatttttaaattatcttaattgtatactgattcaakattttatttaggggcaaataataatgatgaaagcaatgatcaaaagatggtcaccacccatagaagaaattgttgttagagcagcatagtttgaatgtagtgagaaggaggaaaaagagtaggatgagatgaggatggggatgtagaaatcagatcttgcaaggtcttgtagaccataatataattttatggcttttcaggatctcatttttgttttgagaagatcaatagaatgattttgtgaaaaataaattgagaaggggcaaatatagaagcatgaagaccattgtggaggttttgacattattccaagagagacatggtgattcaagctttattttggaggtagaactgattgatggattgggggaggtaagggaaaggagacatcagagatgaatccttgcatgtggatgtaagcagtggcagtgtcatttactgataaggaaaagattggatttggggagggaaaaatcaaaagctaatataaaatataaagttttagaggtctgtgaagctgtcaagtagggagatggaatttaagagtgtggagtttagggagaggtctgagatggggatggggctttcaaagagtatagtgtatttagatgacattttaaagctctaggattggataaaattatttaggaagacagcatagctacagaagagtaggtaacccagaactggctctgaggctccaacaaatttagtggttgaagaaaatgaccagcagggaagactcaaatgcatgtaaaaaggctttaagaagtaaaaaaaacaaaaccatagcccacagcacctgacacataataatctgtcagtaaacatgattctccatatatttccctctccaagtgatgcaytacgtatagtccatactgaagacagacaagtatgtgtctgttcttattcatttggcagacattgataagtgcctactcttgtcagccctgartgaggcacacaatccttgcctttaagaatgtcttagtctagtcagggagactgacacaaagcaattaaaatattgtagttaagttctacaatagaaatatatatatagggtgctyggtgtgtgtagagcgagcagagaccccaattaccagattctctgaaatgtcatttgtgttttctcatcaaaagaaaattatgttatatttgcttgcaggaactagtttcagaaggaccagttccctgggtttccaaaaacagtgtaacatttgtggctgagcaggtttcccatcatccacccagtaagttacagagctcctctgcaacctgtgctctcaaaactattctgtctaaagagggtcattaaaagcgccatagctgagggtactgtcagttgtgtgactagctgtgtgtttcttattccctgaagtggaaactcaagttgatttgttcctcatatcttttccttttgtaagctccagactcttagcttcacaaattaagtgcgtataaaaagaagggatttaggaaaccaacttttaatgcttccagagtcatcttatatatagtaatttgtgctgtagagacctcagcaactgtgagacagtttatataagtgatacgtagtttstacacagtatattcctggcatactgcagataccaaaaccgaggatgctgaagtctcttacataaaatggtgtcttttatattcatataacctatgcacaccctcctgtatacttgagtcatctctagattacttataatacctaatacaatgtaaatgctatgtaaatagttgtttcactatttatttgtattatttttattttgtatttttaaattttttcttttgagacagggtcttgctctgtcccccagggtggaatgcagtggcacaatcatagctcactgcagcctcctgggctcacatgatcctcccacctcagcctcccagttagctgggactatggacatgtgccaccacacccaactaattttcttatttttttttttttttttttagagtcagtgtatcactatgttgcccaggctggtctcaaattcctggccccaagtgatcctcccgtcttggcctcccaaagtactgggattgcaggcgttagccactgagcccagcctctgtatattttagatccacagttggctgaatctgtgggtacaaaacccatggatatggagggtcaactgtacataccctcaacatctggtttgtttagtgcagtattaaaactggaaacactggctgggcctaggttggggctggagcctgggtgtacttgcagaccagaacagatagcccttttggttttaagcttcctgggttggccacagcatcatttcagggatgatcctgcccacgtggctctgaatgaatgcttgcattggggaaragggtataaaaggcaggtaggtacctcctggcgtaattggaggctgtttgaagggtaaaggatttccccatgaagccaattatttccccaggttatgtgattttggagaggtggctgtaggtatatataatctactaattgaaaatttctattcagtttcagccttttatgctgagtgttttaacaagaagatacaattcaatgctcatatytggaccaaatcaaaattccttgggatgtcaattggggtgcacaacatagggcagggtaagtgtgttggcattgggtggactacaatgttataggagaattttatgaaaatggctagactrgatgtcattgttagcaactaagcattggtattgggggtgagagcaaagggtggggaactagataggttatccctaaattgaatggagtatcctggagtaaccatcagctcgacaagaaagccttgtggccacttggcactactcatcagagattctgtcccttctctccacaggctgtgtctcatgtctagactatgatgaacattacattctcacattccccaatggctatggaaggcaagtgtgtccatttcctctgatcagcagtagactctgctgttccttgagacatgccccttccccctcttcctsttaactgtcaaccttacctaaaaacttttgattttgcaggtctatcctcacagtgccctgggtggaattaggaggagaatgcaatattaattgttccaaaacaggctatagtgcaaatatcatcttccacactaaacccttctatgggggcaagaagcacagaattactgccgagattttgtaggtattttttctgccttagagctcttatgcttttctgaaataactgccttttgtcttgaactacagcttctggattaggagtgtgaaagaatggttctgtctttgtaagcgtgtttcacattttatgtgtcatgtcttttgctgaagtcccatatcagaagaagacctaaaacatatattcagagcagtcagaggtcattgataggtttccttcctaaaaacctgacttgcaatgttgaactaaaagaggccttcctaggttgcctagctaaaccagattatggatccctaatttattcttgccagattgaatgatgagctggtccttacagcagactttgtgacccctgcagcactgcctcctggtcctcacagctatccctttttctgtgcctttgctggggaaaaacagtaaccatcacattttgcacgcatctggcttgcttccacttgacactcttgggtcacgtgcagatgactgtgccagtcagtggaaagtctatagtgatggcaccatgactctctctgcctctggaacccttaactggsggggaaggggacagtgggaaagaaagtttcaggcgttgatagcagctctcctccctctgccctggtcatgtctcccttttctggcctctttcaatcctgtttatgccttgcccttcctaaccaggcctttgctgtgttgcttatcttctcacattccatagttgtgtgtccaagtagaggtctgttacggcttttgcagaatggatccttgctcagggaaagtattcacaccatctggcacagaggtccctttcaacctgaggatgaaagcctgcattatattcttaagcaaagccttccctgacccccagtgcccatgtaagctcaccacagcacttaccacctagaatttcaatggtggttacgtctctctccactacgctgtgaacagcttgaggatagggaatttgccaactctgttatggtccttgcacccagaataggacgttcttgcccaaacccaccattcttgggatctcaagttcataagcgtcctgttgaaggccctcattcttatagttagccctggggagtccagttctgttaagatgctttcatcaaaaacttcacagttgctcttctgtgctctactctgtagttgggccacactgagcagattctttggtagaattttcaacttgagactaacacaagtatttccttttctgttcagttctccaaatgacaagaagtctttttgctcaattgaaggggaatggaatggtgtgatgtatgcaaaatatgcaacaggggtaagatcctctattttgccacttgttttaggctacattagattgtactctatccctttttctggcttccttcattagtacttccttcataatgcayttccttctacagtatattagagctggaactttaggacagctccagtgtatgtcatctcttcagggcaagctttttctttccttcccccaccttctcccagcagtataggtaattataatcatttttacttttctctctgctctcaaaacacttgagaataatatatgtaaaacaatgcctggcacatagtaagaacccagtaaatgttaggtatgtggcgtatgtttataaaatgaagcactaaactgtgtgtttccatacacacacagttgaagattttgtataataaaatttactgactgcctggcaccagagataccaaaatgagttaagatagacctttccttcaargaacttgcactctgtactactgcccactcagtgttcttaaacagaggaaagatgttatgaaattaacaggaggagccagttaactgcattttggacctagagaatttgaagtgtcaaaagcactacaatgcatctaacattaggttaggggtttatgggtctagttcccatccacctctattgttttctaggaaaatacagtctttgtagataccaagaagttgcctataatcaagaagaaagtgaggaagttggaagatcagaacgagtatgaatcccgcaggtaagccgacattgttaagtggaactattgctgcagtgcttaaactttgcctaggcgtaggcacagggctgggtttgagagacagtagggcagagcataatagtatagaccaagtttgaattcctgggttcgtatgtcagaactaccacttactacctttgtgaccatggatggctcagtcagctaacttctctttaccttctttcctgaaatgagaataaaggccttgagaggaagccacatcttaactaactttaaagcctctgtaatttacttcttgacccttattctctccattcatactattttctccatcatattgttaaatccaagggagtttttctgaaatggaacttctcagttcctctaacacttacaggtatatattaagggacactcaagccctacagaggtaaactgattgacccagagttgcacagtaagttagacatagagccagaagtagaatcccaggtctcagcttccactattctttttcttctgttgaccttatcatactatcaggcagcccttatttccttctttgacaactagcagtggagtcttctgagcccatatgtctgttccttactccagtgccctggtgccagcgtaaggagatttagtctgtgacctacagcacttaaagccatttgacttgtattatactatattcaggatggctgcaggctttcattctcaacattggcagctcctcttacctctttgttttagcctttggaaggatgtcactttcaacttaaaaatcagagacattgatgcagcaactgaagcaaagcacaggcttgaagaaagacaaagagcagaagcccgagaaaggaaggagaaggaaattcagtgggagacaagggtaagcttgcctgccccaccctcctaagtgctgttcctcctaatttatttcagtgaatgttgaagaagtgatgtgccaaacactgtttataaacaagatgatcgctggtccctacttgaaactcatttcagtctaatggcggggtggggagcagatatgaaatagtaagtatattacagaagtacaaagcaaatatgtaactaaattcttcctctttgtcttacagttatttcatgaagatggagaatgctgggtttatgatgaaccattactgaaacgtcttggtgctgccaagcattaggttggaagatgcaaagtttatacctgatgatcagggcagtaggcataattcagcaacaaacaatcttcctttgggagaaacctgttcattccaatcttctaattacagtggttcctatctcagggatactggactttctgacgcagatgaacaattaaggggaaaagcttcccttttccctctgtggcagttacgattttgacttcagtcctgagaaaaacttcaggttttgaaaatcagatgatgtcttctccttttccaaacaccacacgttgaaagcatttataaatccaagtctgaaactctgcgctctagtactgctgttaagatacacaacttgtttcttagttcatataatctcgggatacacacacacacacacatatatatacacacacatacrtatacacacacatacatatatataaatatacctgatgccagatttttttcataaatattctgcctactgtaaatatgggttcctctgagttgttttagaaaattagcgcaatgtattaaaatcaagtgttaggaaatttcatggtcttacctacaataacttttattttggaattgaactattattaaattgtatctaatcctggattacagtttaattaattattcttagtgcttaaggcttcataaagtaatttttccaaccttttttttaaaaatgtgcatcttttattatcttttatggttaaacttggaagccaattatttggcaaccttgaatacaagagctagcttttcaaagaaagacacttgaaataatggaggatccattcttttcctctgtcagattgtatgttctgtctttagcccctgccaggcaattccccagaatcttcacttaactcatattgcacatgtagggctgcctaccaacattttatccaaaaatgttttattgccttagagggtttgggaagagtgtgtatttatagatccccaccccacagtgaacaaaaatagatagatagatagaataaaatgaatgccacagcagcagatggctcattctgaagggaaatacagaactatatctatctatctatctatcatcttttttatttaaaaatacattaaaaaaacaggtattagtacctagcatttagttagttattcaatatactggttacgtaaggcctttcaagaagtagattctcagtctgagaggacacaggccagggcttctcaaagtgctgctgcaggctttctggtctcgcttggcccattctgctaattttcctttgccagctcctacagtaaccctgggtttattagtctcaacaaaggataaaaagtaaatcaaatgctatgatgccagtgcaaaacttcaatggaagccctaaggcagtagtataactaactccataaaatacaaacaaacacattttaaaatacacattgcttcaggccaacgtgactgcagtttatttatttgactattttatggtaggggagaaggttgagtgttgttgtgaaagccctgatatcagtaatggggatgatacaatctgccagcagaggagaggttggcaggtaggtcagctgcatcacttcacaagaagaatttgaatcctcactagaaggggtaccatcctcttccagttcatacttcccatatccaacaacctgaaagaggacaaagacaaaagtgaaaaatatgctgaccagatttaggggtttaagagttctgatgataaccacccaaactcactcagtaaatgacaaccctagaatggatggagttagttaaacatactcacatgaacgctgagcattttacttcctggccctctatgggccttgaaccagttgaccaggtctgattttgagaatgacttcagtgcttcaatcttacaagggaagggaagataggaaagaaattcaagaagaaagatagctcttaaacctaacccccaggcagatgtccctggacctgcttagcatctgaagacctcattttattcttcctattctcaggttacccctaaccttccagaccaaaacgatgatgaagctctctggcatgccttcacattttataccaatcatctacaatggcaagagaggttagcagatgctataattacagctaaataccatacactgagcccaacacccacatccccttagtgtcacctcccaattacatggtagctgcataccacggcttgaggaaatctaccttgcttctattaagaaaactaaaatgtgttaagatgaagcctcttactaaataacctctttacatcacagagcaatgatgtcctatggtaattcaccatgtaggggctatgtattaaccaaagtcacactggagtacaagatccagatctttttcataggttttactactttggaatagaagttgtcaaaacacatgcacttggaataatgaactccgtaaagacaaagagtcctcaattttctttaaacggcaaaactctttttctccacaaaatcttgtagacctcaatatatagcataaaaatagagctgctctgattgaaattggtggtggtgtggtaaggattagcacccagctcacgtggccacctaaggtgctagagaggccagtctgaaaactcaggaagtgagcgagtaatcaggccaggactagtgtttcgagtttctcttccacacaatgctggtgtgcacagacctgtgatgcctgtagaatcaggaaccttgaccagtttgagctgtcttactctgaaaaccatgttacctcgtgggcaaggcggtcaaagaggtactgctgtgtaaccacttcattccagttcctatccacctcctccccaaggtgggtatcctcacactccttcagcttgatgagagctgtgacctgttcccaccaaaaagaaagatgctcaggtgaggcaacataccacttcccacagaacacactgggccctgtccagcccggcttgtgatggacatgccagtataagaggcacggatgaagctagggagacactattgtaagaggaaggtggggctgcaaagctcaaaaactggccggcgaagccctgttaagatttgtatctgggggcttgtgtgggccaaaggccaaaagaccaggctggcacagtcacctgggtgttgaatgcctcttcagtgaggttctcaatcttctcctcaaagctagaaagaaactcttctatcttcttatcaacaacttcagaactgaaacaaaacatcttcaatcagaactaaaacaaaacatcttcaattaagtcatcagaaacccgatctcaggcagaaggcaaaagaaggaattaagactaagacatatatccaggaaaaaaagctaaagtgttttcccaggcctcagtattccacctgactttgaggacagaaagagaaagaaccctccccctcaccccacctccagcccagtttcctggtatcctcataatgaagcagtcacaaccatgtatgaccattccaaagctgaaaactaacaggtttcagcaatgcctgtcagatcaggcatcctttcccttcttgtcctcaggtctgcctgaagagaagaaacactggcaagccccacacaatgaccacaggacttgaatcaagtctgaaagggccactggaactattgatcagtcctggaacagaccatctataacaacccccatcttcccagcttccactgactaaatagagcaaacctgcttggtcagggttgcccaaggtttaaggaaacacatgtagcccctactctccatgtccataataggttacactcatctattcactcactcactcacttgtatttggttgcctgagtccccacagtgacagaaaatcctagaatcccggatgtgttcctacaggtagggtagacatggtacctacaagccagagagaaaagttatatgagctcaggtgatcatctgggccctggccttggaggcactagataggagtgggaaaagtttctgcccatccttattggaactggaagtcctgaaacaggacccaaaaatgttaaggtgtccatacctctcctgaattggggaccacaaactagccttttttcttatcttgaaacttgaccaaactgaaaacctgattacagtcaaagatacaaattccaaaagtttggatgactaaatatcaccctatgagatggaaggaagctctaacaggctgctcagtagggatatctgatgaacagcctgcaaagtaagccctaggcccttatttgagctcagtggccctgccagctgacttacccaagggtctgcttggttcgaaggaagtcaaaacaaggttcttccatgtgcatctgtaattcaacatactgcccatcagcccaactcctcccagcagagaaacctccatttctctccccagagtgtttcacatacctcccaagtccagcctcccttagtgcctttttcctaattggcccaggcttatactgggtgagaacagtaaatgaccatctcaccttcaaatcacagatctctgactaccccatgtccctaacccaggcagaaaaggccgggcctcatagtgggtcaggggctgctgaaaacctcagcatctcctttatgcacttaccacaagcagctccataagcgtatattctcttagactcctggtacctgactgaaaagagaaggttgtcaggccaactgaatatccagtggtttacagggcttttaaataatccagctattctaggcaaccacttaggtatcaccaccaatcgctctcccccaagagagttaatcatactttgatgttgtttacatatctgctttcccaccagactgaaggtctatgaggacaggagtcatgcttgaccatttgtactcccggcactagcatagaattgcaggtgcaaacaaaggtgagattaataatccctgacctgccagatcctgtcagaggacacattctaaaattaagtacttgcaactcaaagccctaaggaagacagcaggaaatgtttggggatcctgaaatgtatctggatctattcctcaagaggagagaaaatgaatagtgccacacaacaagaaccagtgccacataaaaggaccaaaaccagttgataagaaaaatacttcagagaaagaagccacgctttgggaccacatgctagctgcccaagactggcaaaataatgcattcagaatgaaaggacaggaggccaataaacaaggatgttgctagtgcctcccagagtcaggatcttgcaggttcctctcacacagactcatttgcttcccactcaccagaggaagaggctaatgcctatgtgcccttgcaagacctgattagtcagcattgagattttctgtttccctctaaacagaccacaacaaaaccaatgctctctgagaaaggatatggtttccaaaagggaacagtttgtattagaagctagtgctaagaggtgactgatggaaagcatttctataaacatagtcttacaatgtgaaatcctgccgaaaatgagtactcctgtaccggggttgtaagcagtcagaggcactgaaaatgtagactaggttaagaaaggctaggctgtaccatttgtggagtttgggacctggtagtcataacctagaagaggctgcaggttggaatgctacagccacagaggctccagagagaagcagggcctctacggaaggacaaaaatattatcaacctagctccaaaagtgctgttgctcctgaatcaaagtactcattaagaagactaggacaagacacaacttcactaacaagagatgaccgtgacatcgggcaagtgaatttgctcctgacagccagaccaggataatgtcagaataaggctgaggcccaggggcagagatacaagacaaagaaatgataatcagtccatcccacccaaagcccagtcagggatcttcacaagacctgacaaagaagtgaattcctgatgcagggaacccaagataacagcagcggctacaggagccccagaatttggggagtcagtaatcagactagacaggcaaggtttaaggaagatccccgtggttctagaagcgagtgggaccaaccacaggttaaagcaggctataggctagagctaactgtgattactgccacgtgcttccttcctttaagcaccacacaccccagtagaatggtgtggaaagaacacagaatctgaagacaaaaggaataatctgagacccagctggtacgacctcaagaagtaaggggctctggatcatggagttgtcaccctaaaacagaggtgataaatccttcctctcaggtgctttaaacatttatgactctagtagtcgttctctttgctgtgtcttaattgtttggctatgtttacttctgtcttcttttcaaaactgccccttaacaaatgtccttctgctacttgggagttctatcaggggcacatgtagggatttccacccacacctcggtttctggccctctagattagtacttaggtgattaatgaagcaatacctcactgtgattgaaaaaggatccattttaccaacaggagcaatttttaaatgtagttgcttcaagaggacaaatggccccaagcatgaaactacagaagtaactataaaagggccttgaaggtcacggggtccctgatccccaggcactgggccttccgccagtctttagtacacc

SEQ ID NO: 96563 - DNA, 12731 bp, Homo sapiens
ttaggcgctaacatttgatggagctgcatgaaaagtgtacggggattctatgtccttttaagtctgaaattttttcaaagagtttttttaattttttccaccgggcacagtggctcactcctgtaatcccaacactttgagaggacaaggcggacagatcacttgaggccaggagtttaagaccagcctcgtcaacatggcaaaaacccatctctactaaaaatgcaaaaattagccaggtgtggtggcacacacctgtagtcccagccacgctggaggctgaagcaagagaatcacttgaacccaggaggcgcaggttgcaatgagccaaagtcgcaccactgcacttcagcctgggtgaggaagggagaccctgtctcataaagaaaaaaaaaaatgatgttttacaaaaaggattatgaaagcaatgaaccaataccccttataaatatagacacaaaaattattaacaaaatactagcaagcaatattcagcaaaatataaaagaattatacatcatgatcaaggtggatttatcccaggaataaggttagtggtttaggctacaaaaatcaatcaatgtaatataccatattagtagaaaaatagaaaataaaaaccaggattttctcaaaagacatagaaaaagcagttgagctgggtgcagtggctcatgcctataatcccagcactttgggaggccaaagtcagtacacagcttgagcccaggagttcgagaccagcctgggcaaccacggcaagaccctgactctacaaaaaaattcaaaaattaaccagacatagtggcatttgcctaaagttccaactttactcgggcgttgaggctgyggtgagtcatgatcaagccactgcactccaacctaggtgacagaacaagaccctgtctcgagaaaaaaaagaaaagaaaaaagaaaacacagttgaaaaaatccaacatattttcatgataaaaacacttttaaaaaattagaaataaaaaggaattttctcagtctgattaggggtatctatggaaaaccacagctaatatcatgcttaatgaagaaaaactgagtgccatttctctaagaacaggaacaagataaggatgtctgcactcaccactttaatccacactgttcttgaggctttaggaaagcaactgtgcaagaaaaaagatttaaaaagaaatatgaaactatctttatttgcaagctatctatatttgtatatagaaaactctaaggaatcagattttaaaacttgtagaactaataaatgagctcaaaaacttgccaggatacaaggtcaatatacaaaaatcgattgtatttctatctacaagtaatgaacaatctgaaaatgaaacttaaaaatgatcccatttatattagcagcaaataaaatacctaggagaattttagccaaaaaaaaaatctcaggccttgtacactgagcactacaaatactgttgaaagaaactaaacaagaactacataaatagacatgtcatattcatgaatcagaaaacttaaattgttaagatagcaatactccccaaattaatctacaaattcaacaaaatatctatcaaaattccaactgttttttaattcaaaaattgacaagctgtcactaaaatttatatgggaatgcgagggatcaagaatagccaaaagaatatcgaaaaataaaaaagctggaagacacacttcctgatttccaaatctactattcggttgatgcaaaagtaattgcaggttttacaattgaaaataatggcaaaaaccgcaatcacttttgcacaatataaagctacagtaatcaagacagtgcaatactgacaaagaaacagaatataaatcaatggaataggattaggagtccatacataaactctcacatttattgtcaattgatttttgacaaggatataaaaacaattcagtgggaaaaaaagagtattttaaaaaatgatgttcagacaactggatatccacatgaaaaagaatgagtctggacatctctgcctcacaatatacacaaatattaattcaaaatggctaatagatctaagtgtaagaggtaaaattataaaacacctaaaggaaaacataggagtaaatctttgagacattggattaggcaatggctgatttcttagataaaacaccaaaagcacatgaaacaaaaaatatatagataaattaagcttcattaagatgtagaacttttgtgcatacaaaactgaaaagaggaactcctggccagtgacagtggcccatgcctgtaatcccaacactttgggaggctgaggcaggaagatcacttgagctcaggagtttgagaccagcctgggcaacatagtgagatcttgtctctatttttttttaataaaaaaatgtaaaaagagaagaaaagaagtcctagtcagagcaatcaggcaagataaagaaataaaaggcatccaggctgggcgcagtggctcacgcctgtaatcccagaactttgggaggccgaggcaggtggatcacctgaggtctggagtttgagaccagctggtcaacatggtgaaaccccacctctactaaaagtacaaaaattatccaggtgtggtggtgggtgcctgtaatcccagctacttgggaggctgaggcaggagaatctcttgaacctggtgggtagagattgcggtgagccgagatcatgccactgcattctagcctgggcaacaagagtgaaatcccatcaaagaaaaaaaaaaaagcatccaaataggaacagaggaagtcaaacaatatgatactatacctagaaaacctgatggtctctgcccacaggcttctagatcttataaccaacttcagtaaattttaagatataaaatcaatgtacaaaaatcagtagcatttctgtatgccaatcaataacatccaagctgagagctaaatcaagaatgcaatccctggccaggcatggtggctcatgcctgtattcccagcactttgggaggccgaggcgggtggatcacctgaggtcaggagctagagaccagcctggccaacatggcgaaaccccatctctgctaaaaatacaaacaaattagctgggtttggtggtctgcctgtaatcccagctgcttgggaggctgaggctagagaatcgcttgaacccaggagtcagaggttgcagtgagccaagactgcaccactgcactccagcctgggtgacagagggggactccatctcaaaaaacaaaaaaagaatgcaatcccattcacagtagccacaaaagaataaagcatctagcaatacagctaaccagagaggtgaaagatctctacaatggaaattacaaaacactgcttaaaaaaatcagagattacaccaacaaatggaaaaacattacatactcatgtataggagaatcaatgttgttaaaatggccatactgcccaaaactatttacggattcaatgctatttttatcaaactaccaatgacatgctcacagaattagggtaaaaaaaattctaacattcatttgcaaccaaaaaagagcctgaatagccaaagcaatcctaagaaaaaaaaataaagccagaggcatcacactacccaacttcaaattatactacaaggctacagtaactaaaacagtatgttacactggtacaaaaatagacacatagaccaatggaacagactagaaaacccagaaataaggccacacacctaaaactatctgatcttggataaagtcaacaaaagcaattgggaaacaactccctatttaataaatgctgctgggataattggctaagaatatgcagaagattgaaactggacccctacctttcaccatatacaaaaatcaactcaaaatggattgaagacttaaatgtgaaacctaaaactataaagatcctaggagaaaagggtatgcttatatactgctggtgggaatgtaaattagttcagccactgtggaaagcagtctggggatttttaaaataacttaaaatagaagtaccatttgacccagcaattccattattgggtatacacccaaaggaatataaattgttctaccataaagacaaatgcatgcatatgttcactgcattactcacaatagcaaagacatggaatccacctagatgcccatcaacagcagactagataaagaaaatgtggtatatatacaccatggaatactacgtagctataaaaatgagatcatggctttctcagcaacatagatggagatggaggctgtaatcttaagtgaataattgcaggaacaggaaccaaaataccatatattctcatttatgagtaggaggtaaacattgagtacacatgggcacaaagaagggaacaatagacaccagggcgtatttgagggtggagtgtgggaggaggcagaagactgaaaaaccaattatcgggtattatgctgattacttgggtgacaaaattatctgtacactaaacccccatgacacacaatttacccatgtaacagatctgcacatatacccccttggacttaaaataaaagttgggacagaaaaaaaattgaaaagacaacccacagaaccaaagaatatacttctaaatcatatatctgataaagcaatcatctagaatatagaaaaatgcaactcaacaataggaaaataaataacccaattttaaaaatgagcaaagggattaaataaacatttctccaaagaagatacataaatggccaataaacacatgaaaagatgctcaatatcattagtcattagataaatgcaaatcaaaaccacagtgggattacatttcaatctccctaggatgactatttacaaaaaaaagacagagagaaataataacaagtgtagagaatgtagaaaatgggaaccctcatacattgctgttgagattgtaaaacagcgaagccattttggaaaacaatttggcaatttttcaaaatgttaaacataaacaaaatgttaaaccatgtgaccagcaaatccactcctaagagaaatgaaaactcccaagagaaatgaaagcacttgtccacacagagacttatgcatgaacaatcacagaagcattattcataatagccaaaatgcagaaacaacctaagcacccatcagcaggtgaataggcaaacaaaatgtcatacatccatacggtggaatattatttggccataaaaagtgaagtattgttacattctacatggataaaccttgaaaacacattctaagaaaaagaagtcagacacaaaaatactacatatgatatggacttgtgtatgtaaaatgtccagaataggcaaatccatacagaccaaaagtaaattagtcctcgtcaggagctatggctaggtccagggctggaggcaaagggtttaaaggtaagggtgagaaatggaaaataggtttgtaaagggtataaggtttatctttagagtgttggagaaaccccatctctactaaaaatacaaaattagccaggcatggtggtacatgcctgtaatcccagctactcaggaggctgaggcaggagaatcgctttaaccaaggaggcagaggttgtagtgagccaagatcacgccattgcactccagcctgggcaacaagagcgaaactccatctcaaaaaaaaaaagttctaaaattaaattggaaatggtggcacaactctgtgaatatactaaattgaattgtacacttaaaatggatgaattttatgctatataaaacatacatcaataaagctgtgaaaagaaaaagaatagaagctatgccataaattgatcttttcatatgtaagttagaaacttatctgtaattaggagtttctccaaccattttcttgagatattttagtattaggtatgacttatgtacaaaaataggtaaggcagaatttcttctaaatgtttcatattttctattaggtataccttttgaattttcttgttaacatgacaacaccattctttttgttaagaactgcaggctttgcagacgccaccaccactgggagccccatactatcagccacggtcaacctcaccatgttctttgacatcgctgttgatggtgagcccttgggtcacgtctcctttggaatcttgtctgcaagattccaaagacagcagaaaacctttgtgcactggagagaaaggatttggttataagggttcctgctttcacagaattattccagggtttatgtgtcagtgtggcaagttcacacgccataatggcactggtggcaaatccatctgtggggagaaatttgatgacaagaacgtcatcctaaagcatacaggtcgtggcatcttgtccatggaaactggtggacccaacaccaatggttcccagtttttcatctgcactggcaagactgagtggctggatggcaagtacatggtcttcagcaaggtaaaagaaggcaagaatattgtggaagccatggagcgctttgggtccagaaatggcaagaccagcaagaagatcactattgcagactgtggacaactctaataagtttgatttgtgtttcatcttaaccaccagcccattctttctgtagctcaggcaaacacccctccaccccatttgctcaaagtatcctagaatctttgtgctctcgcttcagttccctttttgttccctgttttccttgttcccttccaggcctagctggattgcagagttaagtttatgattatgaaataaaaactaaataacaaaaaaatttaaaaataaaaaataaagagctgcaagcagctatgagtaacagagctgcctcacactattaaaaaaagaaaaagaaaaaaaagacaataaacatattaaaccaatggtggttcactcctgtaatcctagcactttgggaggccaaggcaggccgatcaccgagcccaggagttccagaccagcctgggcaacatggagaaaccccatctctacaaaaaatacaaaaaaaaaaataggcaggtgtattagtccatttgcatactgctatcaggaaatacccaagggtggataatttataaagaaaaagaggtttaatacacccacagttcgacatggctgggaaggcctcatgatcatggtggaaggcaaaggagtaggaaaggcacgtcttacatggcagcaggcaagagagtgtgtgcaggggaactgcctttcataaaactatcagatatcatgagacttattcagtatcataagaatagcatggaaaaacctgccctcatgattcagttacctccaaccaggtccctcccacaacatgtggggattatgggagctacaattcaaaatgagatttgggtggggacacagccaaaccacatcattctacccctggcccttcccatttcagcattaactcaaaagtccacaacccaaagtctcatctgagacaaggcaaatgtcttccacctatgagcctgaaaaatcaacagcaagttagttacttcctagataacaatgggggtacaaacattgggtaaatacaaccattccaagtgggagaaattggcaaaaacaaagaagctacaggccccacgcaagtctgaaatccagaggagcagtcaaatcttaaagctccaaaatgatctcctttgactccatgtttcacatccaggtcatactgatgcaagaggtaggtttctatggtcatgggcagctccacccctgtagctttgcagggcacagtccccctcctggctgctttcatgggctgccattgagtgtttgcagcttttccaggtgcacagtgcaagctgtgggtggatctatcattttggggtctggagaacagtcaccctcttctcacagctccactaggcagtgccccagtggggactctgtttgggggctcccaccccacatttcccttctgcactgtcctagcagaggtcctccaggttcgtactgcccctgcaaacaatttctgcctcgagatccaggcatttctatacatcctctgaaatctaggtggaggttcccaaacctcaattcttgtcttctgcccacccacaggaccagtaccatgtggaagctgtcaaggcttggggcttgcaccctccaaagccacagcctgagcagtaccttggccccttttagccacagctaaagcagctgggacacagggcaccaagtcctgaggctgcatgtagcagggggggccccagacccagcccaggaaacccttttttcctcctaggcctctgggcctgtaatgggagggactgccacaaagttctctgatatgtcctgcagacattttccccattgtcttggtgattagcaattggctcctcattacttatgaaaatttctgctaccagcttgaacttctccccagaaaatgggtttttcttttctactgcatcgtcaggctgcaaatttttcaaacttttatgttctgcttcctcttgaacactttgctgcttagacatttcttccaccagatacgccaaatcatctctctcaagttcaaagttccacagatctctagggcaagggcaaaatgacaccagtttctttgcatagcaagagtgacctttactccagttcccaacaagttcttcatcttcatctgagaccacttagcctggactttattattcatatcactatcagcattttggtaaaagccacccaacaagtctctaggaagttccatactttcccacatcttcctgtcttctgagtcctccaagcctctagaaagttccaaactttcccacattttcctatcttctactaagccctccaaattgctccaacctctgcctgttacccagttccaaagtcatttccacattgttgtgtatctttacagcagcatcccacttgaccagtacttggtcaatcagaaaattgaccacttgggtccattttcatactatgaaagaatacccaagactgggtaatttataaagaaaaagaggtttaatagacttacagttccacatggctggggagacctcacaatcatagtgttaggcaaaaaaagaagacaggcacatcttacacagaggcaggcaagagagcatgtgcaggggaactgccctttataaaatcatcagatctcatgagacttattgactatcatgagaacagcatgggtaaacccacccgcatgattcaattacctccaacagggtccctcccacgacacttgaggattgtgggaactacaattcaagatgaaatttgggtggggacacagccaaaccatatcactgagtgtggtggtatgcacctgtagtgccaactactcaggagactgaagcaggaggatcacctgagcctggggaggtcaaggccacagtgagccgtgattatgccactgcactccggcctgtgttacagagtgagaccctgtctcaaaacaaaaatcaaaaacagtagctgagaaaaatatatggcttttttttgcatataagacatgtccagatgtagacagtccagaatgtgaatggcagctctgtgacatcaatcattagaccatatttatttcatctttgtattctgccacttgagaaaaggctttcatcctcaagttacatcctaattcagtaggattactgaaactcctggaaatatttgttgaactttagattggaaaaaagggggaagggaggagaaatgcaaacagagtgtctccagccaaggtagcttgatttaaagagctcttggaaacatcttccacttatatttcattggccaagtctagttatcaatagctataaaatttggtgtcttagctgtacattttgcctcactgtttaaaatcagggctctattgcaatggaacaagaaatgaatggatttaataagcgaaccagcactctgccctgacatctgaaatccatccctcactgacatctaaacccataaactttggagaattaattctttaaaagtcagataatgagaaagatgccatagtcttgaagaaaataaaataggttacttcaggacaagaatctcttctttccaaggtattcaaatcatttatcaaaaagtctcaatatgaattatgtccagctttactactgaatttattttctttcttttctacatgatagaagtctccagattggccatttattcattcagccgtttagccaataatttggcttttgatttttttttaatttggattgaggggtacatgtgcaaatttgttacacggatatattgcataatgatgaggtttgggcttccagtatacccctcacccaaatagtacacattgtaataagtacaatcttttaaccctcgcccccactctcaacctctcccatttttggagtccccagtatctattatttccatctttgtttccttgtgtgcccactgtttagctctcacttaaaagtgagaacatgcggtgtttgatcttctgtttccatattaattcacttaggataatggcctctagctccatccatgttgctgcaaagaccatgatttcattcttttttacaaccatatggtatttcatggtgtatgtatatatatatatatatatatatattacatttccttatccaatcatatgttgatagatcttaggttgattccatgactttgctgttgtgaatagcaccacagtaaacataaaagtgcaggtgtttttttatataataacttctttttttgggtagatatccagaggcactgctaggtcaaatggcagttctatatttagttctttgagaaattgccatcctgtttttcacagatgttgtactaatttacattctcattaacagtgtataaggtttcactgttttctgcatccatgccaacatctgttgtttttcactttttaataatagccattctgactgatgtgagatgatatctcattgtggttctaatttacatttctctgatgattaatgtcgagtattttttcatatgtctgttggacatttgtatgtcttcttttgagaaatgtctattctcatcctttgctctttcttaaggggattattggttttgttgttttttgttcttgttgctaactgagttccttgtagactctgcatattagtcctttgtcagaggcataatttgcaaatattttccccaattctgcaggttgtctgtttactctattggttatttattttgctgtgcagaagctttttaaattccgtttctctttctgtttttgttgcatttgttttgggaatctttgtcataaattctttgcacaggccaatgtctaggaatttttcctaggttttcttctagaatttttatagtttcagatcttatatttagatctttaatccatcttgaattaatttttgtatatggtgagagataggggtccagttttattcttctgccaatcttcccagcaccatttattgaatagggtgtccttttgtaactgtttatttttgttgacattgtgaaaaatcagctggttgtagatacgtggctttatttccaggttctctgttctgtttcattgatctatgtgtctatttttgaatagtaccatgctgttttagtaactacggccttgtagtataatctgaagtcaggtaacgtgatgtctctggctttattctttttgcttagtactgcttttgctattctggcccttttttggtttcatataaactttagaataattttctctaattctatgaagaatgatgttagtaactttatttttttttaattatactttaagttttagggtacatgtgcacaatgtgcaggtttgttacatatgtatacatgtgccacgttggtgtactgcacccattaactcatcatttaacattaggtatatctcctaatgctatccctccccctccccccaccccacaacaggccccagtgtgtgatgttccccttcctgtgtccatgtgttctcattgttcaatttccacctatgagtaagaacgtggtgtttggttttttgtcctcgtgatagtttgctgagaatgatggtttccagcttcatccatgtccctacaaaggacatgaactcatcatttttcatggctgcatagtattccatggtgtatatgtgccacgttttcttaatccagtctatcattgttggacatttgggttggttccaagtcttttctattatgaatagtgctgcaataaacatacatgtgcatgtgtctttatagcagcatcatttacaatcctttgggtatatacccagtaatgggatgggtgggtcaaatggtatttccagttctagtccctgaggaatcgccacactgacttccacaatggttgaactagtttacagtcccaccaacagtgtaaaagtgttcctatttctccacatcctctccagcacctgttgtttcctgactttttaatgattgccattctaactggtgtgagatggtatctcattgtggtgttgatttgcatttctctgatggccagtgatgatgagcattttttcatgtgttttttggctgcataaatgtcttcttttgagaagtgtctgttcatatcctttgcccactttttcatggggttatttgtttttttcttgtaaatttgtttgagttcattgtagattctggatattagccctttgtcagatgagtaggttgtgaaaattttctcccattctgtaggttgcctgttcactctgatggtggtttcttttgctgtgcaaaagctctttagtttaattag

SEQ ID NO: 96564 - DNA, 13068 bp, Homo sapiens
  misc_feature (1)...(13068): n = A,T,C or G
ccccaccctcaggtgctgtggcctatgggcagcatcgcacccagatgggccacgctcgtccacacacatgcctgtcagtaactgagtgctctgagctggccatgaacctgaggcaatcgagagtcaccaaagccagtgtgtcggtgacactctggtggcccggccgcttgagattccaggggagaggcactgtgccagtaagagtttgcatggactcactgccctccaggaactgtccatggacagggaatcttccccaccctcttcccacccctccagccctggccagcactttgggctgtggatctgcactcacggtgggaagtagagggtcagagtgtgctctgaagaagagaaatgggtacagaaacccctgagagtcctggtctgggcctggggtgcccacccagtcggccagacccagtggggggcttggaacatgttacgaaggtggcacaaagcaggcttctgaggcacagcacctgcctctaaaggctgagtcccaaccgcagcagtcgctgaatggtgactttttctgtctattcactggagcgaggggttgttcttattaccactgttgggggtggggagcaaatgtggaaagctttgtgccttccagccagaggtaccccagcactctgtttagccagactgttagtaaatgtacagtaatggcttatagaataaagaaagagaagttcgggaacacatcgttctcatccactaaaaataactttgaatgcttattttttttagtaatactcttttagctatagatttgcttcataggctcttgaatccttgactctctccggctaagctctgagactaacttttaaaatgttgttttaaggaaggctaatgtttttacagggcttgccaaaatagatagggatgactttttaaaataacagttccaggaaatatgtaatgactttttttaaacaaaggattcagaatctggattgtggaaaatgctgtattgatgcttcctacaacatttttgggaatcttttaaaatgaaagtaatgatttaattaacaaaaatatgtggcttaagggactgtttgtggggcactttggattgtttaaagctaatttttcggctgagcgcagtggctcacgtctgtaatcccagcactttgggaggccgaggcgggcggatcacctgaggtcaggatttcgagaccagcctgaccaatatggtgaaaccctgtctctactaaaaataccaatattagctgggcgtggtgaggggctcctgtagtcccagctactcgggaggctgagactcagaggtggatgttgcagggagccgagatcgtgccactgcactccagcctgggcgacagagagactccgtctcaaaaaataaaataaaataaaataaacctgatttttcatcttttacaagcgggaaggaaattttccatacattatgagagtgaacagtgattgtttctttattatatggatttttaaactcgctcaaattttaagtatttacccatcctgggtttttagactctagcatccgctttcaaatgaaaactttatgcaagcagttttgcctttctaatgtttttccaaggaacaaagaagagaaggagatggaaggaaggaaggaaggaaagaaggaaggaaggaaggagggagggagggagggaagcaaagaagaagagaggaagggagagaaagaaaatagaaacttctggattcataattacggaccacctagctaatcatatccactttgtgtctgtgtttaaaggacaggacaaacacactacgctttcagcctgatttctcagtgacaccgccttgcaaagactacttgtatgttactctctgctttacatggctacgttgtttgagggcaggagttggtgagaattagtttggaaaactgacttctctcattcagacatagcttttctggagcagagttttccagaacatttactggcagcataacatagatgatgtcacagaagtaattcccgcactgccaagctgcttaattcccctgttaaatgctgccctgatgtcagctgcccacgccaggaagactgccagaggtgtgctgcattcacagactccttaccacccccaggaaagccacccttttcactaacattaatttcaaataataagttatatttttctaatcaatatttgatttatttgagatttgaaattttaactaagacttttagaagttaattcatttcaaatgatagagcctgatctcatgacaccagtgtcatctatagtggggctgggaaaagacatgaagttgtggttttcgtatgtttgccacatacaaacatataaaaggcaagatggtactgaaaaatacaaaagaatcaagaatgttagcattttttagaaatgcatatgccccgccctcagaaagatgttttaaaaagatatctaattcccatatatatatatatatatatatatatattttttttttttttcttttgagacggggtctcgttctgttgcccaggctggagtgcagtggcgggatctcggctcactgcaagctccacctcccgggttcacgccattctcctgcctcagcctcccgagtagctgggactacgggctcctgccaccacgcccggctaattttttgtatttttagtagagacggggtttcaccatgttagccaggatggtctcgatctcttgacctcgcaatccacctgcctcggcctcccaaagtgctgggaatacaggcgtgagccaccgcgcccggctaattcctttatatttctagtcctaactttcaacgttttggatataaaatggcattttgtataatagaagaccttgaaggtctttttatagttctgttattctaagaactcattgcttcatcaaaggagagaactggacacaggaatttagtggtcaagaaagaccttcgctattaacactcttattcacgttatattgcagtactgcgtggggatgagtgagtatctgggcttacttagaaggtactctggtatttataagaatgaagagcaccagttcattttcagtaaatctactgccataaatcattgtgttcacatctctatcaaacataaatcaagccaggcgcggtggctcacgcctgtaatcccagcacttcgagnnnnnnnnnnnnnnnnnnnnnnnnnnnnnnnnnnnnnnnnnnnnnnnnnnnnnnnnnnnnnnnnnnnnnnnnnnnnnnnnnnnnnnnnnnnnnnnnnnnnnnnnnnnnnnnnnnnnnnnnnnnnnnnnnnnnnnnnnnnnnnnnnnnnnnnnnnnnnnnnnnnnnnnnnnnnnnnnnnnnnnnnnnnnnnnnnnnnnnnnnnnnnnnnnnnnnnnnnnnnnnnnnnnnnnnnnnnnnnnnnnnnnnnnnnnnnnnnnnnnnnnnnnnnnnnnnnnnnnnnnnnnnnnnnnnnnnnnnnnnnnnnnnnnnnnnnnnnnnnnnnnnnnnnnnnnnnnnnnnnnnnnnnnnnnnnnnnnnnnnnnnnnnnnnnnnnnnnnnnnnnnnnnnnnnnnnnnnnnnnnnnnnnnnnnnnnnnnnnnnnnnnnnnnnnnnnnnnnnnnnnnnnnnnnnnnnnnnnnnnnnnnnnnnnnnnnnnnnnnnnnnnnnnnnnnnnnnnnnnnnnnnnnnnnnnnnnnnnnnnnnnnnnnnnnnnnnnnnnnnnnnnnnnnnnnnnnnnnnnnnnnnnnnnnnnnnnnnnttggtctcgaactcctgacctcaagtgatccgcctgccttggcctcccaaagtgctgggattacaggcgtgagccaccacacccggccaatactattttttaattctagctaatatatacaaattttattgatctagatgtactttagagcaaattttaaaagtccaccaaaatcttgttggtcgaaactcttttaaatatatagattaatttgggggaaattgcctttacagtattgaatcttcctttccacttgttcaaatcatttgtgcatagtgcagtgcttatagaactctccacatatgaattctgcgtaatttttcttaataataacagcgaatacgaattgaactcttactatgtcggaaactgttttaagtactttaagagtattaacattttaatccacaaccctacagatagttccattgattaatattattcctacataatagcccgcgctgctcagcagactgggaggcccggcgtccccgggcgaacggaggctacaggttggggcaggccgggtggggcccagcgagtgggcgggggcgcgagcgggagcggaagcgggcccgggccgcactgctgccgcgtctagccgcctcccaggctgcctgcgccgcgtggctcgcccccgggacttgccagcagcgagtggggcctgactagctcttcaccacgctccactgcatcggcaagggctggttctgggagaggcgcaagggcatcgacctccgcaccaatcaggtggtggtcattagggcagtggacccggaggaggccgaggacgcccagcaggagaaccctgcgctcagctgtgctacagccccgagtcaccgctgctcttgctgccctctgtgagtttcccccggaggcccagagcggcggcagcgcgcaagacttgcagaactcgggccccctggaggagacctgcccgccacggtcttggggaggttccggagggcctcggttgtctgcactcccaacaccaagaaacccctgagacgcgaagctgccagcgtgctgccctcagagcagggcgacgcaaagccagcggaccccggggtggcggggcagcccacagacacgcaggtcgactggaacagttcttggcagcctcttctggagggcgtctgaggtcgtcagcagcggcctacgacttcaaggcaggcttctgacccctggggatcacgcccatcggactagccaaggaggagccttcgcactccgacctgcaccgcatgcgcgcccagttcctgatccccaagagcagcccgtctgagctggaggaccgcggcaagcccttggaggagctggcaggcctggcccgacgaggaccccgcgtcctgacactgtcaaggagctccgggagcgcaaggcgaccgcgcgctccgccaacaccttttcttccggggttcatgggcgctgccggcgctggaaatcccaggggcacggcgaggagcccagctcctaggatcccgacatcgccagcgcggcagaggacgcggatcaggcctccccscaacccggcgtccctctacagtccggccgagtccacgcagcaagctgtactggaggacggccctgcacggctcgcagaagcccgcggagcccgtcgagaggccccgtgttcgtccacgctgggcggcgcgccttccgggagcgcagagagaagcgcaggcagagcggcggccgcaagacccgccttggagctccacgagccggtgctgcacacggcagaatcccctcgacgtgggcccgcagagccggggacagagagagtctgagctctgttaacagtggtgctgacttggaaggtgcctcgtgtgcgttgggcctacaggccacgtctcctcccacccctgcgctgtgccgtcctgcacgcggggatgcgggtccctgcgaccatctcccctcccctcctggccccactgcagccacaccaggcagcggagcccgacccctctgcgggcccgcgcggcccagtggctgctcagactaaggagcacagcaactatcgggcagctctgcctccttcttccacgggttattggggaggcgacagggcagcccccagaggagcgccccagccgggccttcttatcctgccccgggccgctgtgctctcggcccgtgatggccatagatttgccttgtggtgttggatcaggaactgtgtctgctcttaagtgcttgtgtgatccagaatgttttgttttttaaggaaattggtcttttcagttgggtgttgagtggttttccagatcacgtctgatggatcctcggattataacagagaacatggcggcccagagggaatggacccagatggtgtcatctagagcaactgggatgagattgttgataactttgatgatatgaacttaaaggagtctcttcttcgggccatctatgcttatggttttgagaagccttcagctattcgacagagggctattattttctgcattaaagatccaaaaagtaattccggcacctggagactatatgggagcctgcattgtcttgcttgcattggtggaacaaatgttcgaaatgaaacgcaaaaactgcaggccgaagcatcacatactgctgttggtacaccagggagagtgtttgctttgttaaacagaagatattttctccagaatggatcaaaacctttgttttggttgaagcagatgaaatattgacccaagggtttaagaatcaaataatgagattttccaaaaattaaatacaagtattcaggttgtgttgctttctgccacagtgccaactgatatgttggaagtgaccaaaaaattcatgggagatccaatttgaattctggtgaaaaaggaagaattgaaccttgaaggaatccgttttatattaatattgagagagtaatggaagttggatacactttgtgacttgtacgagacactgaccattacacaggctgttatttttctcaatacaaagcacactgtcaactgactgagaaaatgcatgccgcggacctcacagtttctgctctgcgtggtgacatggacgagaaggagagagatgttatcatgcgggaattccaaccagggtcaaaccgtgttctgatcactactgacttggtttgtgggactgatgtgcaataagtgtctttggttataagctatgatccacctaccaattgtgaaaacaacatttgcagaattggcagaggtggttgatttaggaagaaaggtgtggctataaactttgttactgaagaaggcaggaggattcttggtgacactgacactttctacagtactacagtggaggaaatgcccataaatgtggctgaccttatttaattcctgggatgagatagttctggatgcagtgctcaatgttgttgaatgggtgatcacaacctgcattatgcctctttctttgggaatatttgaatcttgtctcaatgctcataatgggccagaaatacagattttgatagcaaagcaacattagtcatgaggtcttgtgaggaaagtcattggctttatcctctttagagttagactgttggggtgggtataaaagatgggatttgtaaaatctttcttctttagtaatttatttcttagttctgtagaaatggttgtattcaatgttctctatcatttaatactatacttgtggactaaaagatacaagtgctgtataaaatcagctaactatgttaaatgaccatatctgtctttactgcgtttgtcattagcctgagtagaaaggcctttcaaattgttttttaagaaagcatttgaatgcattttgtttggtattgtgttttttgttttttgttgtgagacagtgtcccgctctgtcacccaggctggagtgcagtggtgccatcttggctcactgcagccttgacctcttggactcaagtggtccttccacctcagcctccccagtagctgggactacaggcactggccaccacacatggctgatttttgcatatattgtagatacagggtttcaccatgttgcccaggctggtcttgaactcctggactcgaggatcttgcccacctcagcctcccaaagtgctgggattacaggtgtgattactggcgcccagcctttggtattatatttattcaataaagtatttaattagtgctaaaaaaaaaaaaagaaaattgaatttgtttccttaaatatccttaggttaagatgttagttttcataaaacattgagaagcctctgccaatttcaataaagacctgacttggaaaaaatatatatgtatacacacacacacacacacacacacacacacacacacacacatataattcctatataatttatatttttgttgctgtgttgagtgggatgattcccctttgcattttctagctgaataatgatgatataggaaagctattgatttttgtaaatatgttttgtaactggtgcatatctcttttttgttttaacaagttaaagaagcctgggcaacatggcgagatcccacctctataggaaatttaaaaaattagccaggcatggtggcatggagtgaagtctcagctactcgggaggctaagtgggaggattgattggatccagaagtttgaggttgtactgagctatgattgtaccactgcactccagcttgggtaatagagcaagactctgtctcaaaaaacaacaacaaaaaacaaataagttaaagaaagtaacagccctgtaatcccagcactttgggaggccaaggagggcggatcatgaggtcaggagattgagaccatcatggttaacacggtgaaaccctgtctctattaaaaatacaaaaaattagccgggcgtggtggcgggcgcctgtagtcccagctactcaggaggctgaggcaggagaatggcgtgaacccggcaggcagagcttgcagtgagccgagctctcgcagctgcactccagcctggagacagagcgagactccatctcagaaaaaaagagaaagtaccagctcagcaaccacttaagaatgctgctctataataaataacgtatgattatacacacttatattagcataagctttttagtaaactttatttgaatatcatttgccacatattgatgtttttgtcaagaacagaccacgtatacaatggtggtaccatagaattacaatggagctgaaaaactcctttttttattttataatttttaaatcttatttcatttcatttattttttattatttcttttacctaacaataataacttaagcagaaaaattcctaatgcttagtgacatcttgatgatcctgaccctgtgtaggtctaggctaatgtgtgtattgtgtcttagtttttaacataaaagcttaaaaagtaaacaataaaaatttcttaaaatagaaaaaagcatatagaataaagatataaagaaaagtaatatttttgtacagatatacaatatattgtgttttaagctaagtgttataaaagagtcaaaagtttaaaaaatttttaaacgtttataaagttaaaaagctggctgggtgcagtggctcactcccgtaatcccagaactttgggaggccgaggcaggaggatcatttgaggtcaggggttcaagacgagcctggccaacatggagaaagcccatctctactaaaaatataaaatattagccgggtgtggtgctgggttcctgtaatcttggctactctggaggctgaggcaggaggatcgcttgaacccggaaggtggaggttgcagtgaattgagatcccgccactttactccagcctgagcaacagagtgagactctgtctcaaacaaacaaacaaacagaaaaacccaaaaagtcaaaaagttacagtaagctaacgttaatttattactaaagaaagaaaaatgttttttacaaatgtagtgtagcctaagtatagggtgtttgtgaagtctgcagtagagtacagtgatgttccaggccttcacattgcttcagagcaacttccaatcctgcgagctccattcatggtaactgccctatacagggttatcatttttatcttttgtactgtatttttactctatcttttccatgtttagatatgtctagatgcacaaatacttaccattgtgttccaattacctacagtattcagtacagtcacatgctgtacaggttgatagtttaggagcaatgggccatatcatatagcccaggtatctacgaggctataccatctaggtttgtgtaagtccactgtgtggtgttcacacaatgacaaaacctcctaatgacacatttctcagaacataccattaagcgacatatgactgcttttgtcattaatcatatttaacaataagaattactatcaactaagaagattccactaagtgacaacactgtatttgacacattacatatgcaatctcattgaatccttgccacaacactgtgtagtaagaatcgtcatatccattttacaaatgaaaaactgaggctcagagaaaatcagtaacttctctaagatcatacatttctactctgttgctttgtatagaacttgtaaacatacaccacctgttctcaagttttaaaatttttaccgggcatggtggctcatgcctataatcccagtgctttgggaagccaaggcaggaggctcacttgaggccaggagtttgaggccagcctgggcaacaaagcatttgtcattaattatagagacctcatctctacaaagaaattttaaaaactagctaggcatggtggcacatgcctgtggtcccagctactcagaaggctgaggcgggaggactactcgagcccaggagttcaaggttgtagtgagctatgatggcgccactgtactccagcgtgggtgacagagtgggagcctgtctctaaaaaaaaacctaaataaataaaactgttaattataaaagactgtaattagactttggtagtctaagataaagagaagtgaagagggcccaacgtgggtgaatttctgcagtgctgtgttcttaaaacctgggttttagcatgcacgtcttcctctctataatttcactatagtttgagataaggaggtgtgatgttgttgtctgaaggtggcttctgagtccatgagtctatgaatgtcttatctgagtctcaaaaagctttaatttctcagtgtggtgagaaaaaaaactcaaaaagaaaattatattgatcacttcccagactcaaaagtattaatatttgccttttctgtctcttttatttttgtccaagacggagtcttgctctgtgcccaggctggagggcagtggcacaatcttggctcactgcaacttctgcctcgtgggttcaagcaattctcctgcctcagcctcctgagtagctgggattacaggcatgtgccaccacacccagctaatttttgtatttttagtagagatggggtatttttagtagagaccatgttggccaggctggtcttgaactcctgatctcaggtgacccacccacctaggcctcccaaagtgctgagattacaagcatgagccaccgcgcccagcctaccttttcttttaaagtctattttaagttgtgctaaggctttatttcaaggtgtctcataaacgctacctttctccttaatattttcactttgttagctacactagaattaactcagacctgttagcaatgagactatcatgttcttccattctcctgaagttgcctgctctcaggcagaggttgtgacagttttatgaggtggtgccatttctggttttgtttgtttgtttgttctgttttttatgagacagagtcttgctctgtcacccaggctggagtgcagtggtgcaatctcggctcactgcaacctccacctcctaggttcaagcgattctcttgcctcagcctccctggtagctggggatacaggcgtgcaccaccatgcccggttaatttttgtatttttagtagagatgggttttaccatgttggccaggctggtcttgaactcctgaccttaagtgatccacctgccccagcctcccaaagtgttgggattacaggcgtgagccactgcacccagcccatttctggtacctaaagcttttgtgtttctttctctctcctcctagtctaacacttttagaaattttatcatttcttttttcttataatgaaatacttaactccagcttttcataacatgccaggtatgtaaccgaaaaaggtgctttctccttctacttggaaattataacctttctttctttaaggcaactcttctcacagcttatggttatgatctacagatctttatggtagtctcaactcagagttgcccttaaaacaaagtagggtctaccagtcatgtaagttatttgacttcatgtagacacacaggaaaggttgattgtactgaactcaggcaggtccgtttgttgaactgaaagcctgaatctagccagtgatatttccaacccagttctgttgagaattagttaataaccttcagcttggtataatgcttataaaatttattagatttgaataaataaattgaagagaaccctggtttggaaattcaaacatacatatacgtgactatgggagagaaaggtacaatgaactgtgatttggtaaaatgtcacattaaagaattattattttataactttagcagctttaataaaagctgctaaaaataaactcaagatggatcaaggatttaaatctaagacctgaaactataaaaattctggaagataacatcagaaaaacccttctaggccgggtrcagtggctcacgcctgtaatcccagcactttgggaggccaagatgggcggatcacgaggtcaggagatcgagaccgtcctggctaacatggtgaaaccccgtctctactaaaaatacaaaaaattagccgggcacggtggtgggcgcctatagtcccagctactcgggaggctgaggccggagaatggtgtgaacccgggaggcggagcttgcagtgagctgagattgcgccactgcactccagcctggacgacagagcgagactctgtctccaaaaaaaaaaaaaagaaaaagaaaaacccttctagacattggcttaggcaaagatttcatgaccaagaacccaaaagcaaatgcaataaaaacaaaaataaatagctgggacttaattaaacaaagagcttttgcacggcaaaaggaatagtcagcagagtaaacaggcaatcaacagagtgggagaaaatcttcacaatctatacatctgcaaaggactaatatccagaatctataatgaactcaaacaaattaggaaga

SEQ ID NO: 96565 - DNA, 15166 bp, Homo sapiens
ttttttgttttatattttaaaataaaaggtctttacttattgtttttatgaatagataattaaagaatgaaaagaaaaaagcgttccccatcctagctcttgaatgccttagttcaaaacttaaataactagtgatgttatttatttgtactttgggtgatgtagggttcaataatgtggttggttgacagagacaaaataatgaattgttctctttgacttcctgtagctttggatgtgaatgttatttttccttttctctaaactttttggaggcttgcttaaagaaaagtgttgctgcaggaagccctgactccctggtgcttaactccatagaaacacgcacgtgcttagagatccacactgacctcgctccctccagacgccatcattttggtgcagacattattcagcagacactaggaatatgaaaagatacaagagctgagtcttgaccatttggagttcagagtctagaaagagaaatcctgagtaaatattaagtgcttaataacactgtaaggaggcttaaaatctggtggctgaaggtcctggcttgaagacagtttaatgctcaagcccctcaaaggagatgctgtagttatcggtggccacaggagaaggcatcacagagggttggaaacttaagctgagtttcgaagggcaggcagttcttaagtaagcgaggaggagagagcaaggacatttcaaacaaaggagcttctccgatatagcttcatcttgtgtgctgggtgagaattaacagtgctgtatgtaaggtgtggagtacgatgcctggtttgtgaggtgctcagttgatgttagctgtcattctgaaggatgtggctaaaagatgaagcttctggagacagtgaataaggcagttataccttattggcttccataactttttttttttttttaccctgaaagcctgaaagagcccattacctacttaacttggagtcctgatttttccagcaactagctaagaaactaaatgaatcactttggccgagcgcggtggcccatgcctgtaatcccagcactttgggaggccagggcagacagatcacgaggtcaggagttcaaggccagcctgaccaatgtggtgagaccccgtctctactaaaaatacaaaaattagccaggcatggtggcgcacgcctgtagtcccaactacttgggagtctgaggcaggagaatcgcttgaatccaggaggcggaggtcgcagtgagccaagatcgcaccactgcactccagcctgggggacagagcaagactctatctcaaaaaaataaataaataaaaaataaaaaaatcactttttgctttacacctcccttttcttccatgtaaaatgtgtcagttggactaaataatatctagtgtaccttccatttggaaatatagtaaatttactttgctataatgaatgaaagaaactagaactcgagataataaactatttccctctttttttcctgagtttcttttttaatgtgaactgtaatacctacctgaatataaacttactttacattcctactaatagtaaggcacaaaattatttgggaattaaaatttaagaacagacatttaggttagaatcagatgggtatttcttatatgtaagtatctgttccatcctgaaataaagtagaaaatcttagaatatctatttttagaagtgttttgtagtatttgtgatttctgtaatgggatgttatacagagacatgagtacatcctagactaggtgactttttagggttgctttgtgatttataagacaactccttgttgtcttcctttttcctaatatcattaccaaattaattttcctaaaatctctttggtcaaggcatttcctttttcaaaagccttcggtgactttttgtctcccaaggtaagtacaaaagtatcttctttgtccagattttcatcattatctcatactatttccatttatgaaatttctgtacccatcagtatggttgactgccagacctcagaaatgtcctgttccctaaaccactgagttttgttttcatggtctcacagcctgcccaaaccttgtccattctgaaagacccagttcaagaaagaggattcaccatgttgaaaacagcaagaattgagaaacaaatgttaaaatgttcatattgtgactgcccaggctgggtggcagcacaggaatgggggcaggtgggttaaggaggatggaagagcccatggacttggtgagatggagggagagacagccttgcacatgggaggctgaggtcagggagggtaggatctgaatttaaggaggtggcatactttgaggctgaaggtgtctttgaaaaccacaggtcagaagaagaggcagggaaaggaggtaaaattctttgagccagattcacttttaaagtggcttatagagatacaaagattatagactgcaggagatgaaagacaggagaaggaggtgagcttcagggtagattcattgggaatatgtttggatgtcatgaagataatttgacaacagaatctccttgaatgtggtgtaaaacaaaaataaagcaaaacatataagaggcattgatgaacccagcccaagatcctttcctgtaattcaggatatttaggatgaggaaagtattttgatttaagaaaatctagattggaataaatggagtgtctattccggacagaacaggctttcccaaaagagggactgttagggcctgaagagcagcaaaggatttgacttgggttgaaattatacaaggacagatagaagagagtagataaggtatactcaggttagagggtagattggagacaaatgttggcagtggaaaaccgcagctgaaatatcaatgtcccaaatctctgaaacaggacctgattgctgggagggtgcaggcaagcagggactctctcctggagagggaggactgatgggcacactttctgatgatcattcttcacagccatcaatctctagccctctgtgccagtcacagaggtttcactcttcatggtttcactacattcccgtttcttttaacccatatttaggctcatttaaatatttgatcatttttacttctgatacttattcattgctctgagtcaccctttgcccaaagcaaactgttgtagcctagaggggacttttgcagaaatatgagacttgttacaatgattccctactcctgtctttccagcctagctttccaatgcaaaggcagactttagagtttcacccttgcagctattaggaaataactgcccaagaaaattatcacaggtgacatgcagaatgcatggtggctaattagttcaactagaatatcaagaatgaagctcaaggtatcatgtttataacacagctaaggacaatttgatgttacctgtgccttttagaagggatccctccttcaccttgaaaaggaaaaatacgaatttattagtacttaccttaaaatcatttctagtaacatgaccaaattatacgtatagaaataggtataagttgaaatgtttccttgcacattttttccttctcatagttcatccctcctttttgtagagaagaaaaccaggatttgttgccaccgtggtttccctttctgtgtttctggttactctctagtggacctatctgtgtggtcacggttctgcaagttggagagacgccactggggggcattgacctgtgctacttgagcactatagtgaattctcacctttttcaaagtagtaattagacctctggtagtttgtatttttagatacataatttcctttattgattccatacaactttgggaaatagtacatctgcttttattttaaactgaagagttactttagaaatgccattttttgtttccagaggctctaaaggattttcatttctgtgacagatcgacaggccatgaagattttctccagaatggtaacttggcatctgccaggaccttcctctggctttcttcagccttctaattacaatcatgcctcgatgaaggacagggtaccttgtgagaaatgtgttgctaggcgatttcatcattgcatgaacaccatagagtgcacatacacacacctacatggttgagcctactatgcacccaggctatgtggtgttgcctatggttcctaggctaccaagtcaataacatgtgactgtactgagtactgaaggcatttggaacacaatggtaagtatctgtgtatccaaacatatttaaacctagaacaggcgcaataaaaacaaggtgtaccatctcatttgagaccaccgtcatatgtgcggttcattattatacagcacatgtctgtatattatctttgtcattttgtgaaaacctgtcactttgaaatgctgtctcttagcaaaagggatcataattcattgaattttttatttttcaaatgaagtgtatttttttttcatccagaatgtagactagtgggaaacacatgaaagagctggactactcaagggtgattggcagtggcctcgtgctgcctcttgcactggggagggtggaggaggaagagtggtagcaaaaggccatttgctagcccaaccctgtcctgcagggctcctgtcaagaagggaggggaagatggaggaggacttcagttaagtaagtcccctatcttggtataaacactattcttagggacttcatgtttataaggacaggttcagtttcaccagcataaaaaccttcaaaaagcagtatgaaaatagtattaaataataaaaattttcaatttgtttgaaaataaaaattttcaaattggttcagaaaatattatgaaccaatctgttttagttaacccttgaacagtgtaggggctggggaaccgcagttgaaaattcacgtctaacttgtggctccccaaaaacttctaatggcctactgttgaccagaagccttactgataacataaaccatcgattaacacatattttgtatgttatgtgtttcacatgctatattcttatgacaaagtaagctagagaagataaaatgttactgagaaagtcttaaggcagagaaaatatatttactattcatcaagtggaggtggatcttcatcctggttgtcttcaggttgagtgggcccaggagtgagtgggaagttggtttggctgtctcaggtgccagagatggaggaaaatccacatagaagtggactcgtacagttcaaatctgtgttgttcaagggtcagctgcacagcctcctggggtacataccatcccctctgttggccactgtgaaggaggaacgccattagttcaaggataacagggtcagtttgaaatgaccatgtactcattttggggagaaaaatctatttgagcttgtcaaagtttttctgtagcttcaaaaatatcaaactgtaggagttataaaactccacttttagataatatacttcttagcattaagaatttagaccttttaagaaaaaagtatgaatacatgttttaggtacagagctcttttacatccattagtgaaaattatatctaaacatatcatcccgaaactcaagatttcatcataaacaacaaattcaagttaaaatgaataaacctaaggtttttagcatgaattccagttttttctctcttttttaaaacagaggcagtataagaataatgagatcttattttggtttgcttcatttaattaggatttcaggaaattaggtaacttttttcatgacctttagaatacaaaaaattaatattcggtcaattttttgaaaaaaatttatcaccaggaatttaggcaattaaactttaaaaaataacatgcaaaagttaaagcaatttagaaagccctttttaagcaaattatttggtttttcatgataagtaatcttttgactgaaaatcttatttttcctgttttgttatttcaaaggtttttttgtttgtttttgaagaagtgacattttcctggattagtgaattgttaaaaagtacatcctttctgtctccattttttccctttcttaaacaaagcaaacatttgtatactcacacactgaaggaaaaaagtgcaagtgttataagataattagaacggttaggataattgccttttatggatacataatgcttcagttgtttactgctaaatgaaatgtaaaagtatatattagactaaggaatagtgtacaaaatagatctaaatacaaaggaaattgtgttctgtctgaaaatttgtagatgggtctaaattaacaagaataaattaagaaggatatatacacactcatttatacccttgtgcgtatctcacatatgtgaacacacacaccaaatacactgaaatgtccatatttagtgccaaaaattgtgatgaaaaaccagtgggattatcctttgtaatagctcattctttaagttgcatttcaataaggcattgctgtgaatccagaggagattgtcarttacagaatttttttcatgatctagtatttgcttggtgcctcagagaaaatggttgttcatctctgcccctcactgttcatgtttgggactattgtttggctgcgccagtagaacttattctgataagctcaccaaatttcaggagtagcctcctttcaataactccacacttgtgcatgtggcttagtgaacttactggtgactcagtcatagcaagaaagggcatctcatgtctatgtgactacaaatatcagggaacagattctccatcaccaaccccaacctctaccctaacacaaaggtgtatgacaaaatgagacaaaatgaaacaaaattgctccacatgctacagtggcctactgttgactagaagccttactgataacagaaacagytgattgacacatatttttaaataaatataatatttctctagttaggttttctatttcattttattttaaagatgacaaaaactaaatatgcttctcaaacctctacctttttcaaattaagtgaagtcttcttctcatttaaagctgtttatactcaatttgaaatatgaaacatagcttcaaatccaacaaagagaatgttgctaactctggataacacttggggacttgagtccctgaaaggctgattgacaaccagattgacaactctgattgacaaccttgcttactttgrtagggcttactatacttagtatgatagtttttaaattaatttagagcagaacctttccaagggatctgtgacaagaatggttaaatactgaagtgttgaagaargaaataatttatcctgaactttgaaagtgtattattactaatgaatttaaagataagtgtagaattgatcatttatcatttttaaaccttttaaattagaattataatgaaaaatgcactccccatcccacacacacaaaccccaacaactctttaggtgcctacaggtaggaaaaattgcatttatctgaattaatcttggagtgaatactaaagttagttggaaaagctcctgaaatgtatgagacctcgaaatatcaattaacaaaaaatagtacctaaaatgtcttctaagaagtgtagtcttttaactaggatccttcttcctgtgtaaacactgaaatgaaattttggaatgaacctaaggtggtcctgaagtgctgtgttactagaaaaagatataattggtggaaagggtggrtggatacacaggaagaagcaagaacctgaactcctgctggctgatggaagaaaatgggtgatcaagtttttgcttctgaatatttgacataaacatcataattaacctcacctaaagaaaacttaaaaggccaggagtagtggctcacacctgtaattccagcactttgtgaggctgaggcgagtggatcacttgaggtcaggagttcgagaccagcctggccaacatggtgaaacctcgtctctactgaaaataaaaaagttagccaggtttggtggtgcatgcctgtaatcccagctactcgggagaccgaggcatgagagtcacttgaacctctcatggcggaggcggaggcggaggttgcagtgagccaagattgcatcactgcactccagcttgggtgacagagcaagagtctgtcaaaaaaaaaaaaaaaagaaaaaaaagaaaagaaaacacaagaaaaatatttgagagtcctcaaagctttgtataaacacattctttctggtacattcaaaaggaactgatttcagattggtgtagggcaaagcagaaagtaagtgtgtggtcacagaaatgaaaggacaagagagttgacaagagttacaaaagacagacaacagatcattaacattgctgttgatttaatttggtcactagaaatgcggcattcatttttaaaagaacgtctatctatccataccaataatctggagatgatcacactttccaagcagagagctgaagtgaaggcttgaggggatgcctctgcctctcttcattttctttcatctacatggctgaccaatattcacgcattaatagattttggtttctctctggttccaacatttacataatacagtaatagttataggaaagggtttgcatgttcattatataaacccataccgattttttttctacattcatctataaattacatacgagtggggtagctctatttcttgctaattcctgacagtatttattttaagcatgtctttaattcaaagggatcaaatatgttataaggaccacgtatttattatttcaggtgttttacacagtatatcacattttatccttaaacacatgcacatataggtatgacactttatacttgtatagtataaaaatattaggccaggcgtggtggctcatgcctgtagtcccagcactttgggagactgaggcaggcggatcacaaggtcaggagtttgggaccagcctgaccaacatggtgaaatatacaaaaatacaaaattatacaaaaaacatgcaaaaaatatacaaaaattttgtcctaaaaatacaaaaattagttgggtgcggtgacatgcacctgtaatcccacctactcaggaggctgaggcaagagaattgcttggacccgggaggcagaggttgcagtgagccgagatcgtgcaactgcactccaacctgggcaacagagtaagactccttctcaaaaaaaaaaaaaaaaaaaaaaaattagagcgtcctcagtgctttatataaacacactttttactaaaaaaatttacaaagcatatttccagttttgctttggagtgaggaaaacaagttcccaggagcaggtatcatgagtccactttacaagtgaaatagctgaggtaggtgatatcacaaaggccactgttgctttgactagacccaagaactttgtagctcaaaggtctctgcactacatccaccaagcattcatggaaaacctgggacgtaaatagggaactgtgcttgggaagtacagagataaaacaattctggccccacctcgcaaggagcttacagccttaaaaagaatgatcatagaaactgttaggtacaaatggaaacttcttgctaaatacaagaactactaaaatgttacatgacccaagagaatgggccaatgctgaagcccatgtcagctaaggctgaggtgaggaagtggtctttttgccaagccttgaaggacaggtaagactgcacttgataaaagaaggaaagtaggagagaattccaggctgaagtaacggcatttatggagactcaggaggctgaggcgggaagggaagattgctggagcccaggagttcaaggctggagtgtgccatgattgtgcctgtgaatagccacagcactccagcctgggcaacatagagttcatatctaaacaataatattaggtatttgggggaaaccttaggaacctttttaaatgcagctgtatttgctgtgcatttgtaaaacgaagaagcagcatggtgaacccagtttgagcagagctgcaagttgcttgttacgcacccctcattgtcacagagcattcgatttatcctctgggcagaaggagcttctgctgctgatggacgggaaatgaaacatttatcacattgctgttattatttttaagaattctttaaggaaaggaaaaataatcaatccacaataatagagaatcaactccttaaagagaggaaaagtatctgagtgtaaattgatgggcaaattaatttccctttttttatgtaaaattgttgtgacatgttaataatttatgtaattttagaaagtaaattggattttctttcaacctttatatatgaatatgtggtcaacctaactatatactgaatattatactagaaactgaatgatgattcagaatagtataggtgacattcagtttcattaaagattaatagtagcatggccttgtgtgttttgccgtatcacaaaaagcaagatttagtgactagggccctggattatgtattaggtggcaagacttccagtccaagctgccacacacttgctgacatttgtgctcacgttaattttcccatccgtaataacgacagtaataacatccaaaaccagtatacccagataaatggtaaagattaataaggtaatatctgtgacaggctttgggcttcttagaaaagcactgaataaaaagagcagcagcaaaaccttctagatagatagtgtcatcagttcgctgcactctgcacagaaggaccacgttgagattctgttgtgcagtgtcagtcccgtaggtcactgaaggaggaaggggtggctttgggagtgactttgtcactcattatttgaatgactttgggcaagttacctaatttgatgaatttgttttatctgtaagtactgataacatacattacttggactcataagaattaaatgaggtaaattaattcattcacaatcagaaaattctacctaaatttctctttttgttttggcccttgtgggaacatatgtaaaaagcagtgttcttctacacaattgacaaaatggcgtgatagaccttaggatttgttggtcatatttctgatttggtcattatttcttataatttcaccatctctctagtctttgttcagtattttttaaaactatgcagcagtggaaaagaaaacattttttattttcctcctacttcttttcttttcttttctttttttaatgtaaacccttcaattatatccacctcttatttcttatcctttgtttactatctggaattaaacaaggaggattaggggtggtgcttcacctttgtaaaatgcacttgaagttcattataaacataaatatataatttataaacatttatttttataatcattttaataattataaactaataatttataatataatataaataatatttatttataatatacttgtttaaatatataaatttaacttatttaatttataaatttaacccaacgctcttgggttctcatgcattaaatccctaccaacccagagtaacttaggaaaagatcctcctgagaaagttcatcattaaattttaaaaaggggacctttttacttctttttgataatcttaggatagcaagaattgacacttacaaagtcttattgccaaggagaaggcttgatgatgcctgttagtatatatgaatcagtcatttatcattaactgtttgcattaatgctccttagctatttttatcgaattagttgtgacaaaaagtatctgaagtttttgtgcttattactttttacttaaataaaactgcactctcactccaatctttttttcgtgcgtgtggcagaggtcatccgcagtgctctgtccaaataaccattcatttactttgaattatggcagtgggatgctcagtgtttgtggactcgcaggtcagtatgggtaaagaaggagagagagtccaggcacagccttttcagtatttctctacactgtgtctgaaggataatgcatgtggtcaagaagaattttcctagtcctgtgactgtttaaaatttgagaggggaaaaaaagtctaagacttctgtaatgctccaaattgtttttcaaatgaggttttagcaagatgaaaatacctttcaaaggatttatagacccatgagaatttttaaaaatctctttaaacataaaatattctcctagctactggaatgtttcgggtgtctctgcttaatcagctgcctcacttcctggtctctcagtactggcttggtgcctttacagcccaatcatggtttattgatattgtgctgcacactattctttccgagttttttctcccacaattgtttgacaattttgttcattggtgataatgaaagagaaaaaagaagtgccagccacccaacacagtcaacacccatttttgcatgtcgtttctgtgcagcagaggcaagcacagaacctgaacgtgctcagtgaggtactgtttagtgtcgttctgtgtgggactcggatttgtaaagcccctgcacttgtaattcaccaaagtttcccagacacagttccagtggcacattccaagccttttgtttccagtgcagtattgggacttggttgtaactacaaaaactctgatgataaatgcctgggattctggttggaaacacctgtcagaaggacttcaagaaaggttttagagcctagggtcttctgagtagcagtacctgttgactgacctgctgtgtgctctgttagaaaattatgttggaaaatactctgtgtacttggcgacaagcctttctgagccaggcatgtgttgatatgacatggcggcttcaaacagtcctgcaggtgctgtggtatattacttaagcttttttgattccaagtaacaaaaaccaagtgatttgtgcttaagcataaaagagacacacacacacacacacacacacacacacacacacacatataaattttactttaagttccaggatacatgtgcagagtgtgcaagtatgttacctacatatacatgtgccatggtggtttgctgcacctatcaacccgtcatctagattttaagccccgcgtgcattaggtatttgtcctaagctctccctcctcttgccccccactcctcgaaaggccctggtgtgtgttgttcccctccctgtgtccatgtgttgtcattgttcaactcccacttatgagtttgaacatgctgtgtttggttttctgttcctgtgtgtgtttgctgaggttgctggcttccatcttcacactgcaaaggacatgatctcattcttttttatggctgcagagtattccatggtgtatttgtaccacattttctttatccagtctattttggtggagatgggatctcactgtgttgcctaggctggtcttgaactcctaggctcaagcaatcctcctgtctcagcctctcaaaatgctgggactacaggcatgagccaccatgcctggcctaattttgttctaacatctcagtaaatttagactaatcagtagatattttcagataaaatataaattctatcagttttatgagcacatacatttatagatttgtggaataaaatttgtattttgtggtgttatgtttgaaaataaaaataaaattcaataatgaaaaaaggaaaataagaatacaggcctgcctcatagggagaactggtctaggacttggaagcctatcttaagccagttctctctgcccctcacccccatgtctctgcctcccttcattttttcttctctctgagggctgtcccagggtcagggacactttaaataaagtaatctctgggatttacttctgtagaagagaggaccacttcaaaagactcactgtgaatttatgaaaaacacctgaagccatcatatggcgcttatgttgctcttgatacttctttcttttacctgctacaccccacatgagtaagagcacaagactgagctgtttagggtgctccaggcagagaaggcatggaagcttggaaagcgttttctaagtcttttctgctacacttaatttttgctcattactgtttgtatataatccttatcatttcatagctcctggcacagttgtgaatctgaatcttgaagggatctctgaagatcactcagacacagtcacctagacagaaaccataacgggtctccacccaccgttattaaatcatgcatatggttaggaagtgcttgccttgtaaagttagtgatggctgggcagctcctaactgcgctcctattgatctaggtccgtctgtaacttcctccaaggtgcacatgttccctttgcagcaatacagaataaggcctgtccttatcaatgacttcaaattcctgaatatgtaagaagtcactctgtcattcacttaaagatatttaaatgcctaacgtttactgggcagtgattaagtgctatggatgtcagattttaaaatgtttggcaaacatttggaatagcaactggacaagcttctgaggaagtgggagagggcagaagagaagtggaagctttccaaggacacctcagccccaggaagactgggtatcatcaatctgatgtagaaacgtcctctttattcagtcacccggtggtttacaaagtctttgacatgggagccagaagtcacaatgtaaggttagccctctaatataggaatgtgggtttcatgttgcggaggtgatggaaggacaagagccagggcattgtaagtgacagggaggatcgtggatgggataagccaggctaccccagctaggaaggaaaagagggaaaagtcaggaaggaaaagggctgatggctgggaagagatggacaaactaatgaaagagactaaaagttcagtcaaatgaatttagagaggacattaatccttggtaatataataataaagtacttgtataaagttcttgtatgttctcaggagtagggattgctgataccatgtaccaatatggaggagagatatataggctgattggtttcaaaaaaagaccatattggtcatcttatgtgtatttaacttaggataatactggatatagttttcattttaaatagtgtaagtttgcattcataacttggcataaagtgttttatctcaagaacttactaaacttgctctttaaagttcattgcagccaattggtacacaaa

SEQ ID NO: 96566 - DNA, 13537 bp, Homo sapiens
  misc_feature (1)...(13537): n = A,T,C or G
cttgacttgatcctgccaagtcactgtgctcattatcctcttaacactctctgttcccttccaccatgcctttatctggctctttgtatattttctctcccaagagaatgcaagtataataggcactttgtagtccattctccaaagaaatttaggctcagtactacacacaaaaagacactcagtaaatagtagttagattaaatcatgggatgttcttaaatatttaaattcagcttgacataatttgatgatatgaacagattaattcagttcagattcagaatagttacaacattagtaaaagtcggaaaagtaaacagtcttaccaatgcaaacatcaatctttcctttaattgcagcttcatggagaggagtataattccaattatctcgagcattggggtctgcaccatgtcgcaaaaggagattgactacttcagcatgaccaaaagagcatgcattatgaagaggaataaggcccccatcatcacgtgcttggacatttgcaccattctgaagcaaatattcaactacgtctttccgcccaaaacctagatgaaaacaaattgtccacacgtaagttcaacaaggaaaagatatcaaattagataagtaccatccatactaaaatgtttcaggttgaaaattaataacagactcaacaattcaagaactaattaatggaaaggtgatcagaaatatatcaataactaaccttaatgataaagccagagggactctccactaagcagcagtggtacctaagcagtgccttgggtggtactactactgctaacctcaaagaaagaatacaaaataagtgactgaaagctcaaagttcaaatgtttctcactctacaatagagttctgcgtatttagtatgtatacattttcagatgttcaaagtataaaacttaaatatgtaaatcacaaccttatgatacagtgacaaaactcttgctagaattcctttcccacatctatctcacagaatgtttctgctaaactgggggactacaagaagcaacaaaaaaagatctgctcacagctaatatttgtctatgtagtgagacacagagagataaccccaggcaaaagtatgaaatccagtgtcttcaaaggagtccctactttgccacttgcaaaacgcatatataacttctttccatgtaggaggcctcctttaggtaccaacattccacagttctgctcaactgcccccaaatcaaataaaacaaaaaaagtctggtaatttatttatactggtttacagatctagcaccaatgagtttcaatctcttatcattcccatatattagtacttaaaacctttttacacctagctttgaaatgataaggctttcaggcatatgttaaagcagatggagtggtctacaatgtgtttgggtagagagaaaggaactgctcactcttctgaaattttctccgttctattctttttttttttttttttgagacggagtgtcgctctgtcgcccaggctggagtgcgtggcacgatctcggctcactgcaagctccgcctcccgggttcatgccattctcctgcctcagcctccagagtagctgggactacaggcacccgccaccatgcttggctaattttttgtattttttagtagagatgggatttcaccatgttagccaggatggtctcgatctcctgacctcatgatccacccgccttggtctcccaaagtgctgggattacaggcgtgagccactgcgcccagccctccattctattcttaaagccaccaagtctgactgtagttcttccaagatgaccagcaatgagaacagataagaaagtaatggtacagtctttctaaggtcgatgcctggggttggcctggttgcagctgatggaagagctaaagatagttgaaaagattaactgtttttgttttgttttaacattgctgggctctgtggtcacaaagatgagtatctttgtatctttgattcttcctcctctcaaagagctcataatttaagatatgaagattttaaatttcaatacaatataattgctatgtatatataaagtgctactagagctcaaagaagggaactcctaaactaggggaaagcagagaacggaaaagacttacctaaggcaattccagtgatgacacctgagctgaaagcatacagaaaaataagggatgattaggaaaatgaggagggagaggtgagggaaaggagatgagcaaggaagggtcctgcagtccaagcagaagaaacaaaacgtacacagacatggaggtatgaaagaataaatgcttgggctgggcgcagtggctcacgccagtaatcccagcactttgggaggcccaggtgggcagatcacgaggtcaggagttcgagaccagcctggccagcatggtgaaacccagtctctactaaaaatacaaaaaattagctgggcgtggtggcgcgtgcctgtaatcccagctacatgggaagctgagacagaattgcttgaacccggcaggtataggttgcagtgagccgagatcacgtcactgcactccagcctgggggtgacagagtgagactccatctcaaaaaaaaaaaaaaaaaaaaaaagaaaagaaaagagagaaagaaaagaaaaaagaaaagaataaacaaatgctccataacagccaggacacagaatgccaaagtgggcagatgctagatcaggagtatgtcaggctggctgggtgcggtggctcatgcctgtaatcccagcactttgggaggccgaggcgggtggatcacgaggtcaggagattgagaccatcctggctgacatggtgaaaccctgtctctactaaaaatacaaaaaaaaaaaattagctgggcgttgtggcaggtgcctgtagtcccagctacttgggtggttgaggcaggagaatggcatgaacctgggaggcagagcttgcactgagccaagaccgggccactgcactccagcctgggagacagagtgagactccgtctcaaaaaaacaaaacaaaacaaaacaacaacaatgaaaggagtatgttaggctaaggcagcacctggcctttgtcccataaattagtgtttttcaaactgttttcagatagcagggttttttttgttgttgttgttttgttttttgagacagagtctcactctgtcacccaggctggagtgcaatggcgtgatctcggctcactgcaacctctgcctcccaggcttaagcgattctcctgccttagcttcctgagtagctgggactacaggtgtgcaccaccatgcctggctaatttttttgtatttttagtagacatggggtattgccatgttggccaggctggtctcgaacttctgacctcaagtaatcctcagcctcccaaagtgtggggattacaggcacaagccaccgcactgggcccagtcagatttcaattagatcttatttaagattataataagtgcaggtcatgtttactgctaaatacccaatgcctagtacatagttggcattcatagaactgcaaattaattgaataaaataaaaactattctggttgaatcctccttcttcccctcacaaagacccaaaagaaaatattcctgtatccctgagcacctcttagaaacagtttgaaaaatactgctacaacacatcattagttacagaatgatgtgtttagggcagtgactatttgcctttttttttctttaaagaaagatcaccttggcaattgcgtgaataaatgaatcaaatgcagagacaggcagtagataggtccttaaggttttagaatgctatgtgccatagtctaggtgacagatgataagggctaagatttttttttttttttttgagacagagtcccgctgtttagcccaggccggattgcagtggcgcaatctcggctcactgcaagctccgcctcccaggttcacgccattctcctgcctcagcctcccgagtagctgggactacaggcgcccgccaccacgcccagctaattttttgtatttttagtagagacggggtttcaccgtgttagccaagatggtctcgatctcctgaccttgtgatccgcccgcctcggcctcccaaagtgctgggattacaggcgtgagccaccgcgcccagcccagatgataagggctaagattaagactgatttggttaggatagtatacccacatggttcatgtgaacaccataggtaatactcacatggctggtgaagccttcctcccacccctattcccagcttcccagttcccttccttctggttaccactttttttcacatacgttgaagttattttatatacatgcaagcaaacatctgctaatatatatctttaaagatagtgtttacatcttcctttcttaaaaaacatctattattaataatatcccagaaatcaactcctatcagtattttatatattttcttgattgggagtatcaaaatgtaactagttccattctcatacatagttaggttgtttccaatcttactactatacacactactgccaaggtttttggcctcagtaatggaagagtgaagttgccatcaacagcaatgggggcaaggctgcagatgaaaataggtttgtggcagaagatgaagagtccaagttttagacatgtcatatctcactgagggcttattgcttcctctacctaatttctaaatattgggattcctcaagactcagttctctaacctctttttagataatcttatctgatcccatggctttaaataccacctagatacacaaccctcagatttaaatctccagtctacacttttcacccaaattccagaatgtttgcttaacatatttccttctggatattttaaaggcatctcaaactcaacacgtttccaacttctatttccactgacattaccttactccaaccactatcacctccagcataagctcctgcaatgtctcccctaaataggtctctcatttccacttgtctctagtgaccttttaaaaataataatatcacagccctgtttaaaataattccttggcttcccactgatgctctcagaataaaattcaaacactctactatggccttaaaagctccttcatgaactggccctcaacttcttctctaatttcatttcacacgattcttccctttcccaactataatatactttcagtttgtcaagtatgtcagcgacttggtacatgccacccttctgcttggaatgctcttcccttgcacaaagcatcctcacttctactcattacctggtttgtttaaatgtcacctccttaagaaggctatccctgaccatcccatctaaaatagtcccttctgcccatccacattttttcctatcttcacaccatttagttggtctatctcccacctccttcactagaatgcaagctccatacaacagggatttttgtctttgctgttcatagcagtatttgtcacttattaaaatttgtaattactgccttattttctagactctttttttttttttttttgagacagagtctcgctctgtcccccaggctgaagtgcagtggcccaatctcagctcactgcaagctctgcctcccgggttcatgccattctcctgcttcagcctccagagtagctggggctacaggtgcccgccaccacgcctggctaattttttttgtatttttagtaaagggggggtttcaccatgttagccaggatggtctcgatctcctgacctcgtgagccgctcgcctcggcctcccgaagtgctgggattacaggcatgagccactgcgcccggcattttctagactcttagttccatgaaggacaagagccatgtgcatcttaattcatcactacttccccagcatcctttagagtacatggtacagagcaatttgttgacatttgctgaattaaggtatcacagtatatgaaaaggagtctgagaagtaaagctaagaaagaatggcattgcaggactcgcgtcggttggcgactcccggacgtaggtagtttgttgggccgrgttctgaggccttgcttctctttacttttccactctaggccacgatgccgcagtaccagacctgggaggagttcagccgcgctgccgagaagctttacctcgctgaccctatgaaggcacgtgtggttctcaaatataggcattctgatggkaacttgtgtgttaaagtaacagatgatttagtttgtttggtgtataaaacagamcaagctcaagatgtaaagaagattgagaaattccacagtcaactaatgcgacttatggtagccaaggaagccygcaatgttaccatggaaactgagtgaatggtttgaaatgaagactttgtcgtgtacttaggaagtaaatatcttttgaattagagaaagtgttgggacagaaagtactttatgtaactaagtggactgttcagaagcttagaggtcattttttgtaattttctttttaatgtttactttagagagctagggatgcaaatgttttcagttagaaagcctttatttacttttggaaactgaacaagaaatgcatctgtcttagaaactggagattatttgatgttaggtaaaacatgtaattgtttctctggcaaatttgtatcagtaatttgaaaatgagatattaggaaaaaccaattcttcttaaatttagttcatctttccttaaaagaacattaaatgtaaccattttgtcagatccatgtattttggagcataaaatgtatgctggnnnnnnnnnnnnnnnnnnnnnnnnnnnnnnnnnnnnnnnnnnnnnnnnnnnnnnnnnnnnnnnnnnnnnnnnnnnnnnnnnnnnnnnnnnnnnnnnnnnnnnnnnnnnnnnnnnnnnnatactgtgtacctaattatgtatagcagtgtagtctcaattatatctaaaagtaattgtgactaacaagtatgctttgccttatttccacatttaaagtacctgttaatataagggatttgtagtatcagcttgttgagcaatgactttgaatctagttttcagtgatcagaagcagcatttatttgagtgtatgaatggaatgatgatcactgtgctataatgtactgaaaccaccatattacagaaatatttactacatattttccatctgtagtttctcagaagggctatggattagtttgaactgtcaaatccttgcatacttctgtgacacccctgcccattttctgtctttaattaaccaaggtgttaggtgttactgtcacaactgttatgttttccagtaaactagaagtacgatatttgataattatatttgtatcctaaatttcaccacctaaatgtaatgttgattcctcaagaatgaaatgaaggcactacattgaaatatgttttgtataaatttgtcatgttgaacaacattttagcatggtaagttcccttagctatatgaattttggcatgtttcagagagatcagtaaataaaatattagataaaatataaaaaaaaaaaaaaaaagagaaagaatggcattgcagaagccaagtaggaaaatgtcagaggggaaggtcagctcttgctgtcattagccctgacttcagccttccttcctgatcacttcctgggcattgctgatcacactgtcctccccaagtaggttatctacagttgccctaatctatggttctgctatcccaaccacttagcacccacctgcaggaagtgcttttagaaaaaggcttcttaaattggagagtaagagaaaaagaatcaaaataaagaaaaacctgtaaagctacctctataaagttatttgatgtacccaagcattttagaataaggattactattcttcagcagtaataagcatatctgaagtaatcaaaatggtgactcacaggttaactcccccagaaaggagagttagatgtgcacagaaatagctggagtaaaataactagctgttatgagagacagtgtcaactgggaagatatctgtcccaaaggattggtgatctaaaggaaggtcaagtagtagccttctgtcaaaataaggctggaaagagaagagggttgcatgaaatcagagttaaagagaaagacataactgaaactgaagttttagctgaggcgatcgatatgggtagaatgggtaaagtgattatatccacatagttaccaacattccaagacacagacttctgtgtcaatgtctgtatcaacatgattccctagtcattaagatgtctgaaaccagtctggtgactgatagtagaggtatgattttacagtcacactgtaaggactacaatatgtgagtgaatgtaatctgctatgctgagacagtagattaatagtctgagattttaatgtttgaagccacatcttgggcacttaaaggaaattatttggaggcagtcaataggtagctatgtttaaaaaaaaaaaaaaaagttgcttggagtttggcgaaatctttagattgaagatacttcctggctgggcactgtggctcacacctgtaatcccagcactttgggagacagaggtgggtggatcacctgaggtcaggaattcgagaccaccatagccaacatggtgaaaccctgtttctactaaaaatataaaaattagccaggcgtggtggtacatacctgtaatcccagctactcgggaggctgaagcaggaggcaggagaattgcttgaacctgggaggtggaggttgaagtgagccaagatcgcaccactgcactccagcctgggcgacaagagtgaaactctgtgcctcacccccacaacccccaaaaaaccatacttcccaaactgaggagtaatccttgataaaatctctattgttatggtctcaagaatagttcaaagtacttctgttaagcaccaatttctggaagaaaaaatgctctgcagggtatattctgatcatgttctcactggccaggtagaacatgaataggcatatcatcagagtcaatgtaaatctccatattctaaggatctctttatgaggaaccagaagcctaaataaagttggtagtcatggctgctcaggacacactgtagtttattttgtaattatggaacagcactcaacttcaaacactgttctacttgtgaaaattctgatgaaaccatacacagagtatgaatctactatatagtacttacagtgaagcaaagcaggcctatctgtaaagtatacttgttgaccacattaaccatgtgtcagttaatggcaggtattgtgtcctgttcatttcagtttactcagggacaaggtcagtgtctggcatatagcaggacttgacaaacatttgtttaatgcatgtctaatactctgctggaataggaaaggatcctcacaaagaatatggtgttaatgatttgtgaaaacagagaaaagcagcctcttgtcaaatttattacttatctagatgccatcagtttcagcaactccaggtactgcttgctaactatgactattgttaataatatcacattttgctgctacactggaaacatgctttcatctgaatggtttcccaaaagctgtgaggcagtcaagttcctacagagaaaccaacttagactcttaggaagtttaactaaatgctatccccctcctgtctttcatagtccaaaggtgggattaatcactgataacacaattggtcccatatgagatggtgatgtcttgcaatatctaaaggtaggctatcacacagggttttgtccaaaggcaaagttctggaaaaatgtcaacaaatgccacaaaacaaagctcctgtagtctgggagattggaaggtataatcaaacagccttcagctttcaagcaacctttagccaggactctcagtgacacattttttctgaggaatgtcattttaaacttctcatttactattttgtgttacaaggtttccctctgttgcccagcctagagtgcaatggcgcaatctcggctcactgcagccttggctcaagtaatcctctaaccttagcctcccaagtagctaggactacaggcctgcaccaccatgcctggctactttttctatttttttgtagagatggggtttcgccatgttgcccaggctgctcttgaactcttaagctcaagtgatactcctgtctttgcctcccagagtgtcagttctgtgccaccatgcccggctcatttttctattttcttgtagagatgaggtgtcaccattgttgcccaggctggtcttgaactcttgagttcaggtgatactcctgcctttgcctcccagagtgctgggattatagcctgtggcactgtgcccgggcctcatttactattaactttagtttgctaagatccagaaaattatttcccacatatacttcttaagaacgaagaatacaagggagaggactttgcccatctcaacttgggatagacatactgtctggccagattagtagaaacttggaaaagaacgccatggcctctacggtgatgaaattttgaccatctgaatgggggtacactgaaaggagtactccaaactcttgttattgaagtcaactgtctacctccaaatccagcaagcgctgagggcaaaggtatagctcaaagtcttgataatacattgggagatttgataagtcaagaaagatgatgaattcctaaatagactgatctttatttgacactagggtttcctgctgatgtatgatttatctcccatagcaaaaaccaatcctgaaaacaacaatctataactgtagttctaggtgaagagtgttggataaattttgtgcatctcttgtaactatgatgttggcctacagccaaagaagaaaatgttactgagaggttattggaggtctccaatggttatcattttgggaaaagatatgaatggcaatcacaaaagctagtatatctttggtagctgagcagctaaagccttcaattggaggaatcatcccactttcttgtactagtgagattataacctgttggtcgaactaggctgaaatcctctctacaacatctctgaaaaatgccaatccagccactgcttggatacttccagacagttcgatcgctgaatattgttaaaggttgtctgaccccttgtaaccttccacctgctggccttagttttgactcccaaagccacacaagtaatatccactcactctttgtgattcttccacatatgtgaagacgataacatggtatagtcttctttcatctctagaataagcagcactaattttcgtatctatgcttgtgcaataaattctggatgctctgattccactttcctcctctgaataaaaaaatcccctcttatatttgattcacacaattgaatataataatccaagtccggtctaactggtcctatgtatgtggttcagtagcatactcatactaacagtaacataacatactataaatataaaataagtgttaccttgtttagctaggactctacaatgcaagctcctacccctactccaagagttctaagattgtaaggaatgccacatatttctttcatttctatgatgggcatcaagataactttctccccaagtttgtgtcacctcttctttactttttagaaataagttcacagaagcagagtcttctttactgaaatttgctgttttctagggcattaactgtcaagaatttcagatacttttgcttttagtaaaattagagcaacagccaccctaccaccaacttgcctctacaaattctgttgtgttggaaaaaaatcattcctggccgggcgcagtggctcacgcctgtaatcccagcactttgggaggccgaggcaggcggatcacgagatcaggagtttgagaccagcctgaccaacatgttgaaaccctgtctctactaaaaatacaaaaatttgccgggcgtggcagtgcgcacctgtaatcccagctacttaggaggctgagacaggagaatcggtcgaacccggaaggtgggggttgcagtgagctgagatcgtgacgctgcactccagcctgggagacagaactagactccatctcaaaaaaaaaaaagaaaaattcctgtcttgtgtatatctgtgtatggtcgggggcagtggcaggcggactgaaaaggaaacaatttacagagtcatttttctcctaaggaattacttcttaaataatatttatctagaagaaaagtatgcaatctagttcagtaataaaaaaacacctagtagaaggaaaattcctgtttatgttgactatcttcttcattaacagaatttaactctcttggtgctagcaacggattattcttttaattgaactaacttttggggatgaaattaaagcaaatgttttctaaactaattttcattttctgtggtctgcacgaatctctcagtcctaatattacttgggaatcaaaacaaaaagacaaaaacatgcctcccccagtaaaatctccaaactttaatcagctaaaaaaattttaaaataatgatgtcccccatcacctccaatagctcactctatgactgaagtacaaacacaagaaactgcttgatcaggcagttacataataccaccacctgtgttgaacttccaacagtatgcttgcaggcacattaacatgactgataactcactacctacaacagattataaagtatattctccatatattaagtgaaaaggtagctggatgcacttaaaaagcttctctctgatgaacctaaaattcagattaaatttacaaacccaatttttaaaaaagtttcttatatgattgaagtgcaggacttcaaaagctctggttgaatgaagaacccccacttcataatttttattactccctttttatacctttaactcttaatctgataacctatacctgataatttgggtaagttgtgaggggtgggttggtttccaaaatattaagtcttccaaacttgaacaaaatgaaacctatgtaaaaaatatgctttgaaacgttgggacagaactgaaggtgggaaggcagagaaggaacaaggtcactgaggatctaataacataatcttacacctctaaatattactattttcagatatgaactcactaatacaccaaattcttgaaaggtagcaactaagatctttcttggttatttttatcccacagatcaagtgaacagaatctaagtaaccctaccctttggcttatgtatcagttgatcgtgacagtttgccaaatgagttgtttaaatgttgactacatggtcaaacaggacaacctaaattagctgaagaacggcagcacttaccaccgaaatttcgggcaaaaaggctaactaggtgtgtttgacttaagtattcttccttctctttccattgcccacaaaccgtttctagttctcccacctaggttccctaaactttcttctttttaaaagactccccaatggaaatccaacaaaggtgcaattgatcaaaaaagcatacctcctggtagtat

SEQ ID NO: 96567 - DNA, 17123 bp, Homo sapiens
cgggaggctgaggcaggagaatggtgtgaacccaggaggcggagcttgcagtgagccgagatcacaccactgcactccaacctgggcaatagagcaagactccgtctcaaaaaaaaaaaaaaaaaaaagttagtgccagaaatcggtgatattgtggggcttggagggttatttttatttaggttgggttttgttttgttttttaatgaaactttcctttatgttcctgttgctaggaagcacagttctaatttgtggtcaattatagtatcttatcctaggtctttaaaagttatcttttttcattctaactgatatctattgttttttatctctatttcaagttggagtgttttttgttataaaacagtttagcagttccttataaaaatagaaacagacttagcatatgacccaacagtttcactcttgggcatttatcccagagaaatgaaaattttgttcactcataaatctgatatgaatgttcatagcagctttatttatagtaactaagaacaagaaacagcccaaatatgttatttatataataaatattttatgttatcagctgaatgtctttaggagtaagttatattttgattgtttcttctgacatgaagtcagtacaataaaccagcatgtcatcagccacatttgtaagattacttctttaatgcatcaaattacagtaaaagtgacctggttatgacacattcctttaaatgaaaagatgccgggaaatgtgttcaccagtttttactaaaaatttattaacaccaaaacaagtttggaatttttaaagcttatagttacagtctgatagctgatagtgatacaggagatagagattatttaggcagatagtgagggcaaaagagtccttggaagacccctctctgtagcagagaactattctttcacctgttaaatttctgatcttaacctcactctttgtgtgtctgcatccttgatctctgtggccgtcagacagcaaacctcaggtgtcaccccagacaacgaggctgcttcagtgggagggtgttttgggctcacaagtagataaaaaggagaaatgaaaatgaggcacaacccaatttaggagacatcacaccaaagtcatcttgtgtcctgctgaattgggtaaagggagatattgctaatacaatagcatttatcttttatttattgttaaaatactggtaatttatagcatatttcccctgccacacatgggtctgggaaaaagtcaaggcttcttaatgatcaataccctcaaaatggtgtacagataaagaattatgattatgccaacaatgaacctgtccaaaggcatagggattttgatgaataccagtgtagtgatagcatagcagaaaagagacacttgagagactgggattttgctagcaagggactaggatcaagatgttcatttttttttttttttttgctaatcatcagtgttacaatgtctcccaagaggagatggagatcattaactgggtgcctagaacaaaaccaagaccatttaatgatcaccagcctcacagtgacctccatgaaccagaccctggagatgattttgattttgttagcaaagcttgtagacaaaagatgcatactgttcataaccaggcctatagtaactttcaggaacacttccaatgaaagattttggttttgttaacagaggctggagataaaaacaactcttccatatagctgtgagtactcaacctcatggggattttcagaaccagttacctggacaaggttttcattacttcagttgaagtggtttgtaaaggtaaagacctttccaccaacactattcttatgatgaaatgaatttggaagatttagaatgtactgatgaagtatcagatcatacactgggacctttatatgatcattccaacagtgatttttcagagaaaatgcccttgaaaaaatgtgttaatagaggttgtggacaaagattgccactttctcaaaaatttcaaaaacaaatggagttaagaaattttgttttcaacaatggaactggaccaaggcaaatattttactattaccacccacctagtgagccacaagaataaatgccatcagaagacttggactttgaccaagaaacattctttttttttttttttttttttttgagacagagtctcgttcttttgcccaggccagactgcagtggcgctatctcggctcactgcaaactccacttcccgggttcacgccattctcctgcctcagcctcctgagtagctgggactacaggcacccgccaccacgcccggctaattttttgtatttttagtagagactgggtttcaccatgttagccaggatggtctcggatctcctgatctcgtgatccgcccacctcggcctcccaaagtgctgggattacaggcgtgagccaccacgcccagccccaagaaacattcttacaaagaccaagatcttttcaggaccacccacttcctgttaacataaatcctgattggtatttaaacaagtcagtcattttgttctctacactaaggaatggtattttatttcaatgaaacactcaaacttctttcaaattagggcatttgtataaacattcaaaagtggtataaaattatcactcaatatttgttgcgctatagattcaatttacaaccgaggttatttctgattgctatgaattgaaaataccccattaagttatttcttaggattgaagtaaatataacttacatttaaatagtttaattcttgaccataaagaatatcagaaacaggccaggcgcagtggctcacatctgtaatcccagcactttggaaggccaaggcgggtggatcacctgaggtcagaagtttgagaccagcctggccaacaatgcaaaactctgtctctactaaaaatacaaaagttagctgggcgtggtggcaggcgcccgtaatcccagctacttgggaggctgaggcaggagagtcacttgaacccgggaggcagaagttgcagtgagccaagattgcgccactgcactccggcctgggtaacagagtgagagactccatctcaaaaaaaaaaaaaaaaaaaaaaaatcagaaacataaatgtaaaggccatgatttttagacaagggtcttaaaaatattccttatagatgtgctacaaaaaatatttttgacatacacaacccagtagtcctttcttctatcattcagtagtttttaaatctgtatcactgaggtgagagcattagcagatcactgccctcagaaattgaagtgcaaggcaaggagaaaagtaaagcatggcaccctaaagggaaagaacaagagaaggaaggatataaaaaggtatagaaatcaaaagaaaagtcaggaaaagagaagtgctggaatagaaaaactggaatagaaaataaggccacagaagagagaaaaggttgaagggacacaaagaggtgtatagagaaagtcattatgtgcctttccccgatttacaatatattttctccagttatctatgacattattctgtatatacctggttagatgttaactcctgcctgaacctagtgtgggttattttggtatttctttagagactactcagtttttctctcataacttttctactaatatctcatctatcttcctcaccttcttcacttgacaggaatcttggtaccaataattgcagaggtagaagtcagaggtaaatattgatttagctatgggataatctttctcaaccctatccctaatcactcccattgatatgtaaacatgttagaaaataagtgtttcatgaattcacacatattcagggtttagatacaacctctacagaggttggccaggacctcttgaaatgactgtcacttctccttcatggcttggggttgcaaaactgatcagtttatctgtacctaggtttccagtagctagcagttggtaccagttaaaccagaaattgtttcatttcccttatgataatatagctctattccataattataattctacaccctaactccaacccactgtcttccattgtacaagataaaagacaatgctggtcaataaaaattccttgcttctcttaggaaaacctctctattactgatggtgggttgggttaggaattttatagtattccaaagagagcatataaaaaggccttttctcaaaagccttcctttttcttccctcttgtcactcagtaccagatatggggtcggggttacaagtacactatatgaaagaatgagtttcaatataaatggatattccatgttgaactaagctactctattaaaatcagattcaagtttttgtttcaaattaccaagtttttcatacttccctaatttcttcatctactacagacaggattaaaatgactcaaaggtattccaatcaagtggagaaacctaaaggaaaaatttagttatcctaaaaagccttggcctaagaaaaaataaggcagatgacagccagacaggattcctcctaccctcttccttttaactgacccactactgacagatccatacaatacagcatgttataaatttgggttaagaagggattgcagttggaaaaaaatagagttctctataaacactatgaaacagttacatttaaaacatactagaattgtcccacaaatgtatatttcagaagaagtttattaagaggttttaggctttaagcatatgtgaaaagcaaaaattacattttaaagtatataatttgcattttccaccttctcaatgccaatgaaatattctaggagactctataagataaccaattgattttctactactcccaaattttaactttgtaatttaaagaggaataggcaaatagagctgctgtggttctggttctccctgcaggatgaagggggcctgcaaaatgtctcctacttccattctagtcattcagcaaggtgccttcctctggatgcactgtctgtatacttttgccatgttgcatcacataatgattctgcccaccttcaccatttgactgtcagtaaaagaatgtatgtgctcatttcttcttttattatagcgcagtgctcttcatgaagtctgaatcttgtttcatttgtgattgtaattagcacttgcttcttcaagactggctaaatgatgataatcagtgaagttctgtgatgggcacatggatgtgtattatatttttctactttggttaatatttgaatattccaataagttttaaaataacttgtttgtttctgttattagaatggcctgtccagaagacagccaaatacatccttcaaacagacttcactgcaggagacagagtggattcatcctgtattctccatgtagacttccatcttcatgagtactccaagaagatggttcagttgactattgcaaaggtaaaaatccaagagatacagatacagaataggacagagagacatatttttaagctattgattacaattatggtatgcctatagattgcagaaccgaggagaaagggaacattatgatttaccatcaagaaaaacttagaattggtgctgagtagttcattctaagaattaccatttatctgtatttgcccccattttcattgttactaggccaaaagtcatttcataattaataagttggatgtcaaaatcaacttgtgttattataaaattagcaatctacattatgtgtttctttacatttttataggagtatttataaatatacctaagaaaactgacaatgtggagtacaaatgttgcattttcaaaactgggaatctgtttattgaggctctatttttagttatgtatgataatagactgcatttcaggtttcaaaccttgtaaaaataatttccttatgatatgtttactcattttgcaaataattattgtgtcatatagcaagagattgtacttccattcagctggttaaagtacaaaatcattgatatggtttggctgtgtccccacccaaatctcaacttgaattgtaccttccagaattcccacaggacccagggggaggtaattgaatcaagggggctggtctttcccatgctattcttgtgatagtgaataagtctcacgagatctgatggttttatcaggggtttctgcttttgctgcttcttcatttttctcttgctgctgccrtgtaagaaatgcctttcacctcctgccatgattctgaggcctccccagccaggtggaactataagtccaattaaacctctttttgttcccagtctcaggtatgtctttatcagcagcatgaaaatggactaatagtaccagtagagtggggcattgctgaaaagatacccgaaaatgtggaagcaactttggaactgggtgttgaaataatctggagggctcagaagaagataggaaaatgtaggaaagtttggaacctcctagagactgtgaatggcattgacaaaaatactgatagtgatatgaacaataaggtccaggctgaggtggtctcagatggagatgaagaccttgttgggaactgaagtaaaggtgacccttgttatgttttagcaaggagactggcagcatttcacccttgccctagagatttgtggaacttagagcttgagagagatgacttagggtatctggtggaataaatttctaagcagcaaagcattcaaaaggtgacttgggtgctgttaaaaacattctgttttaaaagggaaacaagagcataaatgtggaaaatctgcagcctgatgatgcagtagaaaagaaaaacccattttttttaaggagaaattcaagctggctgcagaaatttgcataagcagcaaggagcctaatgttaatccccaagaccatggggaaaatgtctccaggtcatgtcagagaccttcatggcagcccctcccatcacaggcccagaggcccaggaggaaaaagtggttttgtgggctgggcccagggtctctgtgctgtgtgcagcctagggacttggtgccctgtgtcccagctgctccagccatggctgaaaggagccaacatagagcttgggctgtggcttcagagggtagaggccccaagcattggcagcttccatgtgatgttgagcctgtgggtgcagagatgtcaagaattgagatttgggaacctctgcctagatttcagaatatatatggaaacacctggatgtccaggcaaaagtttgctgcaggggcagagccctcatggggaacctctcctagggcagtgtggaagggaaatgtggggcagagcccccacacagagtccctgttggggcactgcctagtggagctgtgagaagaaggccacagtcccagaacggtagaccccagaatggtagaccccagaatggtagatcaaccaccaacttgcatcttgtgcctggaaaagctacagacactcaacatcagcctgagaaagcagccaggagggaggctgtactctgcaaagccacaggggcggagctgcacaagaccatgggaacctatctcttgcatcagcatgacctgaatgtgagacatggagtcaaaggagatcattatggagctttaaaatttgactgccccactggatttcagacttgcatggaccctgtaacccctttgttttggccaatttctctcatttggaacagctgtatttacccaatacctgtaccccccattgtatctaggaggtaactagcttgcttttacaggcttgtaagtggaagggacttgccttgtctcagatgagactttggactgtggacttttgggttaatgctgaaatgagttaagactttggggaactgttgggaaggaatgattggttttgaaatgtgaggattatgaaatttggaggagcccagggaggaatgatatggtttggctgtgtccccacccaaatctcaacttgaattgtatctcccagaattcccacatgttgtgggagggacgcagtgggaggtaattgaatcatggaggccagtcttttctgtgctattctcgtgataataagtcccacaagatctggtgggtttatgaagagtttctgcttttgcttcttcctcattttgctcttgatgccaccacgtaagaagtaccttttgcctcccacctgattttgaggcctccccagccatgtggaactgtaagtccaattaaaccctttttgtttccagtctcagatatgtctttatcagcagcatggaarcgaactaatacaatcatagtttttaaaaaccaatctaaatgtaactattgaacatgattagctgtttcatccctagtagagtgacagaaggaaacatccatagacaggagtaataagaaaccagctaaacttctaaaccatttttaaaggatgcgtgtgagctggcataacctacctactctttcctatgggcctctactgagagcatggaggtaatacatctaatacactgaagaccagggcaagagagctggaagaaatccctcttaagcactccaggccttcactgagtatgaggtgctggtctccaaaggcagagggcaaggcaaggcagagagggatctcctggggcacagacaactgacaaaagaaacacttggattgttgtataagaggagtgagctttgtaaataccacgttagctggcctgctgtggaacagaatgcctrtgaatgacagtagtcaggtagtggatgaacactgatctgagagcctgtaaaagaaactctttggaatgataatgtcatctagacctttgatacgcaaagtgtgattcctggacagatgtattggctttacctggcagcttgttggaaatgtaaaacctcaggcctcaccccagacctactgaattatttatattaattaaaattaaataatttttatttcaacaaaatccctgggtaatttgtatgtacattaaattttgagatgcatgatcttttaaggttcattctaatccttaaaattctgttttaataatgtgtacaatgaagtgctgcatggcaaactacacagaaactaaaggcatgttccaaaaaggaaaagttccatgtggctaggggaataaaagcttcatcagggaaccaggagttgggctggttcttaaaacctggagaaagaagatggttacatcaagagataaatagagtgaagcagaactagtggtgcggaccagctcgccagcaacagaagggtttgtagtcggcctggcagtggacagggaggttggctagaactattaccttaggtccgtgataatatccctgaatccaacttttcagaaagaaataggtaacatatttttcaccaggaagcttcacccagacactgaacagaatggtctcagtgcactaatggaggctcagttaaagggttgtggtagcacaaggaagagacattctgacttggaaatttggagaaggcttcacaaatgaaggggcatttgaaatgagctttgaaggtgcaagagtattccaagttgagaagacaacctgagtggtgttgggtgaacagtcattctacctggctgtagtgtagtatagtgtagtgtagtgtaggaaacatcagaggagtggagtgggatatgagcctggagagagctggcrgccatggatcattgaaagccttgaatgtctgatggggaggttgactttattttgtaggcaatggaaagccaccagtggttttagttgagcagcaatgaaattaagcctgtgctttgcaaagattaatctagcagcaacagattggaagcaacaccaccattcctggtatcagtccaggtaaaatatattacagctctttactggagcaataacagtaatattagaaggagaaataaaaaagaaaaatattgcacaggcagaatggggaggtcccagtgatggagctgatcttggttcattgaggcaggggtggcattaatcatgtaaaacacaggaggaggaactgggttaggagtaatggtagagttcagtttaggtaattgcaaatacacactattccctgactagctcccaagactttttcttccctctcttcttagaacttcattagaagaggtgatgttatttcttagatgagagtatcttacttaccattgactaatacatgttctctgatgaactttgctattcaacatacatgcaaaggggttataaaaacaagtcaactctagtgctgatgagggtgatcwtcatcactgatcatggtgtcagttgattatagtgtcaatttataacttaatttatgtaaaatagagcaatgcaaaagacatagcaatcttcacttcaaatgaagagtcttgaatgccacttttctaaagagaaggctcatggaggcacctcctcactattgaaaaatccattatacctgtgataaaactgattgtgttcagttgtattagatttgtatgcaaataaaaagttgggtaattagctatacattgtcctaaacgtataaaataagaaaaatacatagatgtatggtttcctaggacatctaccagtttagaakgcgaggctaatgtgggagctgccacagcatcctgattaaggctatggaaagaagttgcagactgatgatgtcttagaagtaatgacattttttaaagataatatttctttggtgagataarcagattatattttacagtaaacacattttatatttcagttaataagacattgtatattaaataatcgcatttaatgctttacttttttcctgtgttaaaattaatcactcatggccttggccatatgactttgccattcctcccactgtttatctgacttgtttatattttattgagcttgctcatatgacttacaatagcctgtgacagaagtgacaggagaccccatcctgaccaagaccttaagaggcatcctagtttcctctcactttcacgagcctctgcggggttcatcatgagaacatatccctagaaaccactggacaaggagaacaagaggtatatggaataggtctgatccacccttaccacctgaagtagagctgcccagctggcttgcagactcacaaacatgaaaatcaatgtttactgcagcaattcatgaaactttgaggctgttataaaaagtaaaggacctaatacaaatggaaagaaacatggttagtaagcaaagctagttatgagcaactgtcatgttctaacagttggaatttgaatcagagcaactattggtatttgaatcagagaggggccagaccagtttgggtgaaactcagttcatcttttaaactgacaataaagggaatatattttcatagtaattttatcattatgtggcaaactttgttctgtgagctattaaaatattcatcttggccaggtgcagtggcttacgcctgtaatctcaacactttgggaggccaaggcaggaggattgcttgagggcaggagttcgagaccagcctggacaacataggaaaaccctgtctctacagaaaaaaaaatagctagacatggtggtgcacacctgtagtcctagctacttaggtgcacacctgtagccttgcttgagcttgggaggtcgaggctgcagtgagccatgatcatgccactgcattccagcctgggcaacagagcaagactagctccaaaaaaaaaatcatctttattttaatattcaaatttacattttgagtatggaatgtaagcatcaagaattaatctttaaatccagatgaaactttcccaaggtctcttgtcatgcatcttggactgaataacaggcatccctgccttcacatcttcatgggaaggcaacaaaacctgaggaatacaacctaggatctcaaaagcttttttaggaataatgtcatatataataaataatagcaagaatgttacagcatctatagctctttaaactacctcccaagggaaagacaatgagggcttagttcctgtgtcttttaaactttaactttacgtgtatttttttggacatgtgctgtccagtatggtagctacaagccacatgtgaggtgaacacacagctagtcctaattaagatgtgctgtaaatgtaatagacacaaaatattttgaaaatttagtatgagaaaaatattaacaatttttatattgattccttgatagtattttggatttagttgctttctgaaaactctcctgtgttacccagtttgagtgtaccataccatccatctcttgcagggaccttgactgatacaacattaaaatgaagtgtaattttaaaaaattttatttacatatttcttattaagaattggatgaattgaaacttctttattttctttctctttcttgtcacacagaaagcctgattaagtagcattattcttttgtctacagaagtaaccacttctggccaggcatggtggctcactcctgtaatcccagcactttgggagcccgaggcaataggatcacctgagattgggagttggagaccagcctggccaacatggtgaaaccctgtctttactaaaaatacaaaaattagccgggtgtggtggtgggcacctgcaatcccagctactcgggaggctgaggcaggagaattgcttgaacccaggaggcggaggttgcagtgagccgagatagcaccactgcactccagcctgggcaatggagtgagactctctctcaaaaaaaaaaaaaaaaaaaaaaaaaagtaatgacttctgctgatcttttttctcccctataggttcatagaaaaaaaactcccaccttataaaggaatctttaaaaggttcctcataaaggaacagggttagcagaaccaagttttgagtcctgggtgaaaatccaggggagaatggtaatcagtgataaccaatggccaatccaatattaaaattagttaacagtgaccaatcttatttcacctaccccacccagagtggcccaaagcagattgctggatctgcctctaaaccaaccttcctgccaaaataattggggttaggttgtgtctgctgattgtctccataatttgagattttaacaagttgagtttggctcccaaataccttaaaggattttttttttggcatctctggggagggggagattggacgtaggcaaccaaacaggaatggaataagaaaagatttgtgttctctgaaggagacttgtgaagtctaattccaacttgctgagggaaagtgtttagaaaagaaaaagcaataggcttcaaccagaagacatgagttggagtatctgctctgccatgtagtagtttgtgtgatcctcatttgtaaaatggaaatactatttacacccttatgggttgttgtgagggtcagaatagattgtgtgcatgacagtgctttgtatacgcagacagaaggaaaaaagcggctgttattggctcaacttatttgacctttattttcatcatcatcggccactatttgatgtcaatctactatgctgtgagcaaacattaaaattaggaagccaggggtatgggaaccactgattagcatcatatgccagatgtgcttccatccaaagcacatgaacagaatgatattaaattacaagcctatcaggaacagaccagctttctgcctccctttctatgaataccaagtcccatgaaccttgtattcatgtggagttttaagtgcatgcttggaagttatgaggagacagcctggtatgttcgggaaagaaaataaaggttaggtacatggtaggctttggctcagccatttgggcaaatgacttaacctctctgaacctcagtttctgtttctatgaagtgggaattgtaatacctaccttcttcagattgttgtgaggattaaatgagaagatgaatgtaatacccttgagcacacagcgtggtacaccacaaatgctcaaccaacagcagcgatgacagtataggcaactaccacaagaaagaatttgaacatgtcccaattcgaattttgattcctaatcaagatctagtgaatttaacctaagtagcagaaaagaagattaagagttcctttccacagctttattaagtttttatattcacctggatgttgtcaaaagtgacttgatcattcaagagataggggacatttggcttccggtttgtgtgagagcttttctttccccatcagctcaacagtcagtccccagatctagagatggagagcttgggacaaggtcagaatgaaacatcaccagtcaatcctgctcaacaggtaactcttgcagcaatccttaaggaaaggggtgcagggtctcttcatgtttccatggtaaggtctatagctgctgcttcatggaataagcaaacaaagcccatgttgtgtgacgggtggcaacactttcagacttggatcctgcacattctgatgtgtaaattccacgatagggcaaaagcatgccactccacactaatgctgccctctcactaaattaaaccttggaaaaataagatgtggcttggctttaaaactcagtgaactatctttatggtacagttggtttccatagctgtaaacacaaaagatctatggtttctgcctacccaggatagtcttgtctctagacaatgtattgatgatgcaaatgttctggaactaaatagtggtgatggtggcacaacactgtgaatgtactaaatgtcactgatttgtacgtatttaatatgaattaaatgttaaaatggtgaattatatttatgtatattttaccataataaaaatatgcattggaagatgcattttttgtgaccctgagttgtaactgtatttttatttgtgacatgtatataccacctacctcatagtaagccctgatgtttgaatgcatatatttacatctgctttttgcaaatctcaggtctgagtgttccactctgtagcatttgggtatcacctaggaatatgtgatttattgacatacctgctttgggtgggattgagaactgtattgactgcatgagcacatatatttccttataaaactctttggctttagcacatatttgcctactgtagaaaattctcctacccacagagcaggctgggaatggaatgtgtgtctgccttctccaaaggcatcatatggctttcttaatggatggcaaacaggagagagaaaggggttcttaaagagtacaactgaaccagttcctgagattcttctttcagccagctcagcctcctatcacaggactcaagactctcagttcttctagacaaagtcaatattgttcttttataaagcaaagattatgaaaggtgtcaggtctttaaaacctatacaagcacaaagtacaaaggagaaaggtgtagctgggaaaaactcatgaaagagacagtatctgccgaagtccttgaggcaaaggatattgaatacctccaaaagaaaggcttcagtaaaagccaaggaagcttcacactcgtcaagactggccctggcagacagggaaggatggccttgaacactgcgatggaggaaaatgctccctggacgatttttttcctcactccagccagcatatttcagctgcttttgctataccatatctttccagaaatatgaaggcttgtgaaagataagcaagcctatgatggccactgtgaaaaggaccagggagaatagaaccatgaggaagacataggtggagtgggagagaggtgtggacaatggttgctcagctgggatcatgttggtcaggttcagcatgtagcccaaagtccagccggcgtcgctgccctggatctgcaaacagtggggaaagtctgtttgtggttggaggagttagaagagttatcacctagggcttagaattattggatcatgcattggaagagttcaaacaatataaatcactggctgggcacagtggctcatgcctgtaatctcagcactttgggaggccaaggagggaggatcacttgaggccaggagtttgagactagcctgggcaacatagtgagaccctgtctctctaaaaaataaaattagctgggcacggtggaacatgtctgtagtctcagctatttgggagcctgggtggggaggatcatttaatcccaggagtttgaggcttcagtgagctgtgatcataccactgcactccagcctgggtgacagcgtgagaccatgtctcttaaaaaaaaagtatatacacacacatacatcatgactacctcgtgtgtcagtcctaaatttgacataggtataatctttcaaacaaaataaactgctggaattaaaggaagtctggaatattataacaaggaaaagatttaagtttgaattagcaagatcagcactgacaagagtgtaaggacactgttatcctcaggcctgctacagccctctgtctcaatgctttgttttgcttgaaatcaccatatttaatacagggggtaaaatgttttccccactagtgagcatgggcttaaaaaggtagagacacactgctctgggtatttttggtcaagcatgagtcgctcagctgggttctctattcctggatacctgcaggtggtgctatggtaaagcacagcattgaggttgcttcttccggactcaggctaagcctggcttctaaacaacggtctcatcattcacagccactcagtccccttcttcacacagagctttcagattggtcaaccttgaagtaataaccaacaaggatgatgaaaccatgatcatactttcccagcttatggaaggggcctttcagagggctgctgaagtcagcacacagagtcactgtagctgctgaaatgctgttactttaatatatctcgttttgtgttttgttttgtaaggaattagtcactgttatgtgggaaggtgcaactgaaaatgcaagtagctgtccttagcgaggatgctcacagtgggccaacagacccaggagggcttgacacagaatgccagggtttgaagcagaatggcagaacaggacatcaagccaaagctacaccatgctgactcccccctttttcaagccccaaactgcttcagtcactaccaccgaaccccaacctccccccagcccaacaggcccccaaattaccttgccaatgaaatggatgtgctcccaggaatc

SEQ ID NO: 96568 - DNA, 27802 bp, Homo sapiens
catatcactcatgaattgctcagctgatttaaataatttgtaaaatcctgctaactagcaaattcacattgagattttctattgattgggtccctttgatagctttcagattggtattgttagcgttccatttgtgaacaaatgttcccttggctttagcagatgtttttaaagtttcttttgtagaccgaacttctgaagagtaataccaaatgcctaaaattttatttttaaaaaggaaaattgtttaaagtattatatgtaaacatatgggtattttttattttgtgtaattttacatttcatgaaatgatgtcagtttcaaagagaaagtggagaggacctaacatatgtctctacctagaacggatggtttcattaaagaatgtggatttattgatgtgtcttgggtttgtattgctaattcagaccagatgggtccttttagtgctaattttctccaatatcacaagagcttgggagagagtactaaaagggggcccttctctacagccttccactctctggttagtatccaagtactccagaacagagttcactaatggacccagaaagtcatgagcaaagctaaagatggctttcaaatttgttccctttcttacaccaaaacaagctgaaaatcttacaacctaattgtgaagatgtctgctgccgaaaccatccagatgtggtagacatcttccatttgcccctcagctcccgtcgccaccctcctctatctggacatttgtctgaggactacatctgacacccgagactgaaggttatggctcccagtaggtgaacactactgggagtgttccaggcctccccactgggggccctggaagttcctccttccactttccacttcaggcttaggggtggtaatgacaccctgcttgtctaaccttggggtactgcacttccctcaagggaaacctttataggtagtcattttaataaacacttttcaaatgtagtaatgagtgtacattacttgtctcctgcagggaacctgactgatacagggttatttctaacacaaagacagggactccatctgataagggacaccctcttcaggttgattagatgaagaggctttggggtatgtttggagttttgtgggttatattacagaagggtaattatacaactgtgtttttagaagcactcagattgctctcagtgcaaaatcctttaacacatgcagttgttttgtgctatacatagtctcaagattttgacttttctgcccatttgcagtcaccaattacatagagttgatagataaataattgatagatgataaatagatgatataggtagataggtagatagatagatgatagaaaaagagagaaaaagaaagaaagagaaaaagagacaaagaaaaagaaagaatgaaagaagaaagaacaaaaaaggagaaagaaaggaagaaagaaagaaaggaaagaaagagaagaaagacagaaagaaagacagacagaaagaaagaaagcaggctatagatcttcagcaaggtttatcttctatagctaacggtgagtcccagtggtgcaaggctatgaatgctggtatatcagtcagcataggctagcttatgctgcaacaactatcccccaaatctcaggggctttatataagatttatttcttgtccacactacacattcatttctggtcatctggaaactcttccatatcatcctcagtcaggaccaggctgatgaagcagcagcatcagaacattgctgggttttataatacagggaaagaaagggtggcacatgacacactggctcttaaaactacctggaaatgatatattacttctactcatttcattgatcacagcaagtcacatggatgtccttaacttcatgacaagaacaaggcaaactagcaacattggtgggcagcagtaatgactctcacatgtgacatctgtagataggaaaatgactataattcttctgtttgttctaaaatttcactttatccctaccttattattaacattttagataaagatttctaaaaattagaacaaggccactgcaacaatgtttgtatacccacaaaattcatgtattgaaatcccagcccctcatgtaatagtattgagaggcgggggctttgggacgtaattaggttatcaggctccagagagatccctcagcctccacgtgaggacacagagagaggacagctgcctaggaaccaggaagcaggccctcaccagacactgaatctcctggcaccttgatcttggacttcccagcccccagaactgtgataaataactttctgttgcttataagccactcagtctgtggtgctctgttttagcgtcccaaatggactaagacagccacctgtcatttagaatggtccagttttataagctgaccggttgttgcagggaagaccatccatgtgattgggcttgtacaaatttaaatggtgacaaaatataaatgatccgagattctcagagttggtggccccaatctttcacccactaagggcattccatctatggtttctaaggagatgattctcaggcccgacttccaaagaaggagagcttactcacttcatccattccttctcctttaggtaacaatgccaaattcattttgcagaaccacctcttcttccattggagggaccctcactggggggactgttagccaggtggtacatcatccttggccatatgaaccaagccagaccaaccaaatcctcttcctgggactggagtcctgatcagagaggcaaaagggctgagatattttggagctcagtttccctggaaggacacctctgaaagaccgtctgggagttgctgctgctgaaggtttgggagcaacctcactctgtccttccagagcctggttctctagccctctgtcctttctgagagctccactatactcagtcagtaagttctccttttctgtattgtattgtattgtattgtattgtattgtattgtattgtattgtattgtattgtactgtactgtactgtactgtactgtactgtattgtattgtattgtattgtattgtattgtattgtattttgagatggagtcttgctctgtcgcccaggctggagtgcaatggcatgatcttggctcactgcaacctccgcctcccaggttcaagcgattctcctgcctcagcctcccgagtagctgggattacaggcatgtgccaccatgcccagataatttttgtatttttagtagagatggggtttcgccatgttggccaggctgttctcgaactcctgacctcaggtgatccacccgcctaggcctctcaaagtgttgggattacaggcgtgagccactgtgcccggccaaattttccttttcaaaaaattaagcagagtctggttttgatgcttgtgactgggcagtcatgactgatggacacttaggcaggggtaccaattgcctgaagatgtcaacaattcttctaaagagataatgtgtccatcagaaggcagagttatggatcagtggatgcacagcaaacaaaagtgccaaaaaggacctcagtggccctccccatccacaaacagccttgccagagagtgctggggccataaactggaattctatggtccaggttgattctacgccagtcaaggaaaattaaaagcatcatttgtacgagctgtgctgattcaagtagtctaattgcataaattgtatcatccctgctttgtagattaaaagactcagactggaagaagttatttcacttgcctaagaccatgcagcttccagtagggcagctgtggctctaaacagaggtctctctagaccatgttgtcaccagtaggttcagtttaggctgtcactgtggagtcttggaaactggaagcccacaaggcagaggcctcattggtcttgtttaggatagcatcagtgtcggccatgttgcaggtggctgattaccacagtctaagaactgattagaacagcagctgtcacccctgactgctcgttagcgtcccctggggatgcccctgcctcactctgatcaatcaagtcagagtctctgggggcaggttctaggcatcaagagtttttataaccagccccctaccactccctaggtaattcaggtatgcaaccaggatggaaaaaccacctgattaaaggcaatctggtctccactgtgccactaaactgctcttgtcaaggccaccagcaaccccgatactgggaatcagaaggctcttctgacctcttcggaggctacctctcagcagcagttgatacaattaaccaacatctactccccttcttgaatcaaatttctttcctgtgacccccgaacttatctgattttcctgcctcactcaactctccttgctagtgacaccccctcttccaggctgctaaatgtctgtgaacccctggcagctgtcctggccctctgccctgtctacctgctcatgcacaccgggggctttaaaaccatccacaggccggccactcccaaacggatgtcttcagccccagatcccctttatccagtcgcctacttggtacctacacttggacagcccctaggctactcaggtgtaagggcaatctgtttctccagtattacctgcctaagccaatagcatctccatttttgttagtcaagcctcaaacccaggagttggctttattcttctctttccctcacctcgcccttccccgccccatatttttttcatcatttaatcccagtggctccacctccacagtagagagcacaatcattcactgctgtcttcctacagcagccaccttcatcgctcacctggactccactagccagccacctgcttccactctcttcccctgtaatcttggctccacagagaagccctagcaatcctcgtcaccagcaattacatcatgcatctctcccactgaaaaacccttggaaaaggtttcatctaaggatgaaaatcttaccatgccctcccatgtcacatcaaaagggctcaaactcactccgtccttagccccttcccgggtgactccctggtttatgttgttccagccaaccggcctcctgcctgctctgggagtgcaccaagcttacagggcttagcatttgctgtggcttctgcctgggactctcctccctcaacccttcacatgtctgccctcttctcgtctttcacgcacagcttcagtgccatctcccagagtcatctaaacaacggcctcctctgtcacttgagtcgctctctccttacactcctatctgctcctctcacagtggttttcatttcaatggccaaattattggtttaattctgttgttttattagcaactcattcaccattttaaagaggcaaatccctaacagggaaattgtaagttataaagcagcccaagtccatggcttcctccaggtctagagagcttcccacccaaaatacaaaaacagagagggggtgaggctgaactcacaccaggcagctcattggccactgagtgcagcaccttgcagcagctggagcccccagcagtgtgactcctgcaacagaatgggcccccacccctcctccagacatcccgaatgtccatgctgttgtccatgtaacacaatgactccatcattatcagtaacatggttaatgtggactcccgtcagctggggatggagtggccagcctcagcctcatgtaacccattgtttccaaagggctgcaggctgcagaagcccccaagctctcaggccagctgtggcttctttgctgagatggaggtatagccaagaaagcagcctgaaaagtaagaaggacagaaaatcaaggcaaagagggtgggtgaaccaggccatacacgtcggccatgcagcagcagcccatctttcccgagggatggactgagggcttggctactcccctgaccataaatggcttggccagggttctcttggagccacctctcagcctgcctctgcagctttgtcagttaactgttcctacaaatgaaagacacaagccaataaagccagtgagaaaggagcttaccaaaggcagtgtacgaagaaggttcctgggagactgtcagaaatggtgagtgaaagctggcatctcttctcaatcgaactttcatttcttactataaaaaacctccaaattcaattaaatgtacaatgaagtaaagggactttattttaaattattttcctatatgcaaaataccaataattttttaaacttctcacctaatatttgctgatcttgtctttcattttggtattaaggtttgtttttaaamccccacatacaagagtacagagtagatgtttcacctatgttccctttctagttgaagcaatggatctaatcaacgattttatctgtcttacttgtttaatctggctttttgttccatcatcagcaacatggatggtcatcattgatcagaaattttccatctttcttgtttacttgtgataaatatttcgttgtgacccaatcaaatgaagtttgctaagttagaagagaaaacaagagggttctgtgatttactaaagaattatggaaacagcctaggtgtccatcagtggatgaatggataaagggactgtggtttatatgtatatatacaactgaatattagctttagaataggaggagaccctgccatttgccatgtttgtcctatttggacctggagaacattatgctaagtgaaataagccagacmcaaaaagaagaatattgtgtaatctcactttcttgtggaatttttttttttttttttttttttttttttttttttacaaaaagcattattaaaaggagtagagctcagtctgtggagttagggagatctgtgatctaacctgatctctaccacttaaaagctggtgagcaaaaacctatcttggtctcagtttccacaggtataatataggaataatagtgctcccttcatggggaggttgtgagtatggggtcttatacccagcacaccttcaatagcagtaagtttttatcctgtctcttcctccttcctctcacaaactgcaaacttataatgaaggacgttcagccactgagatcccaaaatgccttcagaatcattgtgtagatactgcatagtgctcagactagcagtaagcaataattgcattgtatccaattctagtactttgactatcactaactcatgcttgcaattccattccacaagaactttcctatccttagctctgtgctggccaggccataaagaatatgctaccacgtgatccctaaaacacagagggtgttttacagtttgggagaaaggagctgccacagatgacattacggtattcccttgtgaagtgggcaaggcaagttaatagtatcccattttgagaatgggaaaactgagccttggagaatagatttgttgtgagaaaatggagaccagagggtttgagtgacttatccaagactacacagctcctaagtggctaagtgtgggctcgaatttagatcaggtggctccaagctcagggttgcatcatcccactcagctgtgtctctgaagggcactgcatcagattcttctccaccctaatttgtgcgatgtttttctctccatgagagcactgtactgtgtttctacaaaatatgagtgtctttctgaaattggccaaaatctccgtcatccaaatgttgataaacaacacatgcaatggcccacttgttgctgcaccccctcttctactgtcctcccaaaggaagctttgtcttagggctgctgacatcagtcctcagtgcccactgatgagataaggctctgggcagctgcattcagtgcagcgaccatccagtgtccttgcagcacgtgttggtctggtgctagcgtgaagagcagtggttaggtcccttgagcaagaggaccctgacctaagaggcccagacgtccctgtgttccaccgtcatcccagaagcagaggtgcacagtgctgtcagcctgggtgctctgattcatccacagagactactggagttgcttggaagccttgcagagtggtggaaagaggttgtcaccgggacactcaggttctggtgacagctaagtagttgtttggacttgggaaacctgttcaaattcttgaggcttggttattctctataaaatgcgggtgtcctattgccaagagggggagaagtgagcagaggcaccactgaagcgtgctagttgagcagggccacgttgattgaaggacataatatttggggcaaaagctagggggacttacacattctaggtgcttaaaacacttctggttcacaaaagattttcttgttcattaacccatctgaattccaatccatcagtaagtcagctgaaataggtgttttgtcagtttgcttctgttgggatgagatcctctgttaccatctttcgggttggggttgagtcacatagactgcggcccattggctggtctatgtggctccaactgttctcatttgtccatgaggtgatttctgataagtccctgggtttcagtttcctctgctggaaaatgagggttttgagagagatgatctttcaggtaattcaggtgtgaaacatgattcttttggattctttaatgtttcacaactttcctattgttggataacatttaattttaaaacttaatraatgcattgtttctacaatgacagaatctggtcttgggatgctggaaagacgggaagctgtggtgtagaccaagcccagggaaatatctgggggtcagggagaccgaggctgaaggagggcccagccaggaggtattaatccagggtggctggacccaaggggctgagagtccagaaagtgggaacaagaccacttccacccagggaaagaggggaaaatagtttcactggctgagtcagaacaggtccacccatcattccaatctaggtagggaaaggacttggtaaggagcagcctggaaaggctagagtaacaggggctagggacagggaggagaaaggagccacctgaggccctgggcaggctacttggtgctccactgagcccacgmtctttaaatttggactccatatttgcgggagaggtgagaccatctactaagtgaggggaggaaagagaagggtttgctgttcccctgtcctcctggccacttcagctccagcaacctagaacctctgcctcagttgtagcaaaaacagaagccttgccttccccgggtaaggatcaggtgttcttgttagaccatgccctttgggggtcttaccttctactccaaggagaaaacacaaaatacttctaaattcaacagttttctgtctcaaaggagttctagagggaataaacataattttagccttttgctgaatttctagtcatgtgtttgctgcccttgtgaatgggacccctcagacaatagccttgcaggctgcctcttcatctgatcctggtcgaggacctggttgggggcggtggcaagactgacttgatgctgagggaggaactcatgacaggctccttgcctccccttccttcttttggggccaagactgtgcaggacgatgggggctggctgagtctataggatcaatgacctctyrgaatccaccagggtcagtgagtttgaggaagtgaggaaggagcttgctgaccatccctgggarctttaatgtttacttctatcttgcagagtttttcactgaacttcaccctgccggcgaacacagtaagtacagcagcccccattcaccaggcaacgcagagaagaccagtgcagaatttacagtaggtctccagaactcacataaacccctcacacacggtgataagttacacagactttcttttttttttttttttttttttttttttttttttttttttgagacaaggtcttgctctgtcacccaggctggagtgcagtggcatgatctcgactcactgcaacttccacctcctgggttcaagcgattctcctgcctcagcctcctgagtagctgggattacaggtgtgcaccaccatatccggctaatttttgcactttttagtagagacagggttttgccatgttggccaggctggtctcaaactcctgacctcaggtgatccgcccacctcagcctcccaaagtgctgggattataggtgtgagccaccgtgcccggccatttacataaactttcaaaacgcactgaggaatagttgagagatgctgagagaatttatttccattataaaacttataaatacacattttgaaaaggaaaataggaaaacaacaacaacaataaaacacctaaactctcatcagcagaaaactggtgtaacccttcctgtcctgtttggcgttacataaattttgacttttgttgcctttgtactattgttttcttactctacatataattttatatctaaatgttttccactagtctttataaccataactgttatatggttaatcacataatcatgtgatcatattatgatcgcataatattttttcaagttaattatttcttcagttgattaactatcattaggaataactttgtgatacatgacattttagagaatccttatctgcatttaagataatttccttgtatgtattctaaaatgggaatgattgggtcaacaagaatgaacattttatggctcttgattatggcatttagttgcaagtcaaaattgaggttttcaattgtcgatgttagagtttcaatccacagctgatcctccgtcttctgtttgcacattgcatatagataacactaagagccaaggttgttatctgatcagtagcactactatggttgagcaaggcatttttctggcccagttttttagtgggcttggctgtgccacatttttctgataagttgtctggttattcaaagagaataaactgaatcttactcgtaagaggactcctaagccagtgctcattttactgaaacatgrgggcatagttctagagagtagcataaagttagaacattgtgacttattgctggacctgtggtgcccaccactgtctgcccagacctctgtgaactgaatacattggcacctgctccagcctctggtggggggcacttctgaacctccccaacttgctctgcttccctgcttcagcttctgcctgttggtttcaggcaaattccctaattcttcctctttttcctgtcaaaaccttttccttcaatcactgctggaactttcccctggctgttggaacccagcaggtccatagacactccaggttctgtgttatcttggcccatcacatcaagagaatgcagagaagcaagaagccatttcttggggagtgggggtgaatggggtggaagagagcccttatgtggccagtcatcaccctttggagtactctcttggttaacagctcatttctctgagaactgtctcttcacccctttgatcccgtgtagagcaaccaaccattttgctttgcctggtgttgtctgtttttagcactgaaagtcctgggcagctctctggacaatgcggatggtaggtcatcctgcctggaagtcacatttctactgcataacccttccacttcagtgcagctgggtagcctgggaatgccagtgccctgggaagtgggacagaggtgggcacctggatccctctctgcgggaagtttggaacagggctccctgctggccagtccctgctgaggastgaaatgccaggttcagtctatttgtcagttcagtccatactgaactgtcaagtatgaaaaatgggactaagacactgcattaggccatggaggccatgtagcacagtggttaagagcatggatcccagagccagactgcccgggggggtgtcacctagggctgtgtgaccttacacaagttacttcacttctctgtgccttgctcctctcatctgtaaaatgagatcatcatagtcccattactattcactggcagttgtatagaataaataagtcaatatgggaaaaattcttgaacagcctggcacatcctaagtgctccatggcattagctggtacaattagcaggagtttatgagggcagaaaagtccatctggagagaaagagagaagcaaacatcagagaacagtacaggcagaaggccrtgctgctctggagcgaaggagaaaggagggtgccttcggttcacacaagttccccgttccaaggtccactccctggagaaaccagcttcccacctgtccttgggctccatgggacactcccatattcttagagttaacaccttcctttttttttttttttttttagtgaaagccaccctaagtgtatttctgtactctgaagacaggaagccttacctgaaacaatggctgattcttcctactacccttagagcaccttagggaaatgcaggattaaagtagtgtgggggtaggggttggggagattgtgattaggtcaaaggacaaccatttaagtaccaagtttcagtgcctggtcatcaaaaccttcttttgatgggagctctctgggaaagaggtctgggcttggaagtcaaacatccaagttcagattagagttatgattatctgtgaaaccttggacaagccccataacttctctgagatctattacattttttttttgtaaaatggagttaataattgtcaaaagtccaagccccaggactccagtatacttgatgagattgctgagagtattaaataaataacagatctggacagagctttgcaaagtgtaaagggctgacaagagttcatagttctgctcctcattcaatcctcctaataaccctagaggcagctactactatccctgtagatattgtgtagatagagacatgcaaccccttagcttgtaaattgagaaatggctgttctatggcaggcagtgtgagcccaggacctgtgctcttaatcccacagcataccacttagtgtagtttacatagtttctcatgcagaactttattcctttagatttcctaatcaaggtaaactcttgcctgaaatatcttataaatgagtgaaatccaataactcattggaccaataactcagtggaccagaaacatgtaatgcattcatttcatgtagaattatccccaggagcatggatatttgacaacttctgccatttgtttcatcacatacttgaaaacaagcaaggcttccttaaagagccttgcttccaccagtatttatatgtgtttcccttctagcaatggggacaagtaggcccaaagtgtgccaggtgtgctgactagggacaggaggaagcccttttgagttgtaaaatgtgtcacggtacatccacagggtgaataatgaagacattgcctgaatttcctaattcttttctccttgtagccaaattttattccaattcttacctgggaagcaatcaagttaggttctgtttggtagttgttaacagaaagtttarcaaagggataaactttaggctttatagcctaaactttggcagattgtcttgtataatgtatattctatagactttttgttcttttacaatatatgttctttttccatacagacgtcctctcctgtcacaggtgggaaagaaacggtaactatatcacttaaatttataaaatggggataataataatgctccatccatcttgagcatttgttttgagctttaaagtttgataggtgaactgtcactaagcacagaatctggctcaagaattattcttgaccagctccgctcaaaagtgagggagaacatgcaaaatcacagatggatttcacaaagggttgagcaaaagaagccagacacaaagagtgcatatcttatatttgcatctatattatgctgaaaaacagacaaaactactctatggcaatagatttcagaatagtggtcacgcacaaggaggctggaagagatttgagggggatcctgagatactgctaatgttctgtttcttgatctgggtgttggtcttatgggtgtattcctcatgtgaaaagtcatccacttatatatttgtgattcatatacttttattattcttcaataaaatcaatttccccctaaagtgaagtgaaggtgaatccattattaaataacagttgcacttttatagggtttctgcagattatcttcaatatttccagatagtctgcaaatctgaaaacttatgtaactaaaagcatgactatttccactccgatcaaagcaaaatgggaatttgaaaattaataggttaatgcatttattgcaaataaattttttttgaaaggctaaatgtcacttttttatttatttatttttattatactttaagttctagggtacatgtgcacaacgtgcaggtttgttacatatgtatacatgtgccacgttggtgtgctgcacccattaactcgtcatttacattaagtgcaaataaatttttttaattcatattaaaatagtgtggtatggctgggcatggtggctcaagcctgtaatcccagcactttgggaggccaaggcaggcagatcatgaggtcaggagttagagaccagcctggccaacatagtgaaaccccatctctactaaaaatacaaaaattagctgggtgtggtggcatgcacctgtagtcccagctactcaggaggctgaggcagaagaatcgtttgaatccaggaggcggaggttgcagtgagccaagactgtgccattgcactccagcctgggcaacagagcaagactccatctcaaacaaaaaaaaaagtgtggtgtataataaaagcttttatttttagccaaacaggtgaaaatgacatctaattgttgctctgaattgtatctcagcttttcctacattgaagagacatttgtatttctgttctaaagaatacctgttcatatcctttgcccatttttctacttgatcattactctttccaacagatttaaactgtgtaaattaagtcctatgaaagtaagtcatttgtcatgtgtgttacaaacatttttgcacagtatttcattacccttttgattttgtatatgacgtttatgatccatgcagattttttgttttatttttattctattgaatttttcctttattattgaagactctgggcttcctctgaccctgtgtttttcattctgtgccaggactgtgggccctctcttggattagcggcgggcataccattgctggtgkccacagccctgctggtggctttactatttactttgattcaccgaagaagaagcagcattgaggccatggaggtgattactagcttctttgggtccagatgtataggcagccaccagtatttcagtgaactggcttttggactaagggtgtcagaattcagggcccatgtctatttcctgaggacaagatgctggaagtttctgggccataatttccactgcagacatgacattaggcaccagacagagctgatttgtcataaaaccttcaggtcagttgaggaattcctgacaaagatggtatttggggtaacaaaaagtagcagtggagaaggatgtctgttgccatggcaaacacatgtctgtacagtgggtgtgctttctaaagttgagaaacaaaagcgcacaagcttcacaaagaaaggatggagataacgttaagaaagataggagatgaagaggggctgaggtgtccatgatagacaccatgatagaatcacaagggaatctatatcctccccatccaatccacccctccaatgccagactgttctggggactatgcttagaaatcaaargccacctagactcatatccaacaaggttccatggttgtgacacaactgtgtcatgtggactctgggttctaattctattctctatttattgacattcaaggttgttatcatatgggtaaacattaattaagagattgaaaattgaggttctaaacctgactctgccactttatgatttatatgatcctggacaagtgacttaacatttaatatgtcttggttagttcaactccaaaataggagtcatagaaactaccctccctattttaagaggtagggaaagttataaggatgaaatgagataatggatgatgaacatttttacatgtaaagatgtgttgacaagctgtaaattttaaacacatcaagaagtattgtggttagtggtggtattgtttaagtaatagtttctcaacctccagtgcactttaaaattatttaggaagctcaaaatttccaatcaccaaagccaattaaatcagaatttctggatgacaaagctgtggcactgatcttgaaaaaacaaaaacaattttttaattataatttcaaacatatactaaagtagagaggatagtataatgaacccaattattaacycatggccaatattgtttcatctctactctcaccctggattatttttgataactcacaatgatatttcttggcttaggtatgggtttggtttggtttgaggggtgatgttattagatgcctctgtgcttgttttgtttgttttaatgtacactcagatttaaaaagcactgattttaatcatagttacggtcaaatgctataacccttcacttcttcttctttctttcttttattatyatattttttccaatttaggaaagtgacagaccatgtgaaatttcagaaattgatgacaatcccaagatatctgaggtaagaactcttggttatactctctatataccattcacacagtaaacaagctaagtgtttgaaagcctttcaccaaaagaagcacagtatgagcacatgtagaaaagagakgaccaagaggaagctcaagcacaaaggaggttctcagtgcatttttattggctgaacagaaattcaagctccctttaatattagacaatcaatttaatataatttattttactgacaaactaaaatggaaaactcatgtgaccatctcaataggggaagaaagttcaaaaaaacttaacagtgatatgaactctcagcaaattaaaaatagaatgggaacttccttgacttgaaagatgtctttttcaaaaaattacagctaacatcatacctaacagtaaaatgttgaaagcattctctttagatcagaaataaaacaaggatcttcactaacaccacttctattcaatattatactttagatcctagtcaatgaagtaggatttttaaaaattagaaagtataggtccggtgcagtggctcaygcctgtaatcccagcattttgggaggctgaggcgggtgaatcatctgaggtcaggagtttgagaccagcctggccaacatggtgaaaccctgtgtctactaaaaatacaaaaaattagctgggtgtggtggcggtcgtctgtaatcccagctactcgggaggctgagggaagagaatcgcttgaacctggtaggtggaggttgcagtgagctgagatcgcaccactgcactccagccgggtgacaagagcaagactccatctcaaaaaaaaaaattagaaagtgtaacactgaaaaggaagaaacaaaattgtcattatttgcagatggtatgattgtcgacatagaaaagctaaatctggctgggtgcggtggctcacgcctgtaatctcagcactttgggaggccaaggcaggtggatcacctgaggtcaggagttctagaccagcctggccaacatggtgaaccccatctctactaaaaacacaaaagttagccaggtgtggtggcaggtgcctgtaatcccagctacttcgtggggggctgaagcaggagaatcacttgaacctgggaggcagaggttgcagtgagctgagatcacaccatcacactccagcctgggggacaagagtgagacttcatcttaaaaaaagaaaaaaaaaagaaagaaaggaagaaagaaagaaagaaaagaaaagctaaatctacagaaaaattacttgaattaacaagaaattttaacaagtttactggatacaaaaatcaatatataaaagtaatttatactttcaacatcaacaacaattagaaaaagtgattttaaaaattaccatttgtgatggtaattggtattaaaatatgtagaatgctatggaataaatctaacaaaaatatgtaatacctttatggaaaataataaaactttggttaaaaaacccattaaataatacctaaataatgggggttgcatactatgctcctggatagaaagtgttaataacataacgatgtcaaacaatgttgatctatataacagatgtaatttcaatataaatcccaatcaatttttttcatggaacttaatgaggttcttctaaaatctatatgaaataaagtagaaaaagagttaaaaagacacaacaaacaggtagaacaaacagaaaacaaatagcaagatggtagatttaaacccaaccatatcaatgatcacattaaatgtaaatggtctagatacccgaattaacaggaagagatttcacattggctataaaaacaaggtccaatcatatgatgcctacaaaactcactttaaatataaatacacaaatagattaacagttaaaagacaaaaaatgagaaactttgttaacaataaacaaaagatagttgagtggcctgaaagctctcccaaagcagtaagatcaggtaattgtgggtctctcctcatttgttttctgtctctccaggaccattgtccctccttgcctgttgtctagtgtcttgaaaactattgcttcaaatgttgtgtctgattttggttatttcaggtgggagggtcaatgtggttgctgttagtccatcttgtatgaaagaattctctgctgtagtttttaaaaaacctatttgtttccttaagaatcctaggagatcacccacacatgagaagaatacgatgggagcacaagaggcccacatatatgtgaagactgtagcaggaagcgaggaacctgtgcatgaccgttaccgtcctactatagaaatggaaagaaggaggggattgtggtggcttgtgcccagactgagcctggaatgatgcagctcagtcaaggagcagcagacctggcactggaacagggttgaaaacccagggttttgtacttggagaggaragakgccaagctgcttcttaatcaatccaaatttcatttacagctctggaacactttggggctgatttgtctctttaggggacatccccaacatggttaattccaactctcagatcttgtgctttagttagtacatgtgactcaccagatggggtccttagatcctattcctgctcccagtgggaatttgcttttctttgtcattttgggaaaggggcttggtttctgagtgtcttgccttctcatctttttttttcatatcctttttctcaaaaaagccatcagatctgactttcatggaagtgttgctgaggtcagcctggtgcaagttgggatacaaatgaaacttatgcaggatgtgtgagaggaagcagttaattgtttctgaatatctcagggtaggaaccatgtggagccacacattccctgaccacagggaagcacctggctcaatcatgtcacacagcagtggaaagaatacggactcttaagtcacacctaccactgagcagctgtacgactttggagaagttgtttaacattttcaagcctcagtttttgcttttttaaaggaggggaaatatttgcctcatgtcataattgaaaagattaaataagaaataaagggaagtgtctgctacttagttgccagtcaaaatgttagttctytctctctaccaccttcytcctacctcttcccatattgcttgcctgataaaayagctaatcaccagcatttgttccccatagtcacagggccacacaagggaacatttaggacaaactttctccatggcctatgatccaaattgttatctaaagatgattctaggtgttgctggtagtatgtgaatcttccaatctaggtgtgatcgtgtcctcatatgaatcaggaaaaggcagtttcttacaagttccgaattccaaatacagagactggtggtgttacatttaaccttaaagatgttaatgttgatggaaattcatgtttcatattaaaacaacactttgtctttacaatgaaacattttgcttaatttttaaagtaagacattatgatacctctgatggcagttcctcaaataactttaacttttgtgctttagggatagttgttaaagttacaacttcttttattttattttttaaaggcttcagattaaacaagagcccttaagcccacgcatagcattgccgcttcagcttgctgaggactgtctccaaggaggccaaatggaaaaggagaggctacttcaagtggtgttggcccattgagcctattgggcaaactataaccaggttgccttattttgggtggattactccaggagaggccaccctccagctttctcttatcccagtaactcctcttcccattttccaatccatccccagccttttttttttttcttctgtactcttcttttgccttcaatatgagtttcatttcctctgtgtctttgggcagacttccttctaacatgtgtcagctaccctaccacacacctggcctaggagacacatcattcattgctcctacttgtgtctgtaatcagagagtatttaaggagggcagttctgcgacggactgtgtgtgtgttgaaagtaaagatggggggccgcggggaaggcaagagtttttccaaaagattattagaaatgagggctgtatctactctgtggagtagaaccaagtctacttggagaaaagaaccaagtccttggatatctaggggaaagctgtttggcagaaagaaaaatcaagaggacccaaggggatggagacaggaccacaggaatgggccaaggagcaacgtgcctgccattcagccagcttgggacaggctttcactttcactcccatgaggaggcttccaggcagcctggttcccccatgtatagccattgccstctagcaggccaggcctcccagtgggaaggcctgggtccagggcatcttaagttcatccagcagctccatgagccacacagatatcctagaaaatattcctttctcacacagggcttctgattactcagaaacatgcccctcttccctgaataaccaagaacatgttctatgaacccaatctctgccacatgtcaatacctgctcttcaaagccccttttgaaactcagttttgtgccaagtcctctggatctaattaccttaaacaagcagatttagccatttttaaacagacattcccagtcatcctggtgcttgtacttctcctacatgtcatgaaggaccttggatttactgagaactcagccgtggccttggctttgatacttataggtgtcagcccttgggccgattgttgatcatccagagcctcagttctgtacttgtaaagtggagacagcagttctcatcctccatccttttagcccatggggtggttgtaaggctggattgaaatatgcatgtgactaagccatgtagctataaagtgagggatgacttgtgttttggatcacttattttaattctacttataatccayggcttagaatatttaaacattgtttctattaaactagaaaggttcagcatttctgtcatttacttctgctatgatacacaagaacttatgttggaatgaagtgaaaagtaaaatggccattcttatgaacctacaaaatgtttgtggcttttctttgcctatattagagaacattggctctgtccctggaaccaagattatcccagggatattcccgatattggcactttctctgccaggctagaagacattcagtctttcatggagggcagctctgtgtggtaagcaaaatgatgagacccaaagtcagaagctctgcttccctaacccagggctgctggtaagttaagtgaccttagtcaggttgcacgatgtgtgtgggtctcatttcctcctgtatcatctggtgtttgaattggtttatctataaagttacatccatccagtccaaacattctactttgattttccccaaaccctgcaaagcactccttctgcctgcctgttcctcactcccatcagcacagccttctataccctctatgattcttctcagttcctgactttgctggtggagacagatactcacttcttctttattttgccaagaaataacaattattagttttgcttaaggcgtttttccctgcaacattgcgatgttaattgaagaccaaaaagtgataactaatttttgaaagattgtgaagtcatataacctttgccctcccaccatcttgatgagaattattgcttaatgcgtgaattgatttaacaaatgtgcactggcttccttccaatgtcagacaatctgccaggtcctaagacaatgttgggggcataatgaaaatgctaaactgggtgtttgtggaaacgtttctctacccaattgaatgtgaatctccatccaaggaaataatatcaggaaagcttttatacaggtgctttgcctctaagctcaaagacataaaactatctctctcgggctcaaataagataagaatctatactcttcttctttttcctttacctgaagttagaggagaaggagaaatgggcatagcacttcaatcctctgagaattccaaatggctgaaatgtctggttatgtcagggcatacattaaagtgctgtacctccaagtaaaactcagaaaaaaacctctctcctccatcctatagagaggctacctgaactccaataagttaaggggtgaaaaatactaaaactggacaggtgagactggggaacattttggaagttggccgagtttgtccaataggctgtagaactatttctaaaactgaagggggcctctggaggacagggtgagtgtaacctggggcttaaaatctgatttataatgaaagagaatcagtttatcatagactttcatttccaggctaaaatgatttgaaagatttgattgtgagcgagaacaaaccatgttgacaaaattctaccataaatgtgactgattttgtcatgaagagtcaaacagtgattactgttgactcacctggccagggattacccacttatgaaagccaaggtaaggatatgggtctttgttttgagagctggggaaagcctagtcttgtgtcccacctcttctagtttctattccccaaccacttaggcctcctctctgcccttcagatgccatggtctgtccacaaacataggctttctctctgcaactcagacacgtgggaacctccagctgcaagagctttctctctgctcattttatgccatggccctcctgccacgtgggccttttctctgacaccatggtccttgcaccacatggcttttgcacatgctgttagtgagatagagctggaagtccatggaggccaaggtgaatagaatttgcagggcagagtactggagaaagagttgcacagagacagaggagacctcttgattattccattgatcagcatatgcatgtgagaaaactacccaaggctggagaaagaaccacacaaagggattagagggaacaataccctaagctctaatgggccaggcctctcagtgggaggccacaaaccgtgcctgttcccaaacagccagagtagaaaacaccataattcaccaggcatcaggcagaacactgagaaaagtattgcctcagtagtggggaagaatattaaccctggattagactacgttagtgctgcctaacaaagctcaaaagtaagatgagtcctgcctaacaaagctcaaaagcaagatgaggacacatcaaactgtttccaagtaaattaaccacatcctggaacaaagtttaagaatattaacaggaatacaaaaatatccaggaaaaaattcacaatgttcacaatgtctagaatccaatataaaattaccaagcttgcaaagagggaggaaaatgtgacccataatgaggagaatactcagttaatagaaactgactcaaaattgacacagatgatatcattagtagacaaggacattgaaacagttacactatattccatgtatttaataagctagaggaaaaattgaatatgttaaatagaagcatggaagatagtttttaaaaactaaatcatacatctaaagatgaaaactataatgtgtgagataaaatactggagaggtttaatgaaactagacattgcagaagaaaagattagtaaacttgaagatacagcaataaaaactaccccaaataaaacacagatttaaaaggctgggaaaaaagtgaacaaatagagcatcggtgatccatggcttcttacatatagttccaatgtttttaacagataatctgcttcctacttgatctgctatatcatactgtgcttgcctccaaggattcttctgtcagccatcagagggcgctctgctgccaaagtaggaggcacaggcgaaggctgagttctggtaactagtcaccacaataattgaaaaaaattctggcctacggcaaaaaaaaaaaaaaaaaaaaaaaaaaaacatgtccagaactgataaaaattctggcttacagcaaaaaagaaaaaaaagacatggcatttgtggaatctccaacaggccttttcaaataaggaaagtagcatttagaatctgtgaggttctctgatggggaaactcctctggcatggacctcctggggctattgtgtggtggggacctccagagaacagggctggggagttgctcagtgagggcgacaaggccacctgcacatttcccaaatgtcagccacctgcgtccctctctcctcattcttgccactcccccatttcactggtaatatttcctaaatgatttccctgaccttgagtcgcttttcttatataaataaacctattccaaaaaggaagctttatatcactaccatcaataaggaaccattttcttaacacctttcgaacacaaataaacacctttctagaacataagctttatgcttataatcatacaggcagagatttttgacagttttgttatcttttctatgccctgtgcctagaaaaatgactgacatggtaagcacccaataaatatttattgattatatcagtatgaaaatattcatctacttactacctagaataatcttgaatgtcataactgggaaacactgggcagcagaaaagactagaatactttgtggattttgggatttgaggccagtgggggtggctgctgtccaccctcttgttgtccccagctttttttagccatcaactcaagatgtgacaggcacacacaccatctgaggccctttcagtgtgttagtttcagcctggactgtctttgggttccaggatgggcaaaagttttcacccgccacttcacacccattaagacagctattataaaacagataatgcagaagataacaagtgttgaggatgtggagaaattggaacgcttgcgcactgttggttaagaatgtaatacggtgcagttgttatggaaaacagtacagtggttccacaaagagttaaacatagtatagaatagccattgaatctagcaattttattactaggtccctaccaaaaggattgaaagcagggactcaaacagatacttgtaggccaatgttcacagcagcattagtcacaatagccaaaaggtattgtatctcccaatatcctcttcccagagggactggaaggaagggaaaacggtcgtcatgggcctcccagctctttagcaggctgaagacacggaagcagctggaacagatgacctgttaactcccttcaaggcaaagggtctatgcctcctggaggaggcaggaggaaagaatgggtctggagcctgggagttccaaaatttccctcagccagggctccctcccttcccttgggtgccctcagataagaagccaagagagactgacttcctgagagagactgagccataaggtgtagacagaagctccaagatggaaaaaagagggagatatttctttgatggtttaggacattgtctttccttcagcacgatggcagggagaatacatcctttatgtggtcctgtgctgggatgcttagggaaccagctgtatgatggccgggaaggagcaggcactgagccgagctgagccagtccagaggcagcacccctcctccacaagctccagaacggacccaaatcccctctggaatctctgcatcttctaattaaacctgtttgtccccttaagacaaactgtaagctctttattcttccacttggttacacttgtgttttaaaatagtttataatatttgagtgaagaaaaacagattccatcatcttgtttcctcctgtttttattagagatagacagtatttcagctacactgcgaacaaagtgggctttgatgagcttccctgaatgagccaccagtgacaacatcatttctcttgaaaaatgcattgtgaattctatgcaacagtcataaacatggcctattagaaccttacccattaccagtggcaccttcccatgtttccaaagttatttatttctagtagcaatctgcatttcaataagacctaaataaccccaaactctcctatggcatcttttactaatatgaagcataatttatttaacttgaaaagaataggaaaaaaatgttgacaacactttcctaggcatttctttcccacggttcaatataatccaatcccagatgcgcaaaaatttcttcttcactttctgctttgaggaatatcctctgaaaacataacaagaaatatgtgcattcagatatttttcataagcaccatggtgtggacacagtgaaagtgttacttataaaattgccttgtcagaatgaattacagcccaaacataattccctgcttctgagtataaaaagtcattttaactgactttccaaaacatggtactaaatgaattaaagtaaaatcataacagctttaacatattcagcaaaagccatttggatatttttcctacgggctgtagttctgaaccacagctgtttattagaacaacctgatggagtttaaaaaataaacattgaagcttgagccataccccagtccagtgaaatcagaagctcaggagagatcttataatcaatctatttgaacgcactgggtaattctaacatgcagttataattttgtactgctggtaattataggatacttgtatgtgttgggttttccttagctttccatgcttgcctctaaccccagcaggatcccactctgtgatctctttaagaccaagcagctcttctcctccatcccttcttgtacatagcacggtgctaggcacatagaaggtacttgcttacattgaactatttagaatgtattaatttgtaagtgttccttcattgtactatgtgaatctgccttcacccacatgcttagcatccgaggctttcctgccagcatccacagccccctcttctgtgagcagcacctggatttttctatgggaaaccactcctcttgactctcagtccaggagggttaggtgcagctgctcccaattccaagaagcagcacatgacccaagtctggccaatcagagccacagtaatgggttcagggataggcacatgacccaggcctggccaatgagcatcaggtaggattcttgggggaactattaggaaacaggc

SEQ ID NO: 96569 - DNA, 12532 bp, Homo sapiens
tatttttagtagagatggggtttcgccatgttggccagactggtcttgaactcttgacctcaagtgatccgcccacctcggcctcccaaagtgctgagattacaggcatgagtcactgtgcctggcctcttattttttctttggttaaacttttagggaaaaagtttgagctgcttttaattttctttttgtttttaaataaattattaaagtttctctatgttaggaactcttgtgtacatgagttcattgagcttattcttaataaagacaaatcttctagaaataatagttgtatctttaaatgatctcaaggaaaatgtttggtttctctggggaatgaattttcatgacctaatcttaaatcaggttattttttctagcctgtttactaaatttctacatgttataacctaatgaaattttcttacttcctctttatttaaaacaaactataattactgtctttttaaaaatcttccaatgtggcgttcttatttttcttaacatttgaattttcctgggccaaaccatgttactatgatacacattatttaaggctgttatataatacagtaaaattgtagaactttcataccttgaaggatcttagcaattatttaattcaaacccattctaacatagatgataaaacagatttgcagggttgggcacggtggctcatacctatattcccagcactttgggagactcaagcgggaagattgcttgagcccaggagttcaagaccagcttgggcaacatagtgagaggctgtctctacaaaaaaatatttaaaaaatagccgggcatggtgtcacgtgcctgtagttccagctgcttgggaggctgaggtgggaggattgccagagcctgggaggttgaggctgcagtgagccatgatcacaccacagcactctagcctagagcctccctgtgtggcaggctctacacttcagataggcaacagatcgagaccttgtttcacaaaacgaacagatctgcaaagatcaacctgtcctaagtcatataatctctttgtgtaataataaaaaccccatcttctaaccttaaacctggtatttttttctacgaaactatgttctgcagtccaaattatttttctttattattttgaatcctaaagtagaaatagaaacttagaaaaataaaaagcaactcctttatgacatatgaggactttttcagttttaaataagaaaaacccaactcaaagtagcttaaataaaaggagacattttttgacttacataacctaaaagctctggcctggatctaggtgctcaacagatctcaagagtatctctcttattctctctccctcccttaccctcctcctcttttctctcttctgtatatatgttattttcaaacaggctctcacaagtagtggcaagatatagttcctaatagcttcaggtttgcattctacctactttagcaactatgatgagaagagagctacaatttgagcaaaaatttgtagggtgagttctgatttccctggattgaggcacatgcctattattcctgaaccaaatattctgtccagggaatggaattctctggggcatgtatctaaagctgaagtgtagagcctgccacacagggataataatagttttccaaagaaaaatcaaggaggggaaagaatgttggaaagagaaaaaaatatcagttgtctgcttcacatttgttctcaataattagtttcatagaagtgaaatactgtgtaacaccctaaactttagagattcttcgtagacaggaaaaataagaactcaatgaagttgtgacttcattcaaatcacgtagtttatatacatgctattagtaaaacccaggacagctgagtacaagttttacccttatattcacattgaggtccagatcctggttttgaatgagataattacgtgcagtcggactgttttctgatcctaaaaatagagacaataatatctatcttgtaaagttatggtagtgttaaagatatataaaatgttggcaagtaccttaatatacaataactactgctatatgttgtcattgtaataataatcatatttcttcctttgttgaattgctttcctgtagtaatcttattgtgatcatcctgaaacatagatttccgagcttcaagcaaacactattatgttgaaaaatctacattatttctaagtttagcagtgccagtggaaagtttattgaaatagaaaattacttttttaactgaggagtgtagattgtgaattcgtgattcatcttcttaggagatgatcggaatattgataaatattgatgcatagaatatgaacaaaacattacatatcttgtgctgtgatattaaagtagtattctgttctggtagtagtatggcagtattttaggtctgaaagatgtacataatctgtactttgaagtctgttttttaagagattaatcacaagagatttacataaaacaactaaggttaaaaataaatggtggattagagatacatcaggcaaatttcaatttcaaaagcagatgacagaatctcagtatcagggtagcatttaaagcaaaaagcattaaactggatcaaaaatgtcattttacatcaacacagggtacactccaggtaaagacttaacagttatgaacgaatgtgctaaacatcaaaatgtattaagtaaaagctgaaagaaatgaagaataattggtagaaaagcaatgataggaatccttaatgtacttcaaaaggcacgaagtaagaaggtacagtcatgtaccacataatgatgtttgagtcaacacctgacctggtatacgacaatggtcctataaaattataatggagctaaaaagcttctatcacctagtgatgttgaagccgttgcaatgcaatgtatcactcacatgtttgtggtaatgctggtgtaagcaaacttactgtactgtcagttgtataaaagcatagcacagttatgttcagcacataatactttataatgataaacgaatatgttactagtttacgtgtttacagtactattattttagcatgtgcttctgcttattaaaaaatgttaactataaaataatctttaggcagatcctacaggaggtattccagataaaggcattattgtcataggagatggcagctccatggatgttattgccccttaagaccttccagtgggacaagatgtataggtggaagacagtgatattgatgatcctgaccttgtagaggccaaggctaaagtatgtatttattagtttttaacaagagtttaaaaagtaaaaaaaaaaaataaatttaaaaatagaaaaaatcttaataaggatacaaagaaaaaatgtttttgtgtagctgtgtaatatgtttttgttttaagttaaatgttacaaaagagtcagagttaaatttttttatatttataaagtgaaaaagttataaaatgctaaggttaatttactgaagaaagaaaaaatttttaaacagatttagagtagcatgtttataaaatctacagtagtttacagtaatatcctaggccttcacattaactcaccactcacccactgactcacccagagcagcttccaatcctgtaagctccattcgtggtaagtgccctatacaggtgtacaatttttatatcctttataccatttttactgaaccttttctgtcttttagatacacaaataacattgtgttacagttgcctatgatattgaatacagtaacttactgtacaagtttgtagcataggagctgtatcatatagcctgggtgtgtagtgaactataccatctaggcttgtgtaagtatattttatgacacagtgatgaaatcatccagatacagtttctcttaagcaacacataactgtatatatatatatataggtggctttaataataaaataatgaaatatatttctttttttctgtcattgacaaaacaattaccagtcttactaattagatcaactgcaaaacaaaatctcactcaaaaataaaaatatgtaagtcccattccttgattacaattcattagaactggagatttttaaaaatgtttaaatttatatggaaatataaaatcatgttttaaataatttttgattcaatgaggaaatgtaaatttagaactaaagattaataactagagatttataaaggcaaaaatgttaatgaattaggaaacagtaaaccatttgaactaatctaaatactgattgcatgaaaatgccaataaaatcaatacatatttttaaaagccagtcaaggataaaagaaaagagggaaactaaaagtgagacattaagtatgagaaaggagataaaactaaagtgtggaggtgatgttaaaaattatattcaggtctgtgctaatcattttggaaatttcagtgagaagtgggcaattttcagtgaatatatcattgtaaatgctttgaggagagacaaaatctgaatagaccctgcaataatgaaaatgtctaggagccctcaagaaatacctggtttaaattgcatttcaggtggctggttatcacaccttgaagtatcaagtaattatgttatctaaattggaccaggtgttagaaaaatatgtgagacttcacaggtggctgcttatgtagcccttataccttaatctgataaaggtagcatatatttaaaaagagagaaaaccagaaggtacaatttagggaaaattaaatacttctatttggccaaagtaagagtacattcaagggaattgtgagaggtaagagtggaaacagaggttggagctgtatttttatgctgtgattgaattacagtgtgtgataaatattgctcttatttgggtagattaccatttaacattttgaattaattggtaattggattaatcttaacttttaaaaaactaatctgagagtggtataaaggatagattacagaatggataaagggtgataaatcagttggctatggcaaaattgcaggaagaaactgaaataggccacagaaaactgaaactgacattttgagtagtatttcagaatcaagatctggattttggcaactgaatagatgcgtaggaatcaaagatgagtatactaaatgaacttaatctatgatttgtctgtcattttattgtgtaccattagtgtgtatgcatgtatgtatgtgccaggtagttaataggctgactgtgtctcttagctccactctgctgcctgggcctttgccatagtgctggagttccctcacttctcttttctgtaaccctattatattactgctgtctctcagctgtgtttcattcctcaagcagaaagaagatgggaggatcatatagtagttgactagaagctgtggagtttgagtgctgggattatatctagttccattacttatgaagattatatctagttccattacttcacctcatctataaaatggtttaccaatagtacctaccttacatggttttatgagtattaaattatgtatttctaaagacatttagaacaatacaaagaatatagtgtgggctcaataagtgacgatggtgttagttattagaaggccatcgagtgctggagaaaataattgaatatcattgatggaaataaaggaagttttccacgttaaaaagcttcggtttttggaaatgtgtgttttcagtatttctgagattaccaggtagaaattccagccagatgttggaattctgcactggcagttgggaataaagtcatgttaaaggagataagttttggagttattgtgtaaaattggtaaagcactggaatagattggtttgacagaggggaaactctttttgagataggcctatatttagggacaagagaagagacaaccaataagggttgaaagaaaccttgagagagtaagtcctatgacagaagcagggaagtttcagaatgattgcagaaagatcagccaggctcttcctgttctccatcgtggtgcaggatcaaggtgaaaaggataaccccatgcaggaattttgcatctgcaggctccgcttcaacatctgtttaggagaaagtggagacagactgacctgagtaactaaggtsttggaacagcttacaggtcagaaccaggtgttttccaaagctagatatactgttagcscctttggcaacagaagaaatgaaaagactgttgtctsctgcacagttcgaggggccaaggcagacgaaatcctggagaatgatctaaaggtgcaggagtgtgagttaagaaaaaataacttctcagatactggaaactttggttttgggacccaggaayacattgatctgggtatcagatatgacccaagcattgatgtctacagcctggacttctatgtggtgctggaaaagccaggtttcatcattgcaggtaagaagtgcgggacaggcttcattggtgccaaatagaatcagcaaagaggaggccatgcgctggttccagcagaagtatgatgggatcatccttcctggcaaataaattctcatttctacccaaaagggtaataaaaagttttcagtgaaatgtttaaaaaaaaaataaaaaaaagatcagccagcagccaggatgggattgtgaaaacagcaggaaattagttgttgacaaagcattaatgaccattaagaaatcagcctcggctgggcatggtggctcatccctgtaatcgtaacactttgggaggccaaggcagatttcttgagtccaggagttgagaccagcctaggcaacatggcaaaaccctcgttcctccttaataaataaataaatgaataaataaacaagcaagcaagcagggcttggtgttaggcgcctgtactcctagctactcgggaggctgagggggttgaacctgggaggcaaaggttgcagtgagccaagattgcactactgcactccagcctgggtgacagagtgagaccatggcacccccctccccttcaaaaagaaatcagcctcataatcaatttctctggattaaggagtaagagcgtctcaagatttgctgtttatagagagggaggctaatagtttgagagagatacagaatctagggagagtgtgggtttttggtctttcagttgtttgccagccttggataaagaatgaagattacttgagcatattatttagagacaagtggagagaataaaggcacatgccagataggagataattaataaagcacttgtccaaaatagaaacttgttgaacaggaagagacgtcaagtataaggagattttaagatgggagaagggaattttgagtgtttgtattggatgacctcagggttcccagtaaagcaggagctgaattcatcgaaggtgatgtgttggtcaggatcaagagagaggttgggagaacaaagtgctaaaatcgttgtggtcaagagtttaaaaagtgtataccagaagagttattgagtgataggggtttgaaataggcaaagctgtaggaaagggggctggaaggaatattaggaggaacactaaatatacttctgaggtctacctcctggtctgtgaacataaaggagctgaaagagtaatggctgaagttctttagtttagctaaagttttttagctaaagctagaattgttgaaagttgtatttgaggaaaaaaagttaaggatacagttgaccgttcgataatgtagcccactgttgaccagaagccctacccacaacataaacaggcaataacacatattttgtatgtgtattatatagtatattcttaacaataaagtaaactagagaaaagaacatgtatcaagaaaatcataaggaagagaaaacacatttacagtactgtactgtatttattggtaccatacatttatgttgctgtttacaagatgaagcatctgtctgaaatggccagcagctacagctgtacctatctactgtacatatcaagcaagtcactttattcttataatgtctatgacttctttctttgaaagcgcttccatcatcactgttggcacttcatatgggtctcatggtgttaaggtttacggcattgcactagacacaatgaaaactacacaagagggccgggcacggtggctcacgcctgtaatcccagcactttgggaggccgaggcgggcggatcatgaggtcaggagattgagaccatcctggctaacacagtgaaaccctgtctctattaaaaataaaaaaattagccaggcatggtggcacgtgcctgtaatcccagctaatcgggaggctgaggcaggagaatcgctttttcccagaaggcgtaggttgcagtgagccgagatcgtgccactgcactccagcctggatgatagagggagactctgtcgcaaaaaaaaagaaaagaaaaagaaaagaaaagaaaaacacacaagagccgtgagagagatagcttttgattgcaatacacaatttactggagagatgagctgatcatacagagatgattagtgtcacacagtgttttaaacagattcttgcaaccctggagttcactgcagtagcaacagaagttagctatgagattttaacagtagtatagtatgtactacagttaatattaggtagctatgatttaatgctgcatctttgcatttgtttacatttatcttgactacaagtggtattatgtctggtcttaaggtttgtgtgcatatgttttgatgaattttaactttttataataggtttgtgtatattttatggcagtaaatgataaaacagactaatctacatatattttatgtagtcatgacataaacctaactttttcttaactttttgatatttctagtctatgtgtttcatctgcaggttttttcaaattgttgaaatctctgaaaaattttattgaaaaaaaatccatatatgtaagtggacccacacatttcaaacctgtgttcaagggtcagctgtgtaaataattttcctcaaaattaaagtggaaaaggagagttactactagtagaaagtagaactgtacccttgggcaggggtgtgtgtgtgtagttaaagatcaatttaacttaaaaggtcttggttagagaataaaactggcccttattagctttaatttacatgaaaaatgaaaaattttaggccaggcacagtggctcaggcctgtaatcccttaactttgggagaccaaggggagtggatcacttgaggtcaggagttcaagacagcctggccaacatgctgactcacccttccctactgaaaatacaaaagttagccaggcgcagtggccatccctacagtgctagctactcgggaggctgaggcaggagaattgcttgaacccgggaggcaaggttgcggtgagctgagatcgcaccactgcactccagactgggtgacagagcgagactccatctcaaaaaaaaaaaaaaaaaaaaagatttgaaaacagagtattttttaatctgcaagagctttacagccttttattcatatgtataagcttttaaagatgactaaaattttagtgtggactttccactcattggaaatcctatattgcaggtgttaattcaattttagtgagtgtgcatcatggctcagagagataggactagaatgaggaggtcacattggagactctgaaacagatacatgtgagcctcccaactttttaatatttgttaatctagaagtgttgaattttgggtgctgacaaggcagcaggtagataagaattgcaaagttaagaaaatagactgtaatattgatggtaaactaattgattaaattttaaaatgtacttttccatgtttttctttgaattgtcagtaattttgtttcaactggtattcatacatagattattcacccaatgttgacaactagtagatttatatattttttatgttgcctatccttttttgggtaaggattaacagaatgtataatcacctacattataggtacactactaatcacttgctacttgaaaaaacctaaagctttgaaatctttttattattgcacacaaacttatgccaaaaatggagataaagagaaaaatgtcatccactaaaccccaacaaataatgttgacaatgtggtctactcgtagactcgcattgacttaatttttttaaatcttattgcatattttgactagataataaatgcatatggttaaaaaattcacatggttcaaaaaagtacacctcccactcatcttccatgtgatatttcctttctgcttagcaattctgtatttatcttgctaaacatgaatgacagttgtttgctgaaattacattaaatgtgacgtaataaaatcattgtaagtttacattttttaactttaataatttttaatgttttaatgaagagtatgaagagtagtagtactgctcttcaaagtactactactttaccttaccttttactgttttgttaagaaaattaggccgggcgcagtggctcacgcctgtaatcccagcactttgggaggccgagacgggcggatcacgaggtcaggagatcgagaccatcctggctaacacggtgaaaccccgtctctactaaaaatacaaaaattagccgggcatggtggtgcgcgcctgtagtcccagctacacgggaggctgaggcaggagaatggcgtgaacccgggaggcagagcttgcagtgagccgagatcgcaccactgcactccagcctgggcgacagagcgaaactccgtctcaaaaaaaaaaaaaaaaaaaagaaaaaagaaaattatatagaaataaaattccagctattccaaaactgcaccttgaatacaggtacagaattgctaaaaccgtgtaccattttgtagttttagcatgcttttgtgtaactgcatctggtgtttgatcctcatgagagccctgttaaggaagggtacatattattgtcctcattttccttcgaaaacacatcagagtttgtattttgactgtcagcattcaaatacaagtcttttatttataaaattttggtctttatactgtggctaaaaatcttaaatcacttgtcatgatttgaaatggtttataccgattttttttgacatttatacacacatacacatatttttaaattgtctataataaaatcatgctcatctttgaaaaaatattaggagtactacagtggatacctacatacttgctattcagcatacctggttttttgtttgttttttgagacagtcttctctgtggtccaggttggagtgcagtggcacgatctcagctcattgcaacctccgtctcccaggctcaagtgattgtcctgcctcagcctcccaagtagctgggactgcaggtacacatcaccacgcccagctaattttttgtatttttggtagagacggggtttcaccatgttggccaggctggtctccaactcctgacctcaagtgatcagcccacctcggcctcccagagtgctgggattacaggttgtgagccactgcacctggcctgtttttaaattcacataaatatgttttatatttttcattagggagaagaaggttgtgtctacaatttttaagacattggggagatttagatgccagtagtaacttaaaagagaaataattgcaaattctttttcctcttgagtatactttcatttaaggtacagtgttctgtaagttacttttaccgttaaacttcttaatgttgcttattgtttgtcttacatttttaggttggatttttcttaagtcacatgtctaataaaaaaaacccttaaatacctcatttattcgtcttcgttagtgaatgcattgttgtacatattagatttttctctttagataactcagcttcccctattaagtgccacatgtattacaaaattttatttatgttttattgtttaataaactcttgagaactagatacattttaatcatttgtaatacttacattttctaaaacacttcatttttccctggtttcttcaacaaagagatgcatgtagtacaaggatagctttacctgtgttagaagattgtttcacacatttacatcaactgcatagtcctgtttttgttgggccctaatgccagcatcactttttgctactgctgtttctgccttaaaggcaatatgcctctgtctagtttgctgattctgatactctttcccctggaaagtaggtaatcaagtttgtgaggagctgtgtgtttaaggagtccataaatccttgtggggagccctaggtgtatagagcatagctgtagggcagaggcctttgacacttattctggatatgcagtggcctttgcctatggggttcatgggtcagagcgctgttgtgacctttgaataaatgggttgttatgataattgttttaagggaggagagttattctgatatcctttgtattgatattgctcttatttattattgagctggatttaagtattaatcatttaaggtcaaatttctaatgtatatatgttcttaaatggcta

SEQ ID NO: 96570 - DNA, 35119 bp, Homo sapiens
gtgcccaccacgacacctggctaatttttttgtattttagtagagactgggtttcaccatgttggccaggatagtctcaatctcctgatctcgaaaacacattattataatcttatgggaccaccgtcctacaggcaattcatccgtgacctaaatgtagttgtattgcatgtgtgactgtattaagatcttttaattcagggcttttaaatattttcaaaagaacttttaacttcctaagggaagcttcagatttcaatagttcttcacacaaaaagatctcactttctgaggagagaaaaagtccagcttttccatgaatatatcatgggtttgcttcactctcagcatggccactgtttgcttttcttctttactggactaattgccctggtgttcctgctttggttaaaagtgaaacataaagaacttattattaatcaggtaaatgggagtatgacattgaaaacattcaatgtcaaaagacctaacataaaaaggaggttttaggtgattgaaacagggaagaggacagtataagactcacaccgatgagtagtattttacaatttataaataaaaaatataaaagcaatacatagcatggaatattattcagtcttacataggtaggaaatcctgtcatatagtacaacatggataaaccttgaggacataaaaaaaaaataaaaataaaaattaatcagtctcaaaaaggcaaatcctgtatgattctacttatatgaggtaactaaagtagtcaaattcgtagacacagaaagtggaatggtgattgccaggggctgggcaaggggaaataaatggggagttgttatttaatgggtacagagtttcagttttgcaagatgaagatttctggagatctgttgcaccacaatgtgaaggtacttaacactattgaactgtacactcaaagaaagtaaggatggttacttttatgtgttttttaattacaattaaaaataaaaattatatatataaatacatatgcaaaacaaacacttcatacaactcactaacaaaacaaacatccccatcaaaaatgggcaaggaaattgaatggacctttctccaaacaggatatgcaagtggcccatcaatacatgaaaagatgttcaacatcactaatcattagggcaacgcaaatcaaaaccacagtgagataccgcttcacacctgttaggatggttattattgaaagaaacagaaagtgagtgttggcaaagatgtggagaaattggaacccttgaacgcactcactgtggaaaatggcttggtggttgttaaaaaaattaaacacagaattaccgtatgatccagcaatcccactatgggtatatactgcaaaaaatagaaactagggactcaaacagatattggtacacccatgctcatggcagcattatttacagtagccaaaaagtgaagcaacccaagtgccctaagaagaatgaatggatacaaaatgtgatgtacatatagaatagaatattatttagccttaaaaagccaggaaattctgacacatcctacgacatggatgaacctcaaagacattgtgcaaagtgaaataagccagtcacaaaaacacaaatattgtataatttaatttacatgaggtacctagagaaatcaaattcatagagtcagaaagtagaatagtggttaccatggcctgggggagagggaatgggaagtcagtgtttaaggggtgcagagtttccacttgggaagacgaacaggttctggagatggatggtggtgacggttgtacaacaatgtgaaatacttaatgccactaaactgtacacttaaaaagtggttaaggccgagggcagtggctcatgcctgtaatcccagcactttgagaggctgaggtggttggatcacctaaggtcgggagtttgagaccagcctgaccaacatggagaaacccgtctctactaaaaatacaataataataataataataataataataataataataataattagccaggtgtggtggtgcatgcctgtaatcccagctctttgggaggctgaggaaggagaatcgcttgaacccgggaggcagaggttgcactgcactccagcctgggcaacaagagcaaaactccgtctcaaaaaaaaagtggttaaaagggtgaattttatgttatacatattaccataataacaaatgcattaaggaaaatatagagaatagaaaaaatgaaataaacatcacccataattctcagcaccctagcttaccactgctatgttttcttctggtgttctctgttccctgcatatttttatatagtattaattttcttcatgttactgggcagtctttgtaatttttaaatctatacctatgtcaagagaaaattactctgttcatttctttttgatttggaaaataatttgaggttaaattatttgtacttataactttgtatttatgactttttacattattttcttaggagaatgtcctgtaatgaaatcatggagttaaaggcatgaatctatttttagcatttaatatacaagacaaattgattttcaaaaactctgtattaaattataacgttatcagcaagttataaaggtactattctcatcatgccctcatcaaagattaggtcatatcattttttaaatctgttaatttaatagaaaaaatatatctcatgatttagatttgcatttctcttagattacaggtaaggttaaattgttaacaggtttcaatacgattctttagtagctatacaatctctttaaaaaattgtcttgacagaatttctgctgatttgttaatagctttgattgattcttctcattttatttatttatttttattcatttttaagacagagtctcactctgtcgcccaggctagagtgcagtggtgccatctcggctcactgcaacctctgcctcccaggctcaagcaattctgcctcaggctcccaagtagctgggaccacaggcatgtgccaccactcccagctaatttttgtatttttagtagagacggggttttcccatgttgcccaggctggtatcgaactcctgagctccagtgatctgcctgccttggcctctcaaagtgctgggattacaggtgtgagtcactttgcccggccttattatttttaaactgtactaaaatgctgaaatgtcagttaatgaattatgtttattctgtgtttttttttttttttttttttttgctgagtacaggggactttattgatgtacacaatgaggtagggctcccctaggtctcaccctcttcagggggtctgcatggaaactgtgaggaggggagagtctcagtgttgtggaggactgagtgcggcagggactccccctctctcttcctcttgtgctctcgctggggctggtgtccagctagctgctgcctttggaggccatgtggaccataaggtctactaccctgttgctgtagccaaattcattctcataccaggaaataagcttgacaaagtggttgttgagggcaatgcccaccccagctttgaaggtggaagagtgggtgatgctgttaaagtcagaggcgacaacctggtgctcagtgtagcccaggatgccctcaagggtcccctctgatgcctgcttcaccaccttcctgatgtcatcatatctggcaggtcaggtccatgaccaacacgttggtggtggagacaaggaaggccatgccagtaagctttctattcagctccaggatgactttgcctacagccttggtagcaccagtagatgcagggatgatgttctggagagccccgtggctgtcatgccagtttcttggaggggccatccacagttttctgggtggcagtaatggcgtggaccatggccatgagtccttccacgattccaaagttgtcatggatgaccttggctggtggggggcaaagcccttggtggcacaggaggcgttgccgatgatcttgaggctgttttcatacttctcatcgttcatgcccatcagcagagggggcagaggtgatgacccttttggtaccccctgcaagtgagcctcagccttctccatggtcatgaagacaccagtggactccacaacgtactcagtgccagcatcatctcatttaattttcgtgggatctcgccttggatgatgagtgatgcagtttccattgatgacaagcttcccattctcagtcttgacagtgctgtggaattagccatgggtggaatcatactgggacatgcagaccatgtcgttgaggtcaatgaacgggtaaccgatggtgacaatatccactttaccagagtgaaaagcagttccggtgaccaggtgcccaacacgaccaagttcgtttactctggccttcaccttcaccatggtgtctcagggacatggctggttctgcataagaatatgtagctgtctgtcaaatgggaggagcagagagcctgattcttacttttatggtttcttctattgttccaaagctcttcccactctagaactttcgaaggcgattcaattttccccctagtttttttatgggttgacgttgcacacttaacttcttccacttggaatttactatgttgtataggacagatcttgatggacagaggcagaggagggggaacagtattagtgaggttttagaggaagaattaaatgaagagtacgtggaaagtgtacgtaggtaaatccacctctctggtgaaatgaccacattgagtaataaagacatacctatctgtccatcaacagataaatgaataaataaaatgtggtatatataaacaatggaacactacaaagccataaaaagaagaaaatgctgtcatttgcacaacatggatgaacttggatgacattatgctaaatgaaataagccacgcacagaaaaaccactatggtcatgcaccacataataatgtttcggtcaaccacagactgcattgcatgtacagtggcagtcccataagactatagagccctatttttaccattttttttctatgtttagatgcacaaatatttaccgtggtgttacacctgcctacagtcttcagcacagtaccatgtgtacaggtttgcagcctagtagcaatgtgctataccatatagtctagttgtggggtaggctgtaccatctagggttgcactctataatgttcactcagtgttttcgcctaatgatgcatttctcagaatgtactcccatgattaagtgacacatgactgtactgtattaactcacgtggatttttgaaaagcgtatctcttagaaagaaaaagtagaaatttggttatctgaggtgaggctagagaggagacgaagagatagggaaagaaaagatgttggtaaaagtgtacaaagtttcagttggactattacactgcaactgttatcctgcatggtaaccacagttaagcataatgtttatttcaatattgctaaaatacatttttaatgttcttaccacaaaaaatgataaattgggagatgacaggtatgttaattagcttgactgaatccttctatgatgtatacatagatcaaaacatcacactgtaccccacaaatacacacaattattatttgtcaattaaaagtaaaaatatagctgggcgcggtggctcacgcctgtaatcccagcactttgggaagccgaggcaggtggatcacttgaggtcaggagttcgagaccagcctggccaacatggtgaaactccatctctactaaaaatacaaaaattagccaggcgtggtggcaggcacctgtaatcccagctacttgggaggttgagacaggagaattgcttttacgtgggaggtggttgttacagtaagccaagatagtgccattgcgctccagcctgagtgacaaagcgagacttcatctcaaaaaataaataaataaataaacaaaaaaagtaaaaagtaaaaaacaaaaaagataatgggagatagagatggtgaggaaggagaagaggagaggctgcaggggtctgatctcaggcatcgcggcctatctggaggcagaacctacggcctcaagtgagtcttggctgggtggaggcggcaggacctgggaggagcagcccagttccaaactggagcatagaggaagacggctctgccacaggagagacaccagactttgcagctgcacttgatgagcaggagcagaaagtgcttacggcattataataatttgtgtccaaaatgaagtgggatattcatctttacccatagtaattttgttcaatgtgatttaaatgtgtttgcaaaaggaagggcatctcctaattcctagctgaataccagagctttgcttaratgtacaggtgtttctgccacatagctttcctactcctttccggaaaggaaaaaaaccaaaacgctcagcaattttcactgcactgttctctctctagggtcccgatagtttgtccatatgcttattactgaccatttttgcaggtcgctttttacaaatttatttattttttgaattgaaaaataaatattgtatatatttgtggtatacaacatgatgttttgaaacatgcatacacgtatcatatattcatatacatatatcaagctaattaacatatctattaccttatagatttgccatttatttgcggtgagaatacttaaaattctactcttgtagcaattttcaagtatacaatgcatctttattaactatagtcaccatcttgttcaatagatctcttggacttatgccctaaggtcactttttaaagacaagatctagttctttttcatatagattctcatttttaaagaatgcatggttagcaaatacattggaaagagtggaacttcaaaatgcgagagaatttaaaaagtaggattgtttgtctccaaagacctgtattttcatacgggcagaatgccggatatttgcccccatcagacgaaagggtmttttattgatgagaacactcagttttcctctgcacttgctccactgtcaccttttgtgatttgattcaaagctagcaaggaaaaggacacacttcagcacaactcagcacagggagaagtgactaaagatttgtgtgcccacacgtgaagtaggagtatcttctgatgctgcactcttgaggcttccgtcctcatcccgacccatgaggattcagacctggcggagaccacagctcctgctagggccatacatgtaggaggcagggctgtgaggtgagggagttaaaaggttgcaaaaagatttaaggatcttagagggagggaaggaagagcagagtttctggggaatgttctctgcccaaggcaaagggatggcaggtgatgccccagaaggctctataactaagaacagggcactggggacaatcaagagaaagagtagactaggtgagaaaaactctcactaaatctccaatgcccttcagattctgcatggcttgggacaaaaygcttgagattgaaataaaggactgattgactattttcagggtgtcccaggatggcctgaactggataatagagaatttatggtatactgtaccatctatatgtatatgaaatatagtgatggattctctttcacaggaatttcctcaatcatcctaatctagtgattcttccctcctctgatctcctacaacacakacttttcattgctaatgtcttatgacaactcttctgtagttatcttgactactttttatattatattattggttactatttaactttcttttcctgatgggtaaaagtaaaatgcattttctaataaaaaataatgcacagagagcatatctggtcagaaataataggaagaagaaaaaaagaggctcttggggcagataaaataaaataaaagatcttcatggaatggaaacacttctgaaacttctccagtttgtagtcttttgaaagaaaaaaatcagaaaatcctaaggcaaagcatacaggatcttaaccatttttcactgtgattttcaccttgcttttcaggatgcaggttttgttgtcattaaaatgtttatctctaaaagtcacactgtctccacgtcatgtacatatctcagctacttcggcacacttatacatggacgtgtgccttcttcagatcacctttgactcaatacacayacttgtgctccatgacacggaaktgacaagatacaatgtgaatgattaactttgcaattaatattttctatattattttctataatatagaaaatgcatttgcttttggagcaggacagacagacttgtgatttggtgctggtaattaacttctctgaacatcaatgggggtacctctcagagacgtggtgaggtttccatgggatagcctgtgatmagttcttattatctacatgcctgacacatggtaagcccttaagacattcattccatttatagcccttcttctcctcatcattaagtcttttctctccagctggtttggaagctcagtgatggcaagaagcccattttgtactggttggtatattctacaacattctagcaccgtgagtcgcagacttaggtaattaataattacttacaaatttgaattgagaatgtgatggaatggtggaaaatcaaaacatgaaccatcattgcttagatatcttatgaaatttgttttgaatttttttcttaagtgtcattttctataattactaaaaccttcatatgatgattaaagagtaaagtggtttcactattgcttgyatctgaggaattataataacatatcaggaacaaaggttcccaaaaaacttgcttatagaaaatattagatgcatacttattagagggttcttttgggyggttcttcagagtcaaaggaatatagaaaatatttattttttagatttatttttccttatttgaaatttcaaagcaaaattatatgcacattttttcttattcattaatttagtatttgtaagaatgtaagggttatccatcaggaaaaagaaaaaggtaccttgaattaataatgataattatagtgattgccattacttaattatgccaggtacttatataatctcaaaacagtgctataaggacaaatttatttgtatgttctaacaggaccctaaattcaacattccccaaataaagctcatttgcctgatgtactcactatgtgtcagtatctgcttttaacagaggaagcagctgaacctccaaggatctgtggcttgccagctcacactagttgttgggggtgccaagaatctattttccatgaagtaatgtacaaaatgagccatctcaagtaccaccgctacttgagacatcattaggttaaaaaaatgctttatgttctctatcaaaactgaatgcaagattaaacctgtaaaagaacaaactgaacaaagaatgattaataccataatgtaagattatggcattcctcataccccaccctccttccaagaacaaacaaatctaaattacccccgtttaaaaaagactctcctattatgaaagaagcacttgtaaaacttgccagaatgggaaaataaatcatcagcccattctaacgtctaccgcattgtttaaagagataacagaatcagcaggaccattgcagctaggcaagttcttagacaacacccctataatgactgagttaccactgaaatgctccccgggaacatgaaactgcaacttgtggtagaggtttctttcccaacaaaaaacaggcacagagagcctatctggtcagaaataatgggaagaagaaaaaaagaggctcttggggacagataaaagaaaataaaagatcctcacggaatggaaaagcttctgaaacttctccaatttgcagtcttttgaaagagaaaaaaataatcagaaaatcctaagacaaagcacacaggatcttaatcatttttcttaatctgcctacaccttgatctcggacttcagcctccagaactgtcaggacatcaatttctgttgtttcagctgccagtttgtggtcccttctcatggtgacctaagaaaaccaaaatcccttgtgagggcaggtcccttcagtggtctcccctgactcaggatggcttcagtctctacaatgtctcagaggtcatatcacctcaattaccccaagtctgccctgtgctagatcattcaaatggaaatcccaagtctgcactgactaagtctcagttgcacatttttggctgccttgagactgcttcacttgtctgttctgacagcactctaagctccaggtgtctaaaataattcctcctctgatgagactgatgtactcctctcacattcaccctgtcacccaggctggcgactctaaagccatctttaatgatctttcccaatgcttctcacagccaagcagtcatcccctttccttgccattccttcattttcacttctttggcattttctctgcctcgaccttggttgaggcctatttatgttaggccagtccacaatcaactcctaattgaatcccctgcccctagtcctaccttgttgcatgcatgtctcaccagcccaggttcatctttcccctgttaatccatctcggtgtttgggtctttattttgcccacagagctcagccggttctgaaggccctggcatatttgattcctgaccaatcttcaccattgtcccctgcctgtgtcctccattcagacaggtttattgacccatcccaaccatgccttgtattcactcagtgaggagctatgtcttatttccaccctcattgtttttgttaaagccattgtcccttcttggaaatcacttgcatttatctaatcctaacccattctttaaaggtaatttcacatctcatgactgtgtgaacccttattcaaagataccagccacatgcatctgcctccttgagttcctctaacatatcctgatcccctttctaccttgattagcaagaacctctgagccacatgtgatccccagtgtcatactgtctccctctcttcctgatgtgatttatgttattgctttcagtttcattttaaagtctttttgtaaaacatactttttcaacaagaggactcaaatgctccaggcctggctcatactaagctctgaaaaaatattggctattaagttacaagcaaataaaaagttaagctaattacagctcatggcactcctgtggttgtcaattttgaatctcacttttcattattagctatattttttgggcagatgatataactttctgatcagactttacttcttaaagcctgggccttcgacttactttttttttttttttaacatagaacaaaataaatactctataagtgttctctgttcaatgaagagatatatacttcctaggaagactaacatatgttttaatagatgcattgataaacctgaaggacgggcttactgttcagtagtgctttgttcataaatgtagaaacatctgctttggggttatagggaaacttctttcttttaaatttgtacaggcttgaaaaatagttgtgctctataaataccccagtatgagtcatttgcttaactaaacagctgcttactcattagccaaatgcacttcattttaaggcatacacttaaatgaattttctcccatgcctctctccctcccccaagagccagaaaagtgatgtgcaaatacttttctggaatacaaaagagatacagatctgcctttgacatggggaatctaaactccatgatgtagcggaaagtcatcctagcgcaaattcataagctgtctgtatatgctttgcttgttcttataacaacacagtccttcattttctattcccatctctccccacacacctctggaacatcctccctcttcccattcaaatccaacataccaattctcccactggggcacccggcagggctttgttcttttttttccttctgtcaccatcgcccgtttcttatgcaggtggatagtctgcgtcaagactgctggtagaagccatttattttaataagtgtaagcaaatgacaagtattcttacaaatccttttgttaagatggaaacacagatcaacttctacaattagtggcattcagctatcattttctatccttcaacttattttgaacgataaatacaaagcaaccactcgcatctttttaaaattttattttgatttaacttttttttttttttaaagatggggtcttgccatgttgctcaggctggtctcgaacttctggcctcaagcaatcttctagcctcagtcttccaaatatgtgggattccaagtgtgtactaccatgctcggcttcatgcttttattttctttaaaaatggtcaatatcaccatgagttccttcttttggaagccagtaaatgtctaaatgttttggaagagtccagaggagaactttgatttctagaaagaccaaatgagaaggaacagatacagtctccagagttccaattatagtgtagctattctmagcaggattccaatccaacgtggatttttttctagcctgcggaggacatcttcaaaygcccagggctgacatttagctgttacccatctggtatgattgtaccttgttaaaatcacttttataccagttggtaattacctattgtcctgagctccccggatactggacccttcaatggtgacaccctgcctcccacaaaaatgtcctatgatttagcaactgaaaagttaatgctcgacacaggacgaggctctgactacgcagagccattttgattggacactggtttaataacttgactatcaccctgcaaatagcgctcgtttccaggtatgttaggtattaattattttctggaaaacaatctgactgtgctagctttgagaatgagagcatttacctccctaggtttatttacctccctagggtttattttcctcatctgtcaaatggtagagtgccttggcttagtgttcagactgggttccaaagttgcctcaaggggagattgctaatagatagaaatctggccccacttcctgcagagcagctcctcttccaggcctactcactgaggtccccatttcctcgattgtttggagaaaggattttgaaaactgaattttgctaccaaaaaaaagtttggaaaacaaaaaacccactggcttcaatgggcactaatctttcgtcctatttaaaaattctaaaattcaattataactgtgattaacaaaaagaatggcatctgtctaccaaaagcaaatagctacattgggtctactcggtaccaggcatcgttccaagtgctttgcgtattcgaactcacttcacccacagaactatgcctatattataattatttttagttattaaagtctaaaaagtgtatgttcagagatatttattttcacttttataattttcttagatacatttgaggttataatttattcaaagctaacattcctacaatgactatttaatgaaatgtaatcatgatattgtctttcttatatgctccaattacagatttctatgcatattttaaagagcgttttgtctttaacttttggatttcatcttgaaatcattagactaagagtatgtgctatactttataaattatacattagactatgtatgtactttctctgtggcttataccagtggtgcccaacctttttggcaccagggactggtttcatggaagacaatttttctatggaccagggcgggggatggtttcgggatgattcaagcccattacatttattgtgcactttatttctattattacattgtaatatgtagtggaataattgtacaactcaccataaggtagaatcaatgggagccctgagtttgttttcctgcaactagatggtcccatctgggggtgatgggagacagtgatataagtgttgcttatgtccacttcactctataatctcattttggttgctgtcactgcaatctcaggatattccgccttgactttaacccagaacctatggggatttgaagttctctcaaacatacatttcaggacactagatgcagctatacaattgaagtacctcaactcacttgccactataaagcctaccaccagaggcagcttaattgtcacttgccgctcactgataggattttgatgtgcgtctgtaagcgattgacttattatggtctctgcacagttaaacctctctgctaatgttaatctgtatttgcagccactccccagtgattgcatcactgcctcagctccaccttggatcatcaggcattagattctcataaggagcgggcaacctagatcccttgcatgcacagttcacartagggttggcgctcccatgacaatttaatgctgctgctgatctgacaggaagtggagctcaggcagtgatgcaaatgatggggagcggctgcaaatagagatgaagcttccactcacctgcgatgcagcccggttcctaacaggccacggacccgtactgcaggatgtctgaaagatgcactgtgtactgtaccagtaccagtctgtggcctgggggctggggacccctagcttataatgtttgtttcttcactttcaaccaaacctggaaatcagtttctaatgccagtccgcggctgtggcgctgggtagctgtaaatgtgctcagacatttcctgagctccagctcctgactgccgtggcttaactgggataaacagctgaatgcaaatctgagcatgaattcctcgtcactgtccttttccagaacatgaggttatggcaggcatcacaggcccggctgctccctcctgcctccactgctgcacttccgaggcaatgggttgctcgggacttttgcttctccctcccaggacccggtccctatgctcctggagggaagggagttgctggccatggttacccagttccctggagcagcctagcttgcgtccttgytggtggacrgcactgtcttttcttagtgagtccagcagagttgggaaatggaaactatatcatgtgagaaagtaaagctgcatgggatgagaaggagaaggttctgagggttcctgtgttttaataaagtggcaaagcacaggagagagggattccactaattcctgtagcctttacgggcaggaacagagctggtaagtggcaggctcaggaggctgtgtgtcaatgaagagaaggaagacttcctgtccactgaggtgtccacactgaggctgtatccacacagccattgtatgataactcgtcagggatgacaaatgaatccaaacaggatgtgtagcttgaacagatgagctttattcagcattaaccatccatccaagacttcaactagtttgttaatgatcccccaaacaaatgttaacttgtcagtcttgatttgaagttaaaaaacaaaggaccaaactaaagagcttctgcacagcaaaagaaaccaccatcagagtgaacaggcaacctacagaatgggagaaaattttttaacctactcatctgacaaagggctaatatccagaatctacaatgaactcaaacaaatttacaagaaaaaaacaaacaaccccatcaaaaagtgggtgaaggatatgaacagacacttctcaaaagaagacatttatgcagccaaaagacacatgaaaaaatgctcatcatcactggccatcagagaaatgcaaatcaaaaccacaatgagataccatctcacaacagttagaatggcgatcattaaaaagtcaggaaacaacaggtgctggagaggatgtggagaaataggaacacttttacactgttggtgggactgtaaactagttcaaccattgtggaagtcggtgtggtgattcctcagggatctagaactagaaataccatttgacccagccatcccattactgggtatatacccaaaggattataaatcatgctgctataaagacacatgcacgtgtatgtttattgcggcactattcacaatagcaaagacttggaaccaacccaaatgtccaacaatgatagactggattaagaaaatgtggcacatatacaccatggaatactatgcagccataaaaaatgatgagttcatgtcctttgcagggacatggatgaagctggaaaccatcattctcagaaaactatcacaaggacaaaaaaaccaaacaccacatgttctcactcataggtgggaatcgaacaatgagaacacatggacacaggaaggggaacatcacacaccggggactgttgtggggtgggggaggggggagggatagcattaggagatatacctaatgctaaatgacgagttaatgggtgcaacacaccaacatggcacatgtatacatatgtaacaaacctgcacgttgtgcacatgtaccctaaaacttaaaatataataataataataataataataataataataaaaagaaattactacttgttgagttttggttgagtattaaaagaagaataaccagaaatatatgtgctattaaatactcctcctttctcacattatatatgtatgtaaagccagatttgccttctacagtttgaccaagacaacatagtacatgcaacagagtgaataaagaggcagatataggaatttagctgccttctattaaaccagttattagttataaaaatgtaaaataaaaccactcacttttttttggcaaaatggttattttttttctaaaatgtatgttatttatgtgaagatttaatggagttattagttttcctttccaacttttattttaggttcaaggggtacatgagcaggtttgttacatgagtaaattgtgtgtcacaggggtttggtgtatagataattttgtcacccaggtaatcagcataaaactttataggtaatttttcaaatttttttaaaatttgttttaatttctaataaagtaaatattaatataaaaaaacaaaaaacaaaagacctcatttcctgtatctctaaagcacaagcccattctgagattttatagttttttactgatgtcttgctcagactttttcagtaaatattgaaatgattagaattaaatagaattcttatatatttgtatttactcatctctctstatttccggtggggggatagagttcaaggaaaagtttaagagacrtggttggttyatttcaggagtccaaacmttatgctaatgaggaagctttgtcaggggaatttcagatattggccagtggcagtggtgggaaccttggggttagcatccttgaaataacaccgcagaggtggtgagtggccagtgtgcctggatgacccagatttgagtggggtctcttctggaggctgactgcccaagcagcctgaagaatcacagagatactttctggttggtattgcccttctcccttctccccagagctatgcctgatttgggctgagacagyggaaaatacacaatgcatgtttcagacattcctgctttaatatgttaatatctcacccactctccagaccaggaatctcatatcttgtcctactcttttccacacaaaaagaaaactgcattacatatagaatttttcagtgtagctgttgcttatcccattgtaactaaccactttgacttatttttttgtgtatatcttgccttgacacgctttctttatcgaagaccacggaaacatggattctttgtgatattttgaaaaatgacaaattgaagagatttttatctctggagactcagcttttacatcataaagtacttctctcccctgatggctaacccaatcacatagttccacaataaacaagatgaatctagattcataagacagtatgtgcagaaaaatgctgttactctttgtggcttctttccctgtgccttgaaaatgttcattaaaaatctcctacttagtttgcctcattatattggtttactcatattggtcccctattttaatgatttaaagcacgtttgaaaagatttcttgtttggaacatccttggccaggccactactttgtaaagtagggaagtctgcaggccctagttgttcttttgaacttagttcataaaatgatttttaaacactgatctatcagcttttctcttctctttatcaaaattaataattcacataaaagccacctatttaaatggagtctcagctgggtacggtggtttacgcctgtaatcccaacactttgggaggctgaggtgggtggaatgcttgagtccaggagttccagaccagcctgagcaacatggtgaaatctgttttctacaaaaattacaaaaattagccaggtgtggtggtgcacaactgtagtctcagctaactgggaggctaaggcgggaggatcacttgagcctgagaggcagaggctgcagtgagccgtgattatgccactgtactccagcctggtgacagagccagaccctgtctctaaataaataaataaataaatggagttccattgttagcaacttacacaacctggaaaaatcaactgatctataaatattggcatggatgagtgtacaaatactttcaaaaagaattacaatttctctgtaataactatcaaggttatttggctaatagggggtccctggaagacctttaagacctgtctgtaaaagaaaaggaacgctggcaattcacaagacacctcagcaatgtagcatctgctcctggggcaggtaacaaaatccagttttaaattttgctcttaacagttaaggagataatcaagtcagcttgggattgggttgtgcacaggaaggctgcaaaaagattacaaaatagcctccccctggcagaaatgtaaaaaagccattccatgatttttttttttttcagttctgccaacgatttatcttcagaagacaagcagatgaggagacaaaacctactgatgtgggtacccaagcaggaacccccctcttgcaccggcgactcacgtgggaagaaggtaggaaatcaacagcataggggaaagaaaaggaaaaggagtttggaaacaggataagacaggcttcttttgaataatggagaggactcttagaaaaaagaaaagaaacagaataaatttttattcactgattccatttcagcgcagcaaattctcattgattttaatcaattgctttcttacagagttttgtccatatgtatgtgacaaaatcagcggtcatttaatgacagacttagaatgtgtgctaagaatgaaaccattgagatttccttgtctttcctcctttcagtaaaaatcatgaaggggagaaagggagggggtgagggtggggcaaggagagcaatattttataaaagtgacaacgcgttttgcatttgaattattatttattttccctggtggartttcaagcaggttattgcaaggaaaggaaaaactggaaattaaccaaacgtggtccagactggggatgacgagtttagcaggggctttaatgggacctcctaagcgattcaggagagaatgaatctctcatagtttcccttctcatgggatcactgaccaagcttccccaaatcagggtgcagcaacaaaatcagggtgcagcatcttttaagtgggcttaagacccacttaaaagcttatcatagcgagatgttgagaagataaagttttagttttttatagagcagaaaakatatatgagatgaggaataaaaggttctgtctaaaagcctgacatgtgtaagactttccctccactgttgttttccttttggttyggtaagaatgtggtgagtgaagtaaaaagataaggagagaagaaccacagagacccccttgaagcgtaaaactctgtttattaagagtgagaatgttcagtggcctgtgaccctccctttcctaggccaccttccccagtgcttggcttttccctgcctggcaccgggtgatccaggcaaggccctggctggggtgccgagggtgggggagacagctctgggtccttctgtgccacttcctccctgtgctggtgtttcagcagcaatctgcccctctgcgatggcagcctgtccacagctctagtgcccataggcttggggaccccgttccttcccttcatctgactcttcaggcctagagtggcgagggcttcccactgtgcttgkctctgggtacctcggcctctctggctgtattttcttaaccctgctccctgctctataaacagacccttctctaaattcacctcaactctcttaatgggattctctttcatgggattctgactgacagagtgcggctaaaaatatctcaaacctgatagaagctgagaggagctgaaatttcgagttgcagaaacctggatgcttgccactatatagaggacagcaaaccatttattatttatacaatttcaggcaaataggctctagaaattccaggtacaaaagatctgaagagatgactaaacactaactaggattagttacattaatcacggacttttaaaatgaccaaaaccacctgctgctaaattataaagtccaaaaagacttcaagaattgttcaaaactaaataatgtcaactctctagaatgatttattcaaatttaagtaggccagactcacaatttggagcacagctctttaatacatatagattctaattttctaaaagagaaatagatttgttacttgactattagaaaattcattgcatatttaaaaagcgagagaacttagctgtctgcctgttctgagtctgaggtgtaaatgtttacctcatcatacattaagtatctatrgattatgctcaatactttttgcaaaatgtagcataaagtcactactcatgcccttaaaataggcaacaacaatgtaattttagaaaatgttaataagttttcctagcttttgattttwtttttttttagctttggccttatcctttttttaggtagtggctggcattatggattaattacttaatacacytytgttgccttagaattcactgagctgaaatggagtgagagctaagatgctctcagaatattcttaaaatgactgtgctgcaaagaagcccgggtgaatagaagaaaatagaaggaatggtggatacaagtgaaggttaaaatgaggtaggaactaaatattatactggcacttggggttagtatttaygaattgttactctctggcaatgctctactcttttgtatcttcttcgggacagaaaattccgtaagaaagacctttccaggaagagcttgtccctaarcttatgggctcagggtttgaacaaagcgtctcttccaagaccttgtgaataatatgcatgtgggccacgtaacttcacaaagtaaagttaaacgaatgcattcttttcttgctattagaccccatttatcgcaccagctgttggtgatttcagcgcacctttccaagcctcttgagagttctgctctaaccacactgccccctagtgttctctcgctttggtgcaacgtgagtaaaaaaaaaaaaaccaccaagatttactttcaatatatacactgtattcatcagtgttttgctatagagaaygtaagatatctttctgtaaattatttagatatttaatcttatttatttatttatcccaataagatattaaagcatgctaagctggaatgattttttttcataaatgggtaaaagcaaaagtaaaagtttagatactattaaataattcctgatctaataaacggagacaaattacctaatatttttgagcacctattatgttagacatgtaagaaatactgtattacaagtgaagtctaagtaagcctaattcaatacttaacttttaaagttagaaacattttaaatatatttattaatttgatctcgaatttggggaaaacagtaaagatggaagagagaaaagggagaatttttaaattttacatatctaagtggctttgtattatgttttaattgaaaaatattttaaacaagtcaattctgataagatgtagaaattctacttgcagctttaggacaaagtgaattaaaaacaaaggctttctacttgaaatgtggccagtgtgactgagaaatggagtttctaaattttcatttcattttaattaatttcactgatttaaattttaaaactgattgatactcaattcagtcactgaaaacttttacgtatgcttgtaacaacttaggtatctgaatctatttttttcaaatgtaaattttaagatatctatttagattaaatattcctaataaaaatatagcatttkaattgcataggctataagtgaaaaatgtacagcacatttcaaatgtttagtacaaagccaaaagaatgtaatatttctcattaataattgttatatttagtacatgttgaaatttatatttagatatgtcaaacaaaatatattattaaaattaattatattggtaaaaaaggctaatagtatagaaatcataactatgtattcctctatctgaataaactgagagaatcaagttttcagattattaaagattgaaaaattgaaaatatatctgttttccatggtgcagttcacataccactggtgataaattactttagccaatgcaaatgtataggctttttattgttatgcattatttgagcaatagtgaaaatgaaactgagatatcaaatctatgattttgcagatattgatgtttaggactacactacacattaattacagtgctcatgtttataaatttttagtaactttgactccaccattaaattggattagaaatataagttgcagagttttcttttttttttttttcatattttaaaataagctttatttagatttttttttaatattttatatttgcatccatgccttcgagaaacctttcccacgggaaaggttattttcgtctaatgttacccataactcattcgctatttgacgtagttctcttaaataaatcatcctttagtaactcttagaattatctcctaatttacaaaaactgaaatgaaaaggaactactaaatcattagcaggagtggttgcaatcttattttcttgtaagtaaagggaaaatgataaaaatcaaccagaaaagaaattcatgggcaagaaaagtattttctaaaatctgtctccgtagagaaagatgccagcttgggtcgctccccstcacccctaggctcggttaaacagtttggtcaaaggaggacagaaaagtccttatgagggcctcaagttgcagagttttctaaagcctgagttttactgtttctatccttctggtgtcacttaacatgttcctctgtccagtgtatttcctgtaaggtgtcatttaacatgttcctctgtccagtgtatttcctgtaagttgtagttagaattaagaacagcaccatacaatagaaatatgagccacaaatataatttaaaattttaaaatacacatttaaaaaaagaaaacattaaaattaaaattaattttaataatataattttatttaacccaatatgtcacaaatattatgtatgtagtcatacatacatattaaattttaaaatttaagtcaatattaaagtcaatattaaaaattattgagatagtttacatctttttttcatattaagtttttgctatctggtgtgtattttacgtgtacagaacatctcaatttggcctatccacatttcaaatgctcagtagccacatgggattagtactgaatacagtagacccaggkacatcatcagactgaggttcaatttttggccaaaataccccacaggtggtggtgtgtacctccatacagaagcatatgtctggtggcttttttgtgatgttggcagtcattgattaccattgtctacacccaataattcattaaaggttgcaaaatggcaatactcaaattttaaaattccttcttcatttattagatggagtacttttatcaagagaaacatctcatcaactgcttggttacttggaataatatgtatagggaagttagramaaatgtttgatctcttccttttatttgccagtttttaaaataatgattttggtttccttgcattttccaaggatgatcaataatattttattttaacagtattattaggaattcrtgaatgttaatatttgatgtgcctcagttcattgcagagttaacttaattgcagagttctgatatcaccaaagccgtttaygatattccaggtccgtcttgtacacttccttccacagacctctaatcagctatttcttcagggagcctktgattccttttagtggaaaatggtatgtagagaacattatctgtgtgtgaagggttgagcacgttccatcttttcagagaacaaagctagaaaacatgtattttaataaaataatattcatcatgaattcatgatgtttcctattcraattcaagtagaggacttttttcacagtgtccttttccctgtcaaatttcaaattttattgacatgaatataattattcatttgctktattcataatacacatgtgcaacagtctcgaataaatagaagactaccacyagcaaaatgattacaaaaatcagcttaagatactttgcagttgtttttgtcattatgataacattccgctaaaacaggcaaattaytgtgttttacggtcacttgggaatagtccctttggtgctgttctgccayctactggacagacaggctmaataggcttattttacttttgatattcaggaatcactttattttaaattgaattttgctttgtaataatgcaaagttttacatgactctagagtcaaatttacaaaacaagtctagtttttctccctgtctcctcaatcttatttccttcctctacctttaaatattttatttttaaatgctgtgatttatatgtccattagtatatatttgtatataatttgtatacaaattatacaaaattgatatatatttgtattttttatcccgtctcctttattagataattggtmgcatactatacagacttttctccacctgaaagaaacatatataktattattaaaagtttatatgtatataacctggagtgttgggttttgctttgttaggtaatctggaaatctttttataaatgtaaatttaatcagtaaatttatttttaggatccaaatgcttggcatcacttttgtcatatttgttacatgtatttctgtccatacaagcatgcaaacatcgtcacatctatatacccgtgactacctctatctttattgccttacatttctactcttttcctatgtggtcaatatcaaggctgctccatgaactgtttgctaccaagctatgatgacttgtgaatagaaagtaacaamaacaacaacaacaacaaaacacatttagaaacatttaaagtaatttgatattgccactaaattcaagcmtatgattttgtatatttcaagtgtcgcttacaaattattggggggaaaaagtggcccttcactacagagtctgagaagcacttgcctacattatttgcttgtgcgcatgtgttctctctctctcattatctttttgttttgtgttttctttctgagacagggtctcgctctgtcatctaggctaaagtgcagtggcgccatcatagctcsttgcaacctcaaacttctggactcaagggattgtcctgcctcagcctcctaaacagctgagactacaggcacatgccactgygcctggctaatttaaaaatgtttttgtagggaatagggttctcactttgttgcccaggctggtcttgaactcctgagctcaagcartcctcccacctcggcctcccacagggctgggattacargtgtgaaccactgcacccagcctctttttgtatttagaaatgtttgtgctattttgttctgagccctttttattaacatcttcatattatctataattttattaatatctgtaaataatacctttagtcccatttttacttttctcatcctactatgaataaaattgaaattagctaataaccccttcttcactttctcccctgttccctggcatctattttcaacggatatgtttttattctccattgatatccttgaggcaatcacagagcttattctactttttatattctctttccagtttatgcccctcctcattttttgacagttaattgtatatagagcaaatggccatcacattttgtactctctccctcgtaaactacaggcattatgagttatacaaaaaaatgtctacttaatgctcaccgccagttctattgtcgatgattctctagtcatattggttttccgaggcttggtctccataaattccccaggaaaggctcataggaacattactccctgagttgttgtgtgtttattaagaattgtgaccatggtatttaaagatcaatgttgctggttataaaatctttagctcacatctgctttccttaatatttctgaaatattttataccattgtcttctggcacaaagcattgctgtcaaaaagtctgatgacaatctgattttccttctcttataagggatattgactttttaactagtgccaaaaaaaccttttttctttttatttaaaggtcaatagttttagtagactgtttatatgtagtgcattctgggccagttttaccaggtacgtcctttcaaatgttgggcaagtgtatttttatgtcagaaaagcagtctttgaattataattgataatatttgttctttcattacattgattttcttttttaggaacttctattatatgttcatttgttctcctattcctattttctatgccwttttcatatgtatgttttaaatctttttattttaaaaatattcattcttttctatttttcttaaggaactttctgcrgtgttcattcactattttatttcttctagtgtagtctaaaattttggaataagttttttcttcaactcttaatatttttctatttctataaactccttttgaagtctttgttttttcaaattagcttctttttgagttcttaaaattctgggttatgctgttctttaaaagctgctatcttttttttcagcttgagttaaaatattaggctaaattttcttctgttttgtttgcaaatctttctggcatgcttttattgtctgcagagacattacattcctcaaatcatttttctttatggtagattcgatggccatttttttctttattaatgtttaagtgagatgagttttcttgtactcttaggagagtgaaccaggatagcttcctagctctagagatttagagctgccttttctgttatttttggatgtgtttacaagtatgtatctgctatctgttggctctttgctcttccctccacttgcatctgcrtcttctttcttttgcctcctttgctcctatcatctatttcctgctcaatttggattctattccagtagtttctcctcaatgtggggttttgctgtggaggagatggctattaagggtccctttagggtccatggggcacaggctcctccagcacaagctggttctcttgggttcacccacaagttggaggcggcaggactctaggggtttcagttgcccttcccagagtggcccaccaagccttacagtggatacttgtgaactgtttttgtttctctgcctcttggggccatcagaagtccctttgtcctctttttatttcctctgatgtgttgaagacactgtacaggtcttaatctcaccagtagtttattacaacccacacatatttggaggtttatagggatgtgttttcccgctgctttattggagatgttgtctgggaggtcttgcttttgctatcttagttgctctgtttccatggggtgatttggagaggtggaaaaattatgccaccttgccaccactttcctaattactttaagcaaccaaactttcagcaacgaaacttttaaattactttaagcaaccaaacttttagtctatttctgttgtactttgttagtaagcatctacctgcctgtctatgttaacaggttttctgatgcactatacagttgacctttgaagaacacaggtttgaacggcacaggtccatttacatgcagattttcttctgcctctccccggctgctgccaccccgagacagcaagaccagacccatctcttctccctcatcagcctactcaacgtgaggatatggataaagacctttatgatgacccactccacttccagttaatgaaatatatcttctcttgcttatgattttcttaataacactttttttcctctagcttactttatggtaagaatacaatatgtaatacatattacatataacatacaacatatgtattcaatgacgatgttatcagtaaggcttccagtcaatagtagattattagtagtttcgtttctggagagtcaaaaattaaacagaattgtgaccctttggggctggttcccctaatcgccacattattccggggtcaactattgtttaatcagcatggtcatattgacgtccatgcatgttgttaatacttgagccctcaacagagaatatgtgcacagttcagggatctattgatgtctttctacactgccaggtctctatctctctctccccttcccggtctgtgaaaagtctctgcgtgtctctttgttgccactatcttgagtgttctggatgctgatacaaggccagttgaaggtggattgtccatctgaagtgctcctgtgtgattactaggctacaggacagtcacaaacatctctccttcctttcctcccctaagaagctttgagccctgattcttcaccagggtggtagaggataagtcttagagaaccatgacccctcgtgggaacatattaaaatgaggggggaatatactgggaggaaacaatagtttgataaaagcttcccagttggttctaacaggcctcctccgggttgtagttggatcctctgctcttggtagagacagggaaggtgccatggaattggccatgggtccagatcacctggacatcctcaggcacaggactgggaagtgactgactgagatttaagggataggagaaaagagagaaaagaaggcaggagcccaaggatgtaatttctttttggacccatcttctttttcaggtgcttaatatcattgttttttttttttttttttggaagttaacagatttatcttgaaagcatttgttgttattcctgcttaaagtctagctaagaaattctttcaactctaaacagaaaacaaagtatttcattttacaggtagagataaaaggtattgaatgggaaagtttgaaagaggtggcatttggggtgaaagtgtctccatcaaagaaaaactgatgacatcagatctgtggctgttttaatagagggagagaatacaggaaggcagaggggctgggaagggagatgtaagagatagggagcagcaagtggatgctggaaatgaccataaactgctaatttcataagtgtatttatcttcacttgtgcacagaaaaataaaggcgctgtgtgcgtgtattaatgctctatatgaatgccaggactggtgcagcctcaggctctaaggaaggaagatggtcaggtatttggtaagatgatttgaagacagagaagtgtcaaagaactgatggtctgacttgagtcctggtgtatgatgtaagagcttaacagactataatattcaggataatttctgaggaacccacagaagctacagtgtccagggcacgttagtaactgagggtcatataattaaacaaataattgttatagatggttcatttgtaagttagtagacatttctgctataagcaaaaatgttgtcgttttgacttcagagaaatagacaactttatatttctgaggcacttatgttttctctattgtggatgatgtatcttccattactaatgaaggatcataggaattgaggtaattgaaacacatttctcctctctatggtattaatatttttcccagtgattgtttttcttttcctgtttcctggatatgacagagcacatgatataagtacctaatcactcggggaacagctacccccgaggccctctgccttcctcctgctctccggggagtcccttcttcccccttcccttccgaattaacctgttctttaccgggatgttaacatcattcagccgctttccccattcaaggttagtgttccatttttagccctgaaatacacatgaattagattactagactattcactgatcaataatgtgaaaaaaacaaaaaagaaaaactatgagtcagaagaggaaaaatagtgactcatcagacagagggcgtctctattctattaatttcaactgcacagtctataataaccagtgtgtgagagtttcagccttcatccaaataacgtatgtgaaaccacaaaggaattcaagctgcagacaacaaggcacatttaagaggttacaatgttagtgttgagcttggggacatagaatagagcattgatttctgataaattattgtgtgcattgacattttcggcacaggcatttctttctatattatggttccataaaaaagtcagtttgggtccattaattgcctcagagggaagggtgtgtgtgtgtgtgtgtgtgtgtgtgtgtgcgcgcgtgtgttaggtggaaaggtggaatgtgctggattcgggaggcgtagtgggatgttggccttttactttgaaatttagatgtacatgcctaataacgttagccttttatattttaatttaggatatctgggctccattcttcccttactgcttcccaaccatgacttactgttcttagcgccgttgtcattcaatcaggaattctctcgagcagaccctctagtggcattcagtggatcccagaagagatttagcctgttgggagcataatgcatgttttagtctcctggtcacatacaaatgaaataggagggggtgacaaaatataggaatttaggagcgccctatgacttgaccttcttttgcacattagacagacttctcagatgtttgaatcttcaaattattatgtctaattacttaaactgaaaaggtctaagactgaattcacttttttcctctaaacatctttccttctgaatttctttgttgtgttttggtgatactctattccccagctgcccagttttcctaatttttaaaatatatttacccagttcaattatttattcaacaagtatctattctgttggcatgttgtgtgagtcacgtactgggtactctgggatggagagataggttagtgcccaccctcgggagttcacaatttagcaggtccctttctgcatcctctccctcctgtcaagtgcacctgtgtctttagtttcttccttcccatccctattgcagctgctctgataggagccttctccatcacacctggcccacagcaatcaagtgctccatagtctcagggagcctaaaagctacagcttcaaaatccagtttctcactctctaacctcttccagtagttctcaaccttggttctgcatcaaatgtattggtaatttttttttatctgtctgtttttgacacggatgcctaggaacccttttgtagagggcttggttcatatgtaatctctaaatggtgatttccttgggcttccagacaagagacagttgttcactcctctgtgtgtctagttctttgtacttcacttttactgattacattggtattcctgtgccactcagtccatttcactagaccatgacaacactgaggccaagaaatgctactcagctttctgtaagtattagttccttttaccccatctttaatgcctaatgatggacagtaagttcttgccacatcttcattttatgaagtattcttctcttgccattttgattacagggaaaatagcaactatgggagactagcaaagcccctgcatcctgtttgtcttctagggccagagcagggctaaactgtgtttgaaagaacagaaaatgagttgttccaattttctcttagaaaaagtccaagaagcacttgaaattccagcattctcttctctccatgggaagcaccatttcatttctcatttcttcattaatactctcttttccttgtccccaagaaaactaccactctgttctcaccaacgagtataaagttgtttgtttcttgataagaacagaggtcactctaagagtgctccagctgttgaatttttgcagtcacagttggaggagggttaatcatagttatcgcaagcagcctaacttatcaacccttttgagttatgtgtccctgggaaaattagtgcctctgttccccacccaacccctggctttttttttttttttgagacagggtattgctctgtcgcccaggctggagtgcagtggcacgatcacagctcactgcatccttgacccccagtgttcaagtgatccttctacctcaccctctcaaatagctgagactacagggacctaccaccatacctggctaatttaaaaaatttttctgtagatacaagttctcactctgttccccaggctgatgctgcactcctggcctcaagttatcctcctacctcggcctactaaagtgctgggattacaggtgtgagccactgcacccagacacttcatggaacaatgcagtgttctatgaagtgcaatgtttaactgaataagaaacatacagtaattgtatagaaatagggctgtagtgaggagtgaatgggataacaaggttaaaactatcaatgtagcgcctggcccatgctaagcactcaatacaagaataaccctggtgacacatattatcttcatcatagtcagatatttcgaaaagactcccagggaataattatgggctttggagcccagggcagaggcagggcttcttgctcctggggcagctccaggaggtgctgactggaagggttgaaaggccaaggtctgaagagtggctgaagagtgagtgacccttaagggagcatttgagttccaacccccacgtttcccctcgtgctgttttattactttcttaaaatcatttcattgctggccgggtgcagtggctcacgcctgtaatcctagcacttgggaggcagaggccggcagattacctgaggtcaggagttcaagaccagcctggctaacatggcaaaaccccgtctctactaaaaaatacaaaaattagccgggcgtggtggctggcacctgtaatcccagctactcgggaggctgaggcaggagaatcacttgaacccaggaggcagagtttgcagtgagccgagattgcatcactgcactccagcctgggtgacagaacaaggctccatctcaaacaaacaaacaaacaaacaaaaaaccattttactgctatgaggcatcagaataaaaccctaaagttttctcaaaagggaaaatgtgtgtgtgtgtattggcttgctattcggtcataccatggtgacttatgtcaaggatttataaatacttattgtgcaaacactatggatcctagtcagcattcactcaggaactcaacctgcctgtatttttaggttatcttgagatttctttctattattattttgcatgtaagagtggttcccctttttgcagcttctttttctgtcaatggcaagctaaaaacccacatttggaaaatatgactattcatttgcttaattatcacataaactattttttaaaattggaatcagtcactaacaaatcctgctgggctgtttcctctgtctggactcctcacccactgggatttttccactgaactttatgacatacagtagcccccaccttatccatgggggatacattccaagatcctcagtggatgcctgatgccccaaacagaaccaaaccctatatgtaaataaataaatatatatatatacacacacacacacacacacacactcacacacacatatacaccaagtaacaacaacaaagttattatgtccagctcttccgtaaaataaacatcaacttgtcatctctttgtaaaactgcacatctagttatattttttcaggtatagttaaacaaaaaatacctattttcgcaaggtatttgtaggccatatagttattatctttgaatccaagcaggaaggcttagcaaaggctctgtacagaaagctgtcgtgtcttgtatcaggctacaattttttttaagttaaatttcccaaagacaggcacagcagttggatataaatggcttctgaagaaatcacatctgtctaaaaatgaaaatcatttttcatgcctagcaattttgaactttccaattgctctgtgaaagtgttttattctcatacaatgaaaggcagaaaaaccaaaaccagtgacggggaaaaaaataacaattcctatacaactaccatatgcttttgatttaggtagttcagtgctcaatatgttgcttttttgtattcgtttttacttttctgacttttaaaccaatgcacaaaatgggaactggattattcaaaggtagaagaagaagaagaaatgctgctgctgatgaagccttgctacaggacgtgggaagggagtgacagccaccgagtctctctctttgtttttgaaacggagtctcgctccgtcgcccaggctggagtgcggtggcgcgatctcggctcactgcaagctctgcctcccgggttcacgccgttctcctgcctcagcctttggagtagctggaactgcaaggcgcccgccaccatgcccggctaattttttatatttttagtagaacggggtttcaccatgttagccaggatggtttcgatctcctgacctcgtgatccacctgcctcggcctcccgaagtgctgggattacaggtgtgagccactgcacctggccgccaccgagtctctttagactccacttgcgctccatgctcctcttgacttctgacccaatctgcaaatgagcggatgcggatcatcaggtcgctgctttcccgtctggcatcactaatcttgtatga

SEQ ID NO: 96571 - DNA, 13845 bp, Homo sapiens
acactttttattgttcatttctggagaaggaaggggagtggttttcgtcgtttttaaggagactgatagcttcagtttgctgggaacttacaatgtgctctacgctgagcacatactatgtgttaggtgctttatgttcacagaaccctttggggcaaccccattccaaagatgaaggcactgtcgtgttaggaggttaatttgtccaaagtcccgcagtgctcactgcgtaaaaactggactgtgatgccttctagagggctctggtgctccacatcaagcctccagcttccagcctggaggagaaaagtttccaaggacagccgcttgagctacaacactaggcttactggagtcaaggccaaatccacctgcctgtagggtagggatggggtggggagggagtgagtcctctgctgcatgcatgcttcactaacgagtgattaaaaatggggggcacatggcccagtgcagtggctcacgcctgtaatcccagcactttaggaggctgaggtaggaggattgcttgaacccaggagtctacccagtaggcagcatggcaaaactgcgtctttacaaaaaatacaaaaaaattagctgggcatggtggtgcacacctgtagtcccagctactcaggaggctgaggtaggaggatcacttgagcctgggaggttgaggctgcagtgagccgtgatcacaccactacacttagcctgggtgacagagcaagactccatctcaaaagaaagggggaggaggcacaaccctcgcagagcactcaggcgcccacccctactgaacaccgtcaacttcaagagtccatttcaaagtccatcacccacattcaactgtttttctggacagtttctaccctagaggcttttcctgagcctgccagattgggaataggttccctggatgggaggcatcactgaagaataaactgcaagtggtcatgattgcctgaagaaagaatctttttcttttcacaagcccctacaaagactatttcaatagttctcttcagacctgctgtgggctgactctcactcccgctgccctgcaggtgctggggctcctgcggctggatctgccgttctccattcttcccctgccctcaagtgtcagaaatgggagaggaaagttgggtatttaatattctttgatggagtttataagtatcccaattagtcattttccaggatattaagaattctatacctcatctcacgctgcctttcagagctctgtaaacacaagggcatgaattcttgacggattctggctttctgatttattttcccccaagatacttaatcaaggagtaagtcatttaccttctccaagtatccttctcttcttccctggagaatgttgtgaagtctttctcgtgtttccttccgcttctgaaccctttcaaggaccaaggtctgtgctgcaacgatccagaactttgcccgtagaagttgctttctcccctagctgggagggcagagccctgctctcagcagggctcccaggacaaggctgcatgtagtaaacatctgtctgttgtggtttgttccagagctggtgatgctgctggagtggtggtcgggcacggaatgcaccatcttcacggacccgcgcgcctacctcaagtatgggaaggaaaatgccatcgtggttctcaaccacaagtttgaaattgactttctgtgtggctggagcctgtccgaacgctttgggctgttaggggtaagtcagaagtgcattcccccctgcctcacacatttctctggttcagccccaccacttgtctttttgctcctggtcattcagaacttgcagaagaatcaacagagtttctacttgatgaaatggtcctaataaactgctttttattcttgctgggagtcagtcttaacagcttcttatgggcaatcataagaggtactcaacaattgctacctgccggccattttacatatgattcatttatttaatccttacagcaacatgaatagatgatgtgccacactccattttttaaaaactaagttatatagagcttaatattcggctcagagtcacacagctgtaattagatttggatttcactcccatccatatttcttaattccatgctctactgcctccttggctaacaggcagacatcacctctgcattttgatcgttgaaggcttaagaactttgagtccataagtgagagagtgaactgcaaaattcagaattattctgaaattctgttttttttttttcccaactagtttgacctcttgcacgtagcttgcatgcctttggaactgggtctcttcagttgacttttgtcgtcttcaacacactgcagcgtgtagcggttgagcctgtgtcacatagctgaatcagagtcatctgcggtactcaggtattccgtaggaatcacagtgtacacagtgtacattggtctggggctaggaaaggtcctaagagtttgcaccagaacttagagatcaggttttgcacctgggaacaatgccctgtagaacagatacgggggctgctgaaatcaccttgctttttggtagcccctgaagacaaaatcgtggtgtttagaatatagaagattggagacagaggctatcaggccatggaggacatagggaactagacgggtctggttcctggaggcagatgaagatagcctcctgcccactgttttctccttttgttttcctatttattctcccagtgctaacttgatatcttcttgtgtgtacacgtgtgtgtgtgtgcaaatatatttctaggaacaagagcaaacattctagtaactatcattctctgatgtggagaacttgggcagagatctgagttacagctttgtggatttattctctctgatgagagatcgccccttagaatgtcatggtcctaaccccgtcatggataccaggggtgaatggcagggttcttctcctgcccaggaggaagggtatggggagccggtgcatcttgactgtcaggtcacctgtcttaccacctttacagctaggctttctgaggtgccagcgtctcctggaattcaaactgtagtttagaggcagctggtgattttccaggctttgtaagtactttctggtagtgttcatgcttagaatgtgcaaacattcataattcgtggaccaggagtctctgaggtagagcagaaggcccattgaacttgggggtgccttccaatccctgcttgccccttggtggcattacacccacgagctcactccgtgtgctgttcaccttatttccgtaatttctaatccttaggatattattatccacattttataaataaacccccagagcctcagtttggctgagtgatttgcccgaggacaatagctcctaagtctgctttcaaagcttctgctctttcccctggaagatgttgggggcacaaaagcaggggccctggggcccaagacctgctccagaaacaggaccctgaccatcctaaaacgacccagaccagctgcagtaaggaccaggcttctaataccttcctggctcgtgatgtgcaaaggcctcattcgaggggtgcaagtcacccgcaccttcatggggttggggatggagttgcaggagctggcagagcagggtcatgcacagagatgctggagaagcacccagatgcccagcactagcaggcacggggacaggcacagatgagggagaaggtgagccccacaacacatgcagggagggacccaggtccagagagaggacatagcccccagacgggaagagacattcacggagcgggaatttaatctcagcaccgtttagggttttgctcccaaaggcttccgaatccatgatcactttacaactctgagcataagggcgggagcgctgatggcgggaaagcaagtcaacagcacgcccatcccacctgcagcatagggaccgcacctccccttgatttcatcggtgatattctatttataggacttcactcattactgtgaacacccaaacaactaatgctgtgtgtaagggggtctgcgccctgccactgatggtggagactgtgcttaggattagagtcttcgggggctccacttacaggtgaaataggcaggtctgggagcctggggccagggcgatgcctcttctcttctcactggaagtttgggagccttgctcagtgggggccttgggttttctggattcttgctaaagtgcttccttaagccctgagtcctctcttctccaaacaccacagaaacagccagtgccattgttatgcacattctcacaaagcaaggagctagagagagcaggtgccaggagaggactgagtggggcaggcacatggcaggcactggctggggcggatgggagctgccagcctgtaccctcccagggaaccccctccccatgtcacagggaacagctttgccatctactggagagctgtggcccatgacggtgggtgagatggctggtgctcatctctgccaccctggaagggggtaaagaacggcattgccttatattcattgttcagcaacatcttttgtctttaatgaccttcagaaaaaaaaaacaacctcattcatctctctgttttttcttaaataacacatgatgttgggatccttctggagtctgtggaatttgctttttaaagaggaaaggaacagaagaaggttcctgaccaggcatttttcatcctcacctatcacagtccaagaggaaatgagtttaaattgaagtcaatgaaatttgcagaaattcacgaaggtggcatttttaaatgtaaaattggtctttttggggaaagtaatggaattgtctttttaacaaagaggctttcaaccttttaaatgtactcaagatcccatgaggccactgctcattgcagtgcctgtccccagaggctctggttctcctgggagccagtgcttcctggcatgtgccagggctctgaaggctttggttgatcttggagtcacacgctgaaccttgcctccctggagatgagagtgacacgcagtcagctggggcacaggtcactaaggtgcccaacaaaccgtggtgtgcaagcgcaggtcaggttcctgaggcttcacgtccccatttgcttatctttttcccttagcaggtcccggctggttgcataagagcatgatcgttcagtgtctgggtagcgccaggccctggcaagcacaccatgagcagcagctattattatattatcaatatttatctgccgggccaactgggatatttgtcttcagatccttaaagaagccatgtggattagttatccatggcagcgtgatgagacccaaaacatagcggcttaaaacaacaagcgtgtcataaaggtcccctgcctatgtggtcaggaatccaggtgcagctgagcgggggatctggcagggtctctcgggaggggcttgtgtgtgatctgcctccaagcttgctcacgggtttgctgcccggcctccatccctcgccacacaggcttgttttaaaacacagtgtttcccggaatatggcaactgcacccctgaggttgagccatgcaagagagagagagcgggcgcccggggcaggagccatgaagcttctgtaaccgggacccgggagagacctcccatcctttctatccatactgttggttggaagtggatcagtaagcaccgcccgtgccccagggatgtggggtagggtgtgcaggggcgtgggtgccaggaggccaggatcacagggccccttggcggctgcccaccccacggtgacatgacatttggtctgagaccttcccttgccctcttagtaaatatgtaatacagctgggcctgaacacagattgagatgttgcatttctggcctggcacagtggctcatgcctgtaattccagtggtttggaaggccaagatgggaggatggcttgaagccaggaatttgagaccagtctgggcaacacagtgagatctctgtctctataaacataaatcaataaataaaacaaatgaaaaatagcagcattgcatttctttgcacagagaaaggtgagaggaggagagtggcattatccctcctaggcagagtgcctgtgcgtgagggcgcccataaagccctgtgctgcctctttaaacgaaggattttcgatcatgacaacgatagcaattgatataccttcaaaatacgtgtccagtgagtgttgattgtgtgtggtttctctaggagaccgtgttcatgcaacacagcattatttcaccgcctttaccccagcttcttcatacacatgcacttgtcaagggctctttggctgaagagaagttagaagtttccagatatggaggggtattttcagcagatatgcccaccgccatggttttgtcagctctgtagggtggtcttgcaccctgctyactgctggcatcacctgagcctatggcagatacccagtgctgcccgccaccatgtgarttcatcagctctgcaggcacagaccttgcactaggaatgggctgggacgccaccctctgcctcttaccattcactgggtttggcaagtgtgctgggatctggaatcacatggatgaggaacccgataatggtgacgaccgaggtagcaggcgaaccactggccagggcaggaagtgggcagctcacrggactatggctgcaccgcgggttcataccgactaccatcctggaggtgggagcgcatgctcatctgtaaaagtccggtcccacgttggacacaccggggtcttcttctttgttgaccaggatcctctggcagtgtctttaacaagccagagtctgatcccaccgctcataaagccagggttgttgaaagcttggggcttcctcctcctctgtgcgcagccctcagcaaacggtcacagcctgtgctgtctgctgtacaccgacttggtatcatcccatgaactgtccccctttcgtgctctgtgcttagggccctctgatgccccatctgcctgtgcttcctgcaactgtttagcaagcacctattatctatagggtgctggggtgctgggcgaggccaatcgctcctattactttctgccctggggacgtcctgttttcccacctacccctgtaacgcctctgctctgccttcccatctgcggggctaacgccatcccacaagggctgggctgtccgttcagaagagaaactgggaaggggccttgaggacctgtgtccaggcagggtggacaagggctttgtgcagggagctcctctcccatctttgtgtcctgacagccgtgaccgtgacccctcaaagcagagccagtagtgatcagtatcctgctgcttcaagcctgcacggtcctcttctcctctccgcacatctgcatgcctgtcaaacccagaatagtttggggcctggtaaacagagggaagttggctggaggaggccagtcaggagtgcaagaaccccgcgtactctgtcccacgtggataaagtctctaattccagtctgaggtgaattcttagagagtgctttcatttaatgtttgctttatgcatttcccctgcagctgtgactaattgtggaacagcatacattttgttttgagactctcttgagatttttctggcagtgtaaggtctacaccattttcctctcagcatcagagaaggcagaaagcaagagaaaggaatgcaatgtgagcaaggccaggcacacttgtgctactgcagttggcaagaatggagtctaatcccagcactttgggaggccgaggcgggtggatcacctgaggtcaggaatttgagaccaacctggccaacatgttgaaacctcgtctgtactaaaaatacaaaaaaaaaaaaaaaaaaaaaaaaaaaaattagctgggtgtggtggcaggtgtctgtaatcccagctactccacaggctgaggtgggagaatcgcttgaaccctggaggcggaggttgcagtgagctgagattgcaccactgcactccagcctgggcaacagagcaagactccatctcaaaaaaagaaaaaaaaaagaaaagccaggtttggtggctcacacctgtaatcccatcccagcactttgggagacctgaaggtcaggagttcgagaccagactagccaacatggtgaaaccccgtctctactaacaatacaaaaaattagccaggcacggtggcaggtgcctgtaatcccagctactccggaggctgaggcaggagaatcgcttgaacccgggaggcagagattgcagtgagctgagattgtgccactgcactccagcctgggcaacaagagtgaaacttcgtctcaaaaaaaagagaatggagtctctcaccttttgatgaacacacacacacacgcacgcgtgcacacaaactgattcattattttgagctccagtcttttctgcattttgctataactagggacagatttcagagattccaggcccataccatcctctcttgcgcacacctttcttgccagaaggggtctgtacaacaacttactggcagagtttagtggcagaagtggaacacagaaactgaaagctttctgcttctcccttcccactagactctgggcacctcaaggccacaggtaatcataaccagcattgagttctcggcacctgcataatgcctggcatagggggcttcttaatcaatacctttgcacagacagagcagccttgggttgaagattccaatctgatgcgcttatgcaccatacatcagaatggaggctgtgctatggggagacttgtggggaccctggagtgatagggctggatggcttgtcttggctccagggaactgaaacatttgctacagtggctccagctggtagtcaagaaaacagtcaaaggactcaaaggcaggctgtttagcctgctttattgttaaggaacatctcacctgtttttgaagttccacttaagatacctcattttatatatttagtagaaataaatgaccttggctcacttgactaactggtaaccctactgggaaaccttcatgaatgactggacgtttgcaaacaaagctggccatagagcctcagcccctgaggggttccttgctggtgttagtgggggtggaggcggtgcaggagcaggataccctgctgctcccagccatgctgctcgcagcaccggggtttggaatcttcatctgaagccttgatgagtagccattttggagaaaaccttaactagaatggcctcattccgatcccttttcaccccagaggctgtagagcttctgaaggtcagggtcagagtactgggtctcaggccctctctgcgtcagctcttcccaacgtccagggtctctgcaagggctggcccacttgccagagatgcagaccaggtcatggggctggctgcttccctgagctgtggggagcctcaggatgggtcgctcaactagattagctccaagcacctgccctaagacaactctctctttcactctctctctccatagtggtttactccacgtgaaaattttagattgtctaaatatgcttgtatctagacagatctgttgatacatctaactcatcagtaaatcctttcacgttgacctgtgaaataaatccagaattgatgaaattagtatattttcttgtacattctctctgaaagctgttggcatcacacatggaagcctctgagtggcctgggaaagccatgatagttatagcctattgaaccttttgccgggggaactgtcagtatgtcttaatagcagtttctagtctctttgtcataagtgagttaacttgggcaactgtctgtgcacagtgactcttcagttgtgcttaaataaatgtaatctattgttgttactattacgctaaagcatggcagagaaaatgggttgaataaggaggtgttcagatactgcttgctctgggatgaaaataatagctacaagttattgaacgcccatgtcagagtctcaactttgtgcttttgtagatgtttccatacattattcagtctttacagggacaccagggaatatgtgttgtcttcctcatcacacagaggggaaacagaagctcagaaggattgggtgtcttgagcacagttacacagctgggtcgtggtagagcctggttagaaacaggactgtctcattccagagcttttcatgcagccctgccagggaaagagaattgagtgacatttcttcagtttgaagaagtaaaagcttctaccttaatattttaacatgtttcttaccaaacatagttaacatcaaaacctagacatattgataacatccaaaattttaaggctgaaagatggattaagccagtataaagaaagttatgtctcttcttttccctttgatcatcaaaaacacctgttaccccagcactttgggaggccgaggcaggcagatcacctgaggtcagcagttagagactagcctggccaacatggtaagaccctgtgtctacaaaaaatactaaaattagccaggcatggtgatgggcacctgtaatcccagctactcaggaggctgagacaggagaatcacttgaacctgggaggcggaggttgcagtgagccaagattgtgccattgcactccagcctgtgcgacaagagcaaaactctgtctcaaaacaaaacaaaactgtttctgacccagagcctcacttatattcccaaagcagatggcgaaagcatgctgatgtcagccccttcttaaaagtgacattgttacagggatactgtgaaatatgtttacaataaaaaactggaaaatctaacaaaataaaaatcacttgtaaatgactgcccagtgctgagaccagcttggtcaggcagaccctaacccagcggtgctagaggaattaaagacacacagaaatatagagatgtgaagtgggaaatcaggggtctcacagccttcagagctgagagtcttgaacagagatttacccacgtatttattaacagcaagccagtcattagcattgtttctatagatattaaattaactgaaagtatcccttatgggaaacgaagggatggggtgaattaaaggaataggttgggctagttaactgcagcaggagcatgtccttaaggcacagattgctcatgctattgtttgtggtttaagaacacctttaagcggttttccgccctgggcaggctaggtgttccttgccctcattctggtaaacccacaaccttccagtgtgggtgttatggccatcatgaacatgtcacagtgctgcagagattttgtttatggccagttttggggccagtttatggccagattttgggggcctgttcccaacagcccagcaacaactactgttgtttttctctgctttacttttttcataaagtcataataatgctatagactcacctttgttccagatcttttaaaaatttagtattatacagtaaaccattgcctagccattacacagtcatagaaaacaagttttagtggctctaaattaggctctaattagtggctctaaatttagtggctctaaatgtcatctggaatgggccagagaatgaatattttaggttttgtggaccacagcgtgtctgtcaaaaaacactcctgtgtgtagcgtgaaggcagctgcagacaataggcacatggacaagaggctgtgtggccacaggacgtcacttacaaaagcaggcagaggagcaggcttgtcccgagggcagtagcttgctgactcctctctagtgttatacaagatctggtacacaccataacccacgtgacatgtctaccgtgggatatctaaacatttttggtgatctaagagggatggagatagagactcccatcccaggtgaccatctacgggtctagataagccgcatcactgtcaaagttgtcgtttccatttagcagcaggtcatcagaggccaaccactaggacccactaggatcttgcaagatagaattgtgaacgggaaatatccctgagagtgcttttccccagcagaagccatgattggctgcatgggacctctcaccttcccagggccaacagctgctgctttagtctgtggccccttcctggctgcagaaccaatcatcatttatagctccttcaaatgactgcatgtttggaatgagttcaggtaaatataattttaaaaaataccatgggcacagcacacggtaagccctcacacccgcaccagtgggttcacccacccacggggatgttcccggagtcccctggagatagggcctccgatttcatggctaagttttcttggagagaatctgcatgttggatttgtgtgaaaaacaaactccatcagaaaatggagatgctaaacctagaaggtatctgccttttctatcccatgtgagggaagaagtttcttgtttttttaaagtagggtagcaattggctgtttagacctttttctgttctgccagtaggttgggggacacggcttactgaccctgtgctgagctggagctgcggagaggcatgggtgtaacggggaggagaggagagagggctgtgttgaagccggagctctctgcgctgtgggcatcctaggtttagggctgccctgaccgctgatatcccattgatcagtcatcgacccactgatcaaggagcatcttggccagttccaaaattaaggtgaaaagataaacatccatcagataaaaagcagtttttgtgtctccactgccccgtccatcccactgaagccctggtcttcctcagtgtagggggactgatgtagtggacgcctggctggggagggccacaccgagccctggggacccaggactgccctgagactccccagaggggacctgtggggcctagctcgtgcacctgcgtcagcctcaagaaggtctctggcaggtgcttctgccccgtctcagcctcaaggacatgctggcagcgggtgtggagggcaccgagcacatctcctggtctgggttttactcccagcttggaccagctgtacccggagatcccactgggctccgcagcctgctctgtgagcggagactcctgtttgcctcaactgcagagctcagcagagtgagttgagctgtctcggaaaaatcggattcaaatgaatctttggccaaccactgttcaagaaggatgttaacctcacacctaggaatgctacattttctagcgtttgacattttcagcgatcaagaattactatattttgtaatatcacaaaactcagtgagatctgcagaaaagaggtgcacaaattagtgtcacacagctgcacggtgggcttagcgagtatgtgacggtgataacctagaaaccgtttggatggtggtgggagcatcgtcaggaccctgaatacctgtgactgctcgctgctgccttcttgactcctgccgtctgcgctgagaaccagggtgcccctgccccctgctcccacactggcagggcaagcacaacctggacctctagctgaaaggtggggagggcaccagggtccatggcctcgacagcatgtgttctgggactgtcccgaggcgtctggtgtgaacgtcccctcctctttttctacttcagtctccaacagccccggcaggtggctctgacgtctccttcatgggcacctgggctccttcttctgtttcagggctccaaggtcctggccaagaaagagctggcctatgtcccaattatcggctggatgtggtacttcaccgagatggtcttctgttcgcgcaagtgggagcaggatcgcaagacggttgccaccagtttgcagcacctccgggactaccccgagaagtattttgtatgtag

SEQ ID NO: 96572 - DNA, 89831 bp, Homo sapiens
gcctgtggtcccagctacttgggaggctgagatgaaaggattgctcgaggtggggtgtggggatcaagactgcagtgagctgactgcaccactgcactccagcctggaccacagagtgagaccctgtctcaaaacaaccagaaaacccaaacacacacacacacaaacagaggaggcaagacctcactaacagcagccagagaggtagaggaaagctgcccatttaaaccccataaataccttgggtttttatgatgtattttacaggtgaggaacctgggagggggcctttctttattgttttattttatgttgtgccaagataagaactaagaaactcagagctattttgttccatcatataactgtcctttgcctagtatttctggtatgtctccttcccaaccccatcatcctcttgtttaatgctttaatttgttaggagtctaattttaagcagtccgtttgaaagcagagtgctagtgaaaagactgactggtttcaagagatgctactagtggacagtgaattttgatatttagccttgggtaggatgggcatggagataatggtgatgcattgaacttgggtctttatcagacaacctaactattgggtgagggtatgaggaggacaagatgaggaggacaagatgaggacgaggttatctaatcctcacacttgtacccccaaaccttcctcctgcacccaaggcagatatcacgaattattcccacctgtactcctccccgaggctgccatcccactgaatcagagttggcaagccatctggaaccttgtgaccatcccgagagtaagtccttgccccacagaccaccaaaagatcacctgtctttatgacgatgaatattttattatagagatggactgaactcacttttgcataaagaatctctgaattgggtcagggaaatccacccgctaagaggtcaccacccagctatccctgcctctgcctcagcccccacttgctgtttacatctcagggtcactagaaacagcagagcctgctgttcccagggccaggctggtggggttgggccaagggtcagggatcctggctgcctgccagatcagaaccgccccgtctcccgccccagtcggttgtccagaacctggagctgccggaggaagcctgagttagggcagatattgcggtgggcctgcaccgtctggatggcctctaccagcgtcatgttctcacagatcatgaggaaggccaggacaagtgtggcagagcggcttacccccatggcacagtgtaccagcacgcggcctgtagggagaaccaacttagcatcagctacctgcccttgaaccacccacccctttgggaagaagagacacccatggccatcctctacagtatcctggaatactgacactgtctactctgtcaaatggggcaactgaagcccaaagagaggaggctggctcaaagtcacatagcaagttagaggcagggtttaggttagcagccgggatttccttcttccagtccaggtgcttcctcaggcatcctttgcaactctgggccaggggaagggggtttactgaattcctgaggtcactgggtttgcatcagattatagggggtgtccatctacctccctttcccccgagttctgccctctcgactgcccctgcagctctatgccaaggcctcatcttagaggaacccgctcaagagcttcactgggtcctataccttctgtccagtgcctggcctcttatggagggatgtggtgatgctgatgaccacactgcatcttagttatgtctgcaattgctagcctccagggtgtccctgaaggggacactcactgaatggtagtagctattttccctatggagtgggagggttactgaaagggtttgtctctctggactcccacccaccagtgctactggaataatggagagtcctaaagcacaccctccaccctccaccatgcctgatccagaagtgcaccttggggaacactgagggcagctcggatgtatcgagcaacaggcagaaagtagacactgaggtcgaagaaggggttgtcgtccgcctcgatgccatagtactccagggacattccacggtagaatttggcacctgtgtccacctggaacttgcctgcagcggcattcacaacgtgggtgattcccagctggatcagcttgctcttgtcccgggctgcgtacctggaggagagggcacaaggggttaggagagtggaggtagatctcactgtggcagctctggctgggttgaagtttgcaaacacccccgcccaccacccaccaagggtagagacaagagcctgcaaattggcccagggtgaaggggctcctcctgttggagtttaagactccttttcgggctgggtgcggtggctcacgcctataatcccagcactttgggagaccgaggtgggcagatcacttgaggtcaggagtttgagaccagcctggccaacatggtgacaccccatctctactaaaaatacaaaaattagccaggcatggtggtgggcacctgtagtcccagctactcagaagactgagtcaggagaatcacttaaacccaggaggcggaggttgcagtgagccaagattatgccactgcactctagcctgggcaacagagctagactccatctcaaaaaaacaacaacaacaacaaaaaatagactccttttcaggccaggcactgtggcttatgcctataatcccaacactttgggagactaaggcgggaggattcattgagctcaggagttcgagaccagcctgggcaacatggcaaaaccttatctctacaaacaatgcaaaaattagccaggcatggtggcatatgccagtagtcccagctacttgggaggctgaggtgggagaatcacctgagcctgggaggttgaggctgcagtgagtggagattgcactactatactccagcctgggtggcacagtgagaccccgcctcaaaaaaaaaaaaaaaaagaaaaattagctaggtgtggttgtgcaaacctgtattcccagctacttgagaggctgaggtgggagaattgctgagcctaggaatttgaggttgcagtgaatgatgataatccctgcattccagcctaggcaacagagagagaccttgtctctaaataaataaataaaaattttaaaatgaaatattactaggatcactgttcataatagtcaaaaagtggaaacaattcaaatgtccatattcagtaaaatggataaactgtggcataatcatatgatgactccagcagtgaaaacatgaatgaacttcaggtacacataacaatgtgggtgactcacaaatttgagcaaatgatcccaggcacaaaacacacacaacatgattccactcatatcattttaaacaacaggtgaaactaactacactgtttagatatataggtggtaaaactttacagaaaataattaattcaacagatagtgattaaccacagagaatagaaaagttataatgagaaggattcagtaggggcttctgggagacaagtaatatcctttttcttcactgggtgatgaagctgttcatacgtgctctgtgcacatttcctttttccttttttttttctttctttgagacagagtttcgctcttattgtccaggctggagtgcagtggcacgatctcggctcactgcaacctctgcctcctggattcaagtgattctcctgcctcagcctcctgagtagctgtgattgcaggcgtccaccaccacacctggctaattttttgtatttttagtagagatgaggtttcaccatgttggccaggctggtctcgaacttctgacctcaagtgatccacctgtcttggcctcccaaagtgctgggattacaggcgtgagccaccgcacccggccctgtgcacttttcttatgtgcattctagttccacagttaaaagcagtaataatataaaaggaaagaaacatagggaaagagacggtgggaggcaagcgtgccacctctgccctagagggctctgagagaggctcatgcccccattcccgtgtgaacctcacacccttccgccatccccactcctaacgtgggtcttactcacgcatctcccaggaagaggctgggccagacctcatcgatatggttcagtgtggcagcctgacggacccacagcaagcgctgcagcgaagccaatgtgggcggctggtagggagatgcctggactgccccatggatcttgggcctccggaggtcctgcttctgcagtgagtccatcctggaacagagtggacaccgcagtggctggaggcaggctcccagagggtggatccagctgatggggaagcccatggtgcagtgcctaggtgccacggggatgctgcaggaagggcttcatctatttcacatgaggtattaacaagctcagctggggctgaggcctagaacccttccccagggaacaagggaatcaagcctttgtcactgctatggagctgggcagacctctctcctgccctctgctgagctgcagatgtatgaagctttggccaaggggcccttggagttccctgtttgtggcactagtcagtgcagatctcatccctaaatcagcttggactttgtagggatgaaagccccagatggctgtggctctcagggcacccaggaagcccccaccaacctaagcagctcatctcaagccccctcacctgctacttccagtactcatcctcagacccccgtcccctcccactttcaggggcttggagatcagagcctatctccaggtaagaggccaggactgtgaactggtatttgttagcaactccgcatggaatgagctaatgcctcttataagcctgatgcctctggctgggcacggtggctcacacttgtaatcccagcactttgggaggctgaggcaggcagatcaactgaggtcaggagttcgagaccagcctggccaatgaggcaaaatcctgtctctaccaaaaatacaaaaattagccaggtgtggtggtccactcctgtagtcccagctactagggaggctgaggcaggagaaccttttgaacctgtgaggcagaggttgcagtgagctgaggtcacaccactgcactccagcctgggcaacagagcgagagtccatctcaacaacaacaaaaagcctgatgtctcactcgtgggatatctgttcctattttacccaggaggaagctgaagctcagaatgttttaaaagtgatgcccaaagccatacggctcatgagtagcaaggctggggttttagtccatccccaagcctttcagttaccatctttggggcctccagagagtggtcactaacccatctgcttcctcaagggagcctggtactgctgagccacacacctgcctacaggccctgggttttcctccttacccccacgactcaggccagcactggatgtcaggccccacccgggtcaggtagcttgtttcaggcatctgctggctgaaggagtcagggaccctgcggagctggattttcagcggcaccagaatatgggcctggtgccgtgttggagagggggtcctgtctttgctaactgcccctgatcccctggaccagtgactagggaaggtgcatactgggaagaacatcttttccctttggtaggcagtgccaggaccagaaaaagaaacaggcacccaggaggctgccggcttggccaggctcacccagtgggaggctgtcgggcaaggcggaagtgaagaccaagctgtcctcctcatcccccactgtgacctctccaggtggctgagtggcctgccacctacctggggcatggcctggggccgggaatgggggagtgggtgcaggggcaggactctgcctgagcggaacagggctgggcaggttctgcccagaacacaaacactgtgaagcggctagaattccaggtgctggctggggcgcccatggggggtggggcctgagagccgactgaggccttgtggactgcagtgggccctccggtccctctaaacccccaggcctcctctctgcttggtatctgtttgggattgaagaccgttggttccataaacctccatgaagatgggagtctacctgaagaggtgggaagagaacttctgaggcagggaggagagcctggctcccccagcactctgccataactcattctgtggccacgagcaagtctttgctcccatctggaccacagtttatcttcccatgctagggatgctggacttaattttcaggatgctctgggggtctgacccgagaatgagagaggagtgtctggatatgcggtcactgcagggcagagggcagtgtagtgtggtggagttggggaagcccccaggacccagaggagtccaacagccacactggtctggagccatcaggtggggctgcaccaccccaggcaggagatggggctttgggaagtgggacaggctccgggctcaggcctgcggagcttggcatggggtgaggctgccccctggtggccaatgggtgtgtcacagcccagccttgccagggagcaggcagccaggctccacccccaggaggctccagaggggtcaaggatttgggggctggtaggccacagtgcatgcctctgcctccgaggggacctaggcccaggtctgaagaacggggctctcccctggacttagcgctatgcctggtcaggctccacctaatgccttgctcccgatgctcagggtgttgccccacctgtccactctaacccactgggacccagcccatcccatcagtcagagtcaggcccggccacccccccagggactcgtcctttaagccccagtccctcccaaggaggggaagtcggtggttgtggcagctccgccggtttctgacacctgagacttggtcttcggagggccctgcctgacactacattccatgtctccttgtccccagctgggtgaagcacaggcccaacgtccagcagggccagggcccggccgagctcccctcccactccctgcagtcttccttctctccctgatcccgtgctcctcctcgcccccttcctgcctcccccgctcagcagagcagctgcctctgtaggcagggcttttcctggctgctcctgtgctgctgctgtttgcaagtccatgcacttcttttctgtgtttgcatctctcctccctgggtcactcccccgtttgcctctgtctcccatcctcccccaggaagctcatgtgcctttgcagcctcccatgacgctgctctgtgtgcccaagacatcgggcagaggcacaggcttccttggggcagggggcagctgtttgccatccacctctcagctgcagtttcagatagtcccctggactttcttcctgcccatcctttctgactccactccagggaggccagacagaagtgtggccacaggccatgtggggctggagatctcagggcaggaccagtgaggagtgtggggagaaggcctgcagaagggtggcgtgtggctgccagtgrggaacagctgtgggtctctgtgctcagcctgagggtcttggggagggcagacctgggtagaaatctcaggtctggtacttgcagctatgtggtcttgtcttcaccaagccagtttcttcagtggggctgctgtgagaattccatgtaataattaatgtaaagcacctcccacagggtctgtcttatggtagatgcccaataaatggcacgtcttactattattatcactactataattactcttaccctttccagccccagccatatcctatgtggagggtaacttccctacgggacagtgagatttcttctctatctctgtatttcttgatatttctttctctgtccagcaataattgttatatttagcactcatcaaggatgtactatgtgccagacagagctaggtgctcacattttctcattgaatcctcacagtgcctttatggagcaggtaatattatcatccccattttacagatgaggaaaccgagactcagagaggttaagcaacatacccagagtcacatagccaattgatgtgggagtcaggattcaaacccaggtctctctgactctactataccttgtctgcgccttcatctctgacccagtcggttctctacccaacccaaaccccacccctccccacacaggcacaagtgtcctggccctcattacccagcatgmtcagggaccacatcctaccccccccaaattaggagcactcacccacctgtgggagtatctggcccaggctgtgcacttctctgacgggcagttcgtgctgcyggctttcagccgcctgtctccgcacacttgatgctgtttctattttttgatttgagtttaattataaagcatgctgtctactcccctcttccagcctcccctgccactcccaacttgtccactggttccatggcatggccagtgccamgcacagtcaggcacctttccctccaggcccaggcctctgtcccagcactgctaagaatcaaggcagctcagcccaggtctgactgtggcatwttgtgtacatgtatgttgatagtgggagaaggggccgggcgcggtggctgaagcctataatcccagcactttgggaaaccgaggagggtgggtcatgaggtcaggagatcgagaccatcctggctaacaggctagccgggcgtggtggtggatgcctgtagtcccagctactcaggaggctgaggcaggagaatggcgtgaacccgggaggcagagcttgcagtgagccgagatcgcgccactgcactccagcctgggcgacagggcgagactccgtctcaaaaagaaaaaaagaaaaaacaaaaagaaaaaaagagatagtgggagaaggaagatcaaataaaccattttaaaaggtcccttggccggatgcagtggctaatgcctataatcccgacactttgggaggctgaggtgggaggattgcttgagcccaggggttcaagaccagtctaggcaatatagccagaccctgtctctactaaaaatacaaaaaattagtgagttgggctggtcgcggtggctcatgcctgtaatcctagcactttgggaggccgaggtgggcggatcacctgaggtcgggagttcgagaccagcctgactaacatggagaaaacctgcctctactaaaaatacaaaattagctgggcgtggtggcgcatgcctgtaatcccagctactcgggagcctgaggcaggagaatcatttgaacccgggaggtgggggttgtagtgagctgagatcacgccattgcactccagccttggcaacaagaacgaaactccgtctccaaaaaaaacattagctggttgtggtggcacacacttatagtccctcctactcgggaagctgaggtgggagaatcacctgagcccaggaagtcaaggctgcagtgagccctaatccttgaccatgccattgcactccagcctaagcaactggagtgagaccctctcccttggccttcaagggtattatagaagaagggcaggaagttcaagttggaaggatgttctgtggaggaggacagtgaagaggctagccaaaaatcacatgtaaactggtggcattgccaacagcaggacccaggtccggggccctcagttaggggccaaggccgatgggacaggtccaggataaagacctagaagactcaggctgagggaagcrgcacaggcccacacacagacacaggtgtagagcaggtcttcagacagccctgggctgcaggcagaagcagtgtgtccagggccactcccaccctctgccaagctcctcccccaacccaaaaggcagggacacccaggccccactgtcccctgaggccagagagatggtctttaaggtctctccccatgctaactgtggtcagctaggaccttcaattgggcctactagaaatcttctctgtcatccacagacctttgtcatacacrcataccttgatactactccccgcttgcactcccagatggtgggaacagggcacacccatgcctgcagccatacctgcactgggtctctgaggtctgagctccagggagctaaggctcagcccctcctggggctctctgagccctgaggggagctgctggagacagctgtggccaacagctatcacaaatatctggaacccccttcctctctcctcccctccccactttcccagggaacttggggtccctggccaagaagcctgagggcttggctgagaggggagcccactcccacctgtggagactgaagacagtggctgagagggggtgtaggcgccaggaggagccagatggagtagcaggctctagggccgaccccacgctgggcttccaccatcttctgtgtgtccgcctgggccagagcctccagcagcaccagcaggatcagtgccagggtggcaaagtggcagagccccatggcagggagtaaggaccagctctggaagagagatgagctctgtgttacaggcaggtgaaccaaggcccaggctggctgggacttgttggggcagggataagagctgtcacctaaacctgcttctgccttgagccctgtgcataaggtcaagtgagtgcagctgctgggagagatgaggaggtagatttggtatccatggcttagggacagagatgacctctccccatgggccccttatctttcagagtacctggacccagagctgctctgtatggctgcacaggctgcacactgcataactcctggggcctccagttgcacagtttggtggatgacacctccatgaattgtgcaatgctgtacccctgcctatccaacttccccaaagtcagctgcctgatgggaaagatgctgaggtcagaggtcagggagcctaaggccccaggctgagggagaagggtgactgggcatggtccgagatctgatgctccgccaggttcctgggtcctgtctagaggagagagagcaggcagggaatctgccattccatgggaaacatgcccccttcagaccttctacccacagagctccatgccacagcttggctacaggccaatctcaagcccagctataacccaaagtttcttatcacagtcacccccaaactctaaacttagcccctgatccttccctaatcctgctcctcaagatgcttatcctccakccagcacaggggaaggggtcgatgctgctgaagggcctcccttctgcttgggctggctatgccttcagagacaggaactgctcttaggggtgggaggcagggagagagtcaggccctgccctgggaggtttctgggaggaaaaagctactgctgttccagctcccaagcatgcccaggccagtcacccacccccaaatggcagcccgtctgtggcatggggtggtagggacagccaaagacaggcttgaggcgagacaggcaaggagttgtagaggaagcagaggtggaggcaggccctgctgggtggggagccaccgtggaggcctggccttagctcactgatgagaattagctaagcctggaaagttttctctgtggcactgtacctggggtccagacctagggggaaggggatgtggaggttcaggagggtccaggctggctgtgcagatgcctcagtgagatttaggggagcccccacaggctttcagctgaggcagggcaggttggccccaagaccaggtaggaaagtctcccctcttccattttatgctttccacaccctcgcatcctagtccttctcttctctttggggtctgaaggatccaggtggggtgggggatatgggttgggggtcctacaggagaattgcctaggccaggcccttgggtgagaccctgggtaggttaagggaacccagcagtttggagagagggccaggccccctttaatcctcacttccagccacacacagccctgccaaccaatcctggaagaatccaatcctatgtctgcagcctaggccctcacctggcctcttccggccaaccacatccagctttgccccctgaggcctcacctggcccctcagctctggccggcaccccgcagttgctggtccagcctgcagagctggtgcaggaagcctcggttggggaagacccatcggtgctgcctcacggtgatcaccgcctggcgcagggacagccgctggtgcagcatgaggtaggccaggaccagcgtggcagagcggctcacgcccaccacacagtgcaccaggaccttggctgaggaagacatcctggtgaaaaaccctgtcccacacaccggcccacccacgggctgggatggggacccaagttcctttcctgaccctgccttgggtgcactctgtgatcctgagcaagtcactcagcctttatggacctcagtttcctgatcggtaaaatgggtagatcaacacctgttctgcctacccttgggatagggtccgaatttcttttttcttttctttcttttcttttttttttttttttttttagtagagacaaagtctcactatgttgcccaggctggtcttgaactcctgaacttaagtgattctcccaccttggcctcccaaagtgttgggattacaggcgtgagacaccgctcctggcctccaaacctttttaacacttcaagagctggcccctgtcgcctcatctcagattgtccctcccccaccttcagctcgagaaacatggaggaacttgcagttccttgaggctgccatggtttctgacctccagccttaccacatgctattccaaatacctgcaaattgtttcccctggtctcggtctgactaacttccactactcatccaccaggttttggctgagacacggcttcctccacaggctttcttgaccgctcaaagtattgcttgaatcacaaagcagctcatcttttttgcatattacccatggatacctttgtagagggaagtccccccaccttcccgatcctctgggcttagcacccccgccgtgtgctcccagagccctccacactggcccactcttatgagtagctctcactatactattcgcaatttggctgtctttccaccagttccaagagggcagggatcctgcttcttaaagtctggattcccagtatttagctcagtgccaggcacgtagtggatactcagtaaatagctggtgaatgaatggataaatagcaaaagaatgtcaaagtgtgttggatactaaaaagtcatgtgagctgtaatcttgtcattcctgtcacatagatgaggaaactgaagtccagaaagggacactggcttgcccagggtcacacagtgagggacacagctgtcttctaggatggacacaaagccaggacaccagcctccctgggctcctatgctgtatcctgagtatttgaagatatatttcttttctagttaaaagtactttgggggccgggtgcggtggctcatgcctataatcccagcactttgggaggccgaggcagacagatcacttgaggttaggagttcgagaccagcctcgccaacatggtgaaaccctgtctctgctaaaatacaaaaattagccgggtatggtggcggatgcctgtagtcccagctacttgggaggctgagacacgaaaattgcttgaagcccagaggcagaggttgaacccaggaggcggaggagcagagatcgcgccactgcactccagcttgggtagcactgagactctgtctcagaaaaaaaaaaaaaaggagaaaaaaagtactttggggcagacatctaggtaccaaatggtgctttcccaaagttgagtgttgcagagaaagagctgttctgctgtttgggagaaatggctttcagcctcagggttgctcctaactcatggcatgaccttgtattccaggcctcagtttccccatctgggaaggaatcgggttcgacaaaatgctggagcactaagcagaggacttttttttggcggggggggatggagtttcgcccttttgcccaggctagagtgaagtggcatgatctcggctcactgcaacctccgccccccatgttcaagcaattctcctgcctcagcctccagagtagctgagattataggtgggtgccaccatgcccggctaatatttgtatttttagtagagacgaggtttcaccgtgttggccaggctggtcttgaactcctgacctcaggcgatccacccacctcggcctcccaaagtgctaggattacaagcatgagccaccacacacggcctaagcagaggatttttaaaaagcagggatgggagggcactgatgactgagaggaaatgaggcatcctccccatgaatgagcaagatgggatatgggcttggaccccaagtcctacccccaggcgtgttgagggcacggtggatgaagtcagccgcagaggagaagtaggcactgatgtcaaaatcagggaggtcgtgggctggcacccccaggtagctcacactgctgccgtagaagtcagggccgccctgacagtagaggcccttgtgggcggcgttcagcacgtgggtgatgcccagcttccacagctcaaagcggttgtttgccgtggccctggggagggcaggaagggcacttgatgccggccaagccatgggaccaggagggaggctgtgcctggccccctgctgcagagggaccgagccattagggtccaaagagagtccaaccccagcaagctccaagtggggtctgactccacagccctatacccagagccccgcactttctggtggctgagccggcggtgtgtgtgtcgggggatctttagaccctctttgcttcctcaatgcatctgtccctgccttggccaggacaggaaggaagggattgcttcagccctggaacctggctgcccctcccttcttgccccatgtcctcccacgcatatccgtcctctactggctaccacctcatacctgcttctaacctacaaatgtttagaggcaacaccttctctgattcaccttcagtcaggcttctccaccgtctgtatccagaggagggaggctgggcccagaaacagggggctctctgtctaccttatctcatgycccaaatactatttcctgggcctctgcctctacacttgacagttgtcctggaaatgtttcctggaactcctgggagactccctgctttcaggcaggcgaagtccctgctctccctggtggccatacctggtcactgcactgacctcagcacccccgggggtcctggagaaggtccctggcctgggatggtcagagcagagctatttctccttgtttccaccctcctgtgtctggtaaagcgaccaagaactgcctctccacgtccccacccccatgccccttggccagctaccactcacgcatctcctatgaaaaggttgggccaaacttcgtccacacggctgcaagaagacttccctgcccgcaggagctcctccagctccaggatgctgggrcaaggcgtggctttgtcctctccccccagctctgggagagaggtctcagccatgggccagcccgccyacccctctgcctctgtggtcactcctctctgcctctccagtgtcatttctccttcccagagattgacagggacaggtgacagaagcaagtgactcagcaagtcacaggggcctctggagtggacaagaccttttcctccccaagcctccccccacccccaaactccatgagaacacagaatcagagagacctctgcaagtcagctaccaccctgaacctcagtttcttcatctgtaaagtaaggataatcacacctacctcagagaatttgaggattagatgaaacaaaggacatgctgggtctgacacatagtaggtgcttagaaacatctgtggaattagtagatgtagagccctgcctaaggctattaggttctgaggactgagttaaagtagagatccagggtgcagaggaggtggctggttccaaggatgaatgatagaaagaactgaaagaagtgtacagtctaggtgggccacaaattgggcaggagctggattggatgtctgttggatgagtctctgaattacggaggtcagggacagttttctgagttgtagagtcagagaaatatgggtaagagacatggagagcttcctttaaagggtgcccacaagattcatggggggagggggaaggtgtttttttttgttttgttttgtttagacagggtctcactctgtcacccaggctggagtgcagtggcatcatcttggctcactgccactaccacctcccaggttcaagtgattctcctgctttagcttcctgagtagctaggattacaggcatgtgccaccatgccacactaatttttgtgtttttagtagagatggggttttgccatgttggtctgactggtcttgaactcctacctcaagtgatcagcctgcctcggcctcccaaagtactgggattacaggtgtgagccgccgtgccgggccaatggggcaaggtttgaacaatggtcctgtagtgaagatggctaacttctcagaagagaaggctgaagagggccttgtatgtcaaatggggagacgggaggtgagtgttgccctagactttgagagccaaaggggctaactgtcatcagaaacagtgggagggagattcctctgcctataagggctttgggtcccaaaatagaaactgagaaaggtcaacctgtccttctgccagagctggttatcagcaagagagatgagatgtctcaccctctctcatgtgacttctcagtggccctaatggagctgggaagggtatgagctgcagtggggaggttcccagctgcccttggccttaagaccagtttgaagggaaaggccacaccagggcatcccatggaagcagtctacactcatgtctatcccattcagaaccattgaagtcggcccggcactgtgtggggaggcaagaccaaggaggggctcgtgtccaggttacagctgggtttggacttggtttatgccaatgctagacctggcttgggaggagaccttccctcagggtggtgcagcatggtggagtgaggaaaatacaggatctgatgttagagagatttgggttggaatatcagtttgcaatatgtcaggcagtatgtttctttacttttctgtgctataggatcccccttgcagaattagcactaggattttttttttgagatggagtttgctcttgtcgcccaggctggagtgccatggcgtgatctcggctcattgcaacctccatttcccgggttcaagcgattctcctgcctcagcctcccgagtagctgggattacaggtatgcaccaccacgcccggctaatttttgtatttttagtacagacgaggtttccccatgctggccaggctggtctcgaactcctgacctcaggtgatcccgcctcagcctyccaaagtgctgggattacagacgtgagcctccgctcccggccttagcacaaggattaaatgagatgtttatatggcgtttggcatagacactgtcaaagagtaaatgggcaataaattayaacaatgatcattgggggctggctattggagaagagctggctctctccagaggaattcggattacctccttctaggccctaaccccatttactgatcccacaggccccgccccggctccgctagccccgcttcctcctgtcgctttggcctccggcatgacgcatgcgccctcgggctcctccgcggcagcatctcggttctcctctcgggcccatctggagcctcgcgtcttttccagtgtgggccccgccccctgccggtagaaccccgtccccggccggtagggccccgcctcccgaagcagttccggttcggctccgagcagctgccggcgcggcggtgacggcggccgggacgatgcctgcgcgcagtcgccaccgcccccgcctccactccggctccccgccccgggctccgcccccgccgcttgaggcgcttcactccggcgaggcggggagggccccggactccgacggcggctcggacgccgactcggaggtgggtccggggagcccgactcggaccgcggaggtgagcgggagctgaggctgaggagaggggagcttggggggcgcctgctgccaagggtgagtggggagtctgggatggagccgggggctgccgagggaccgcgacctggaggggccccggggagacggttgagggaaccgggatagtcagctctggaatggaatctgaagcaaatggaggttgtcgaactgagggcctgaaggctgagggataagtggaggccgaggaacgagagggagagagcgagagggggaggcttgaagagcccagagcttgggggcttttgaaagctgcgcagtgggggaaaaagatcgaaggtcctgcgggaatgtggacccggaagaagagatgctctgggtttggcagcggggatgaggagtcagaggagcaagacctgggccggtgttcccttcccagggcgagggagggcgatcggggctgggactggagccctctcatggggttctcctcttacggagccctcttatccgcctcccaccccgggtggggctggtggtgatggagggcaggatttaggtttgactagaaggaggagggctgttggatgggaaatcgtctggcctcaaggggtgagggaggcactgaaaaagagaagtgtggtcaagaaagaaaaggagcccttggggatctaattttgggctttggcatttttacaggtgccttttaaaacatcaaagatcactagggcaatgtacttggatcgtggggctttctcgttcgtgcacagtggatcattttaagaatcttgggtggaaggggcggtgtgaatcactgatttgcctaaaggactgggggaagtagtggagaggaagtgatgtttgaagaaggtagtggaagacgtgattctgaaaatgaagatatcatttggatttattgacagtaatggtgtcctttttttcattgtaattttttcgtagctaagtttaaataccagacatgttaagatcctaaaaatttactatattacctttaagttttaaaaacttgaaacaagactttggatactcagattttaaaaattaaacttgaaacaagaatttggacacttggattttacagatactcaacatggactggttccactttcaaagttttaagttgacacatgtatttgccacatagtaaatgtatggtcaatgcaagtttctgggtgaagggggcacagtgaacttgccacagtctaggcgcaataccaaatcttcctctcactgataaccccaggattggacttatctcttgaaaattggagaggtacctttgactgattggcaaaaccaatattgaaatactattttgcaggtattgtgtgaatagtatttttagtagagtgatttggaaaaataaggacagaggatgcttgtagttggcagccaacacaactgggacaggtgggtatacagatgctttttatagaagacatagttccaaaacataattatgccagaaaaagaatgattgcaatatttatattcactttagtagagataaattgacttccttttgtgattgttaagtcataacatggttccatgaagtctttgactttagccacatgtctcatatgttttacaactttttatgtgattataggtttgtaaagttgttggccatttcttttctcttccttcttttcttttctttcctttcttttttttttttgagacagagattcgctgtgttgcccaggcttaagtgatcctcccacctcagcctcccaagtagctgggagtagctgggactgcaggtgggcgccaccatggctggctaatttttgttagcatcaagcgttttctaaatgcttgattaaatctaaatggatatctactgtttaatcttcatgagatgataatttgatttgcaacagcttttaaattagtttatgtgtatgggctatgtgacataccctcagatgcacagtggaatagyaattgtttcttcaaaggatatgtgaattcttagctaaaaatgctgagattgttaaagtattaattcccttttctttaacttaatacaaattatcttcagttgaagtttatgtaatattactgtttgttggttttatctttagagtgagatcctctggagaccttatcttcatacttagttgtgaataaaagtcatggcatgtaaaaatttgctgaactgcaatataagaactctattaagattacagcttaatgttattgcaaaattaaagagaaactgttagatggagttgtacaattaacatattagcatgtctaatagttttttaatttttgtttccctttgtcagttctcacacccattgaataaagaaaatcagtttttggctaggtgtggtggcttactcctgtaatcccaccactttaggaggccgaagcaggcagatcacttgaggtcaggagttcaagaccagcttggccaacatggcaaaaccccatctctactaatactataaaaagaattaaycaggtgtggtggctcacacctgtaatcccagctactcaggaggctgaggcaggagaatctcttgaacccgggaagcagaggttgtgagctgagatcacaccactgcactccagcctgggcaacagagtgatatgtctcaaaaaaaaaaaaaaaatcggtttctctaaggcagaagaagccatcatgactgcgatggcagaatatgcagacatatttaggtaaatcagttttgatttcagtaccataaccccccttctgcaaaagcttattcacattgcacagttgcttataaacatttttttattttgttaatcattagatcctcaatacttcttcaaaactttgctgttactgattaagacattttcatggcttttctaagaattgaaatttgaacactttttttgagaaacttaaatcacagatgtttccatgaatagtattattattgttttataagaatgccatgttaacaagctattctttcaagatttttacttccaggcctgatgtaatatatggtgttaattgttgggtgtacctagcatgcccgttaatttatggatggaaatctttcctgtcttcagattctacccccttcatttttcatatgccagtggattgttaatgaactaagattgaattcactttttaattttaaagcttctgtagctttgattctctttggacatcaaactgatttatacgagatatgaatacaattgcatattctgctaaattacctatgaagctcttttgaatgattgtggtatttggtgaaaaaatacagtatgagctaatcaaaattcttttaagggatttaggttatagaggaggactatactatttcattcccagattagattaaatgttttacttatttgcagagatgacaggggagagccttgattattttcacgtctcatgtatttatatttgtttacaaataaagagttacttatttgcaaaatgccgtatctttaatacttgcttacatgtgattttgggaattcttttggaaccagtttttgttcttgtttttgttttgctctaagggtatgatgtaacacattgaggggttaatagtagggcaagaacagagaaagccatttgacaacagatatcatcaggacagtgatgcttactttaggtcttgtggttttcttggccttgagaaatcaagatgttaactaaaaataggagagcatgggccaggcacactgggaaaacagattggtgtttacatgctaccgctgttgcttcctggtaatttgccatatgaatgtgtgggtatggatttgtaacagacctgtgatgtgaatattcctgaaccccctcctcccatacacacagtaccatcatcacagatctgaagcctaacctttagctgagttcagtgacttcatgtttccgtattgaaatgttctgttattgggtcctcacaatactatagaatgtaacatactgcgggcacggtggctcacgcctgtaatctcagcactttgggaggccgaggcgggcggatcacgaggccaggagatsgagaccatcctggcgaacacggtgaaaccccgtctctactaaaaatacaaaaaaattagccgggcctcgtggcaggcgcctgtagtcccagctactcaggaggctgaggcaggagaatggcatgaacccgagaggcggagcttgcagtgagcggagatcacaccactgcactccagcctgggcaacagagcgagactccgtctcaaaaaaaaaaaaaaaaaaagactattaactaagaaaaacttggttataatagtttcaccacagtgtttcaccataaaacaatgttttatgatatgtacctcagaaaagagtgttgtggggcagggcagtgaattatatttatatttgtctaagtattttttggtagttttttttttttaaagatagggtctcactgtctcccaggctggaatacagtggcgcgatcatggcttatgcagccttgaactcctgggctcaagcagtcctcctgcctcagctttctgagtagctgggactataggcgtgtgccaccacacctggctaatttttttaaatttttcttttgtagagatggggtatcagctatgttgaccaggctggtttagagctcctggcctcgagcagtcctcccacctcagcctcccaaagtgctaggattacaggtgtgagtgtcttaaatttttgaagtgcatttagttaagcttatgagttgtggcagaggacaagaggtagtaacatgagtatctgttatcttgatacttgttctgttgtcttgaaatttttgacagataaattctagttggaggtgagaaccatggattctgctaatttagggccttcctataggttaactggtgtcactgagtttttggaaatacttgcaaatctgttttagtttggaactttgagattaaatggaattgatgtcagttccatcaatataatattagcatgaaagccagagatttccaaaaccatacattaaaatttggctgcaaatccaatccattttcacartatttaatggagtttgaagtcttgagccagtttctcattttccattatattgattagattttggatgtagcatatttatttatttatttagagacagagtctcacttcgttgccgaagcctggtgcagtggcgtgatgtcagttcatagcaaccttcgcctcccgggttcaagcaattctcccacctcagcctccccagtagctgggattacaggcgcgtgccaccatgctcggctaattttttgtgtttttagtagagacgaggtctcactatgttgctcaggctggttttgaactcctcggctcaaggcatccaccccccttggcctcccaaagttgggtttacaggcgtgaaccaccgcagcctgccagtgtagcatatttaaaaataaagattttaccagctgggtggggtgactcatgcatgtaatcccagcactttgggaagctgaggtgggtggatcccttgagcccaggagtttgagaccagcctgagcaacatagtgagacctcgtctctactaaaaatacaaaaattagccgggtgtggtggtgtgcacctatagtcccagaactcaggaggctgaggtgggaggatcacctgagcccaggaggtcaaagctgcagtaagctgtgattgcgccactgcactccagcctgggtaaagagtgaggccctatcttaaaaaaaaaaaagggtgggcgtgatggctcacacctgtaatcctagcactttgggaggccaaggtgggtggcttacttgaggtcaggagttcaagaccaccctggccaacatggtgaaaccttttctctgctaaaagtacaaaaaaattagctgggcgtggtggcacgtacctgtaatcccagctgcttgggaggctgaggcaggagaattgcttgatcccaggaggcagaggttgcagtgagccgagattgcgccattatactccagcctgggctacaagagtgaaatgctttctcaaacaaacaaacaaacaaaaaagattttaccaaattgatatgttaaactgctagcctggttagaataaaaattagaattttagatacttagcttctttactggtttgctgtggcattgcagccaggtcaggaaccctttaccaaatttatcaccaaagtcctatcatcgtggaaaaatttttggtataactgagaatataaaatggacggtaatatctgtcagattcttactcattgaggggagacagttctggatttggtgtagataacttggtgcagcctgatagtagaagttagtttaaaggctatttggaaccagaaaaagatgttatttggtatatatgacaactttttttgagtgaaattataagagttcacggttagagcagcaaaaaagtccaagaactgaagtgcagccaagagaatgatgatgtaactgaggagggaatttaattcttttaaagatgctgccctaaattctactgctcagaagtgggacataacaaaacagaaaatcaccactaaagagtttcaaaatggatggtaggagttagtgcaaggtctttgaaactgttttgtaattattgcagattttatcgatgttttggaaacaataccctgtgcttgctaagaaaatgcaaaataggctgggcacagtggcttgcgcctgtaatcccagcactttgggagggtgaggcaggcagatcacttgagatcagagttcgagaccagcctggccagcatggtgaaatgctgtctctactaaaaatataaaaattagccaggtgtggtggtgtgcccctatagtcccagctacttgggaggcagaggcaggagaattgtttgaacctgggaggcagaggctgcagtgggctgagatcacgccgctgcattccagcctgggcgacagagcaagactccgtctcaaaaaagaaaaagaaaaatatctttctataagtataaagagaaaagagtagtttttgtttgctgaatgaaaatgttttcatttatggtaaaaattttaaaatagtatggaaaaaagttggataatcccaaatactataaactacagagttattaatcacaaagtttagccatatatgcccaaattaaaccttatcctcctacatcatagtttaggctttttgctttcataagaattgtttttatgttctggtttatggatctgcaaacatgtagtctttattatgtggatattagataagctaaatgtatttgatttagctgtatttcagcttcagtgcatctataatatataattgccctaagaaaaatttattaactctagctttatataatgtttgaagtctcttcctcagtgtttatcttgggatatggatcttaatttttttacgttttatacatcatttggaagctgtttaacttttaaattttgtaaactaaatcagtaatgatttgttttttttttttaatttgagacggagtttcgctcttgttactgaggctggagtgcagtggtgcgatctcagctcgctgcaacctccgcctcctgggttcaagcaattctgcctcagcctactgagtagctgggattacaggggtgcaccaccatgcctagctaatttttttgtatttttagtagagacggggtttctccatgttggtcaggctggtctcgarctcctgacctcaggtgrcctgcccgccttggcttcccaaagtgctgggattacaggcgtgaatcaataataatttatacaaatagcacatattgtatttatgagtcaagttttatcagttgtgaattcctttaggggcatttgaatgtagggcttttaaatacaatcacagaatttagaatagaggacagttgcttcagctggttgtactccaatatttttgatgattttctgcacacacatgcacacacacgtgcgcacacgtgagaagtgaaactacaagaaaaatccagcatgtttaagtcactgtaatcaccatctgaacatggattttgcttctgtaaaagtaagcatattgtaaaggtttcattttgttgatatattctctgtattttaaatattgttagctgggcacggtgactcactcctgtaatctcagcaccttgggaggccgaggcaggcggattgcctgaggtcaggagttcaagaccagcctggccaacatggtgaaacctcgtctctactaaaaatacaaaaaaattagctgggcgtggtggcgcgcatctgtaatcccagctactcgggaagccgaggcaagggaatcggtttaacctgggaggtggaggttgcagtgagccgagattgtaccactgcactccagcctgggcgacagagtgagacactgtctcaaaaaaagtaaagattgtccagtgatggattagaggctattttggtctcttgtgtgttggtataattaagcccagtggaatagctgtgtctttctagtttttagtgcctatcactttaggaagtttcccaattcccaaactgtacagaagtgctttcaggtatcaacagtaatcagttacatcactgacatactttttattttattttatttatttatttttgaaatggagtctcgctctattgcccaggctggagtgcagtggcacgatctcggctcaccgcaagctccgcctcccaggttcatgccattctcctgcctcagcctcccgtagctgggattacaggcgcctgccaccatgcccagctaattttttgtatttttagtagagatggggtttcaccgtgttagccaggatggtctctatctcctgacctcgtgatccgcccgcctcagcctcccaaagtgctgggattacaggcgtgagccaccgcgcccggccagcgtcatactttttaaaatgttggtgagtggtatgctcctgtggaaatatttattaatagttaaattttatgttaagtcgttatatgagcagtgcatattgatgtgtagagcaatgcattgagtaactagaacctctattttatattattgtttctcagtttatgtagcttaattacgttgttatgttgaaaagtaatttccatcttttttttttttttttttttttttgagacgaaatctcactctgttgcctgggctggagtgcagtggtgcaatctcagctcactgcagcctccgcctcccaggttcaagcgattctcttgcctctgcctcccgagtagctgggactactgtcgtgcaccaccacacctggctaatttttgtatttttagtagaggtggggttttatgttgaccaggcttgtcttgaagtcttaacctcagtgatatacccacttcggcctcccaaagtgctgggattataggcgggagccaccacacccggacttttgagcagtttctgtttgctaagcattattataagtgcattattgtaagtgcattacatgtataattccatgcaatcttcacaacaagcctatgaagtaggaattctcctcattttacagataaagacagtgaggcccaagaaagttatgtaacttctgcagggtcacataactgtgagtggtaaatcctcagtttgaacctaggcagtttaattctagagccagtactctttactttctgggctgtatatcagatgttgttggcaaatagcttatttatctgaagcttaactctctagccttagtttcttcagctgtaaattgaggaattgtactagatctctcaggtcacttccatttctaacctaagaactctgtcatcctgatttacaaaacacaacacgtttaatgtttcaaattactttctgtttgtaatctctggatcccttatgagataaaggttaagctgtttccaacatcacactgttaatgggtcatggaactggatcagatcttttctgggacttcctggttttgctggttgcctcatgcatatacttagtgtgtatatgcatatatgggttaataattgaatttaattgaccttcttaatttttttttcttcttttttttgactgagtctcactttgtcgcccaggctggagtgcagtggtgcgatcttggctcactgcaacctctgcctcccaggttcaagcgattctcctgcctcagcctcccaagtagctaggattacaggcatccaccactatgcccagctaatttttgtatttttaatagagacagcatttcaccatgttggccaggctggtcttgaactcctgacctcaagtgatccaccctctttggcctcccaaagtgctgggattacaggagtaagccaccatgcccagcgactttcttaattttctatttatatctgtttaaatgagatttgcttcaaacagtgaaaaataatactgctttcattttctttcttttttcaaaatcatatcacatcattttcttaaaaaaaccttttctctctgattataagtattacattcttattgtatggaatatagaaattttagaaatttttaatgtagacagtgaaagggcccattcaaggagtaaatattactagtttgatatttatttatttaaaaatatacacatataccatatttgctattttttgggacattgtgcttcttttaaaattttctcagtttttattttgaaataattataggctgggcgcagtggctcacgcctgtaatctcagcactttgggaggccgaggcaggcagatcacctgaggtcaggcattcgagaccagcttggccaacatggcaaaaccctgtctccagaaaaaaaatagaaaaattagctgagcgtggtgggggcaccagtaatcccagctacttgggaggctgaggcatgagaatcacttgaaccctggaggcagaggttgcagtgagctgagattatgccactgcattccagactgaatgatagacggagactctgtctcaaaaaaaaaaaaaaaaaattcttggctgggcactgtggctctctcctgtaaacccagcaccccagcactttgggaggctgacaggaatggatgcttgagccgtggagtttagcctgggcaacatagcaagaccccgtctcttaccccttccccaaaaaatcctcctctgttagcagttttctgacaatttgtattataaatgggtatttgcgataaaaattttgttagatgctttttttatttatatgctcctgtgttttttctcctttagcaggttaacatggtgagttacgttgtttgattttcaaatattgaaccagccttgcatccctggaatgaaccctgtttggtcatgatatataattaattttatatattgctgaattctgtttgctaatatttggttaagtatttttgcatctatattcgtgagggatattggcccttctacagacaccatctccatagtgccaggtggagaagggttaagttttgtaccttgcttgctgggaaggaaatggacacctcatgcttgcttcccaccccacctcaccccaccccaccccaccccaccccaccccaccccaccccaccccaccctgtgcagggggttgggcgggtaaaggagatgagggttgtgggtggctttgttacctccgatataccactgagtggtgttaatcctgagtctccagcaggcttcctctggtagtacctcggcaaggagcaggaggggtgcctcataagtgctgtttgggtttgaagtccaagttccccaaatggactcctctgacagcatgttaagagagggggagagacttgttactgctagacaatgatgacaatcccagctccctacttggtcttctctgataccaccctggtgtggagagagatatggccggattataacctgacaggcttaaaaatcaaggctctccatttggcctttcctggtgagggtgggagtggaaatggggctggttttttatgtggtgtttggctggaatagagtgggttattgtctaaaagtcttacatcttgctaggctgtctctttttctggtcctttggtttttcttttctttcttttttttttgaggtggagtctcactgtctcccaggttggagtacagtggcatgatctcggctcactgcaacctctgcctccagggctcaagcgactctccagcctcagcctgagagtagctactcagcctcagagtagctactcagcctcagagtagctgggactacaggcacactccaccgcgcccaggtaattttttgtattttagtagagacggagtttcaccatgttgcccagggtggtctcaaacttttcagctccagcgatccgcctgcctcagcctcccaaagtgctgagattacaggcgtgagccactgcacccagccggtcttttgttttttcttggagctttttttatctgcacctttgacatttccaggttgctagcttctctagtatccactttgggatatatatggcaaaataaacaaacaaaacacccaaagagctcactactgtgttgttccttgggtcccaaggtgcctggccagtcagtcttcctcttcatttctcagagtcttcttatgtttattttatatataatgtccatagagtaataggaaaaagtatgtctactccatcttcctgcaagcagaaatccatttattttttaaaatgtacctgtcagaggccaggcaccatggctcatgcctgtaatcccagcactttgggaggccaagacgggcagatcacttgaggtcaggagttcgagagcagtctggccaacgtggtgaaaccctgtctctagtaaaaatacaaaaattagccaggcgtggtggcgcacgcctgtagttccagctacttggaaggctgaggtgggagaattgcttcaacccgggaggcggagattgcagtgagttgagatggtaccattgcactccagcctgggtgacagaacgagactccatctcaaaaaaaaaaaaaaaaaggtacctgycagaaaaatctagagagcaaaacggtacacatactgaagagtagctctctcttctgttcctctactttttagaagctgtttccttcattctgtcttcatgtctgtcattatattccatcctgtctcacaatctgttttacactcttaagacaatttttctttctttttttcttttttttttttcctaagatggggtctcactctgtcactcaggctggaatgcaatggcacagtcatggctcagcttcctaagtagctgggagtataagcacatgccagcacagccagctaatttttttgttgttgttgtttttgtttgtttgttttttacagagatgggatttcacgatgttgcccaggctggttttgaactcctggcctcaagtgatcctcccgcctccagctaccagagtgctaggattataggtatgagccaccacacctagccaattattctttctaaaacacactctgattatgtcatcctctttttcagctatctgcagagaatcccattgtgtgtagaatgtttttaacttgacagaggtttccatggctctctcaggtcctcgtttccaagaaggaacaactgttgtgtctaaaagggctactgccttatgcagcctatttgctgcatgaactgtgcatgatgtatgcccagggacaagccttttaagaagttcatcatttgaggctgggtgtggtggttcacacctgtaatcccagcattttgggaggctgagrcgggaggatcacttgagcccaggagtttgagaccagcctgggcaacatggcaaaaccctatcgctacaaaaaaaagtacaaaaattagcccagcgttgtggtgcacacctgtggtcccagctacttgggaggcttaggtggaaggatcacttgagctcaggaggcaaaggttgcagtgagccaagattgtgccactgcactccagcctgggtgacatagtgaggccctgtctcaaaaaaaggaaaaaaaaataaagttcattatttgaaacatagtcgagcccacagctatcagggacatttctgaaacaagtaccttgggcacctatgtgcttccaaagctgtatgtgaagctacataactacatgagttgtgccattcgcagaaaggtagtcaagaatcgaacttgtaaagcctgcaaggaccaaacatgtctacctgacttagacttttgagtgctgccccatgacctccaccaaagtccgtataaggagccgactccttaaggactgaagaaaaactatcttctggaaaaagataaagtggagattatactaaaaacaaaaacaaaaaggttttcatcatctggccccagtttatattttcaactttttatcttgttattcccctgtgccttttacatactgatggttcaccactgtttcctgccttcatactttggtcatgcaatttcctctgctagtatacttttatttttatttattgatctatttatttatttttaaatttttgctattgtactttattcatctctatccacataattttactactcctttaacgcttagctcaaaagtcacttccaagaactcttttctgattttaccaactggaaataacttctcttttccaactcctttaactttccaatttttagcaaattagataaatatccactttattagtcttttgaggattgagtgaactaattatgactctctttaatatccctttctagactgtagaatcattgagagcaagatctgattcagattcatttggatgaatgccacattgcctagtgtaatacccttcatatagtatgtgtacagtaaatatttaatagatgaataaatgtaacatatgagtgcttttgcttttttttttttttttttttgagacagtatcttgctgtgtcatccaggctggagtacaatggcatgatcatagctcactgaagccataacctcctaggctcaagtggtcttcccaccttggcctcctgaggacctgggactataggcacgtgccaccacgctggctaattttttttttttttgtagggatgaggtctccctatgttgcccaggctaatttcaaactcctaggctcaagcaatcctctggccttggcttcccaaagtgctgagattacaggcctgagccaccgggttggccggattgtatcctcagtgccttagtgtctggcatctctatataatagacacttagtaaatgtttgagactgaacagtgcaaaattgtgattcaaaaagtcttcattaggctgcgcacggtggctcacacctgtaatcccagcactttgggaagccgaggcgggtagatcacctgaggtcaacggttcgagaccagcctggccagcatggtgaaaacgtgtctctactaaaaaatacaaaaattagtggagagaggcggcttgtgcctgtagtcccaactactcgggaggctgagacaggagaatcgcttgaacctggaaggcagaggttgcaataagctgagattgcgccaccgcactccagcctgggcacagagcgagactctgtctcaaaaaaaaaaaaaaaaaatctttgttatgtaatgtaactttgatacattcttctgctgataactagaaaatatttagtattttatatttgagatttagttcttgcagaagtacaagagccctcagttcatgtgaggcagtatattgtcatgggtaagaatatgaactttaaaatgagattgcctaggttgaacagttctctgtactacttgctagtacaagttgatcttggggaacttaacccatttatatcagttgtcacatctataaaatgaggaaattaatagtacctactttatatagttgtgaggattatttgggcatataagtcaaacacgtagaacagttcctcagacactgtaaatgccatgaatgttagctaatttattgttacttcctgaaaatgcactgaacacggttcagaacttgagtttgtgagttagggtgtacattctttttaaggaataacactctgctgacatcacatatcctctagctgtacatcctgtctgcttcctactattttaactaggtattgaatggatagctgataatcccagttacatgacagacagtattcagcatgtaaatgttaaataaacaagtcctcttgagacattttaactcagaaaggattaactagttcatgctaaggaacaacatgtacttttgttcactgtatttcctttgaagaatattttatttgttctggttgaatatactttcccattcagtgcagttaactcttcctaggtgataaaccctttaccggtctttactgacaaattaaaatgactatttaacgttccctgtattattttgaaccttaaaactgttttaacagccctctaaaattaatctggctctgatttttttttcttctttaatttttttttttttttttttttgagacagagtcgctgtcacctaggctggagtgcaatggcgcgatcttggctcattgcaacctccgcctcccaggttcaagcaattctcctacctcagcctcccgagtagctgggattacaggcacatgctaccacgtccagctaatttttgtatttttagtagagacagcatttcaccatgttggctaggctggtctggaactcctgacctcaagtgatccacctgcctcgacctccaacagtgctaggattacaggcgtgagccaccgcacccgcccttctgtttttttaaattttaataaaaacaaggtctccatatgttgcccaggctggtcttgaacttcttcgctgaagcagtcctcctgagttcgcctcccaaagtgttgggattacagaaatgagccaccatacccagcttagatatttttaataacaggtgaattctgaaatctacattggtgtaagattaaaagaatacatatggtattgttccattcatataaagtacaaatgcagggaaaactaaactatattgtttatggatatatgcttaggtagtaaagctataaagaaaaacaagggattatcatgaagataggtttgtggttactatgggtggtcggcagggggtggggaagggaattattgattagaagtggtacacagtgatactgggctggtgccttggggtgattacagattaaaggaagtgaatagttgcaagcctgagatgaaaagatttgcttttttatccagctgtttgtattgcattattaatacatgcatataattggttttagtgcctaaatagcaaaatttcagacacatactgacgaaaatgtattacttcttctgcaaaagggtcttttaacaaaagttgacactttcgtaatatagaagccctacttttcctccatacttctttctgtattctgaatcacctaaaaaaaaaccatctcaactggatcttttttccagtgtgcttttcttctaattctaaagatatttattatatcttctttgtacttcctcttcttcttcttatttttttttttttaaagactaggtcttgttctgttgcccaggtgcagtaatagctcactatagcctggaagtccccagctcaagtgactcttttggacttctgggtttttttgtttgttttgagatggagtcttgctctgtcaccaggctggagtgcagtggcatgatctcggctcactgcaacctccaactccctggttcaagtgattctcctgcctcagtctcccaagtagctgggattacaggcatgcaccaccacacccagataatttttgtatttttaatagagacagtgtttcaccatgtcggccaggaggctctcatctcctgacctcgtgatccacctgcttcggcctcccaaagtgctggaattacaggtgtgagccaccgcacccggcctggacttctttaaagttaaaatgattagctagtttcatttggcatctttagatttgaatttgtcatctacgtaggaaaaagaagttatataatcttagggacagtagaaaatggtttgtttatatagccttagatacataacaaagccattaatgttttaagaaacaccccaaagccatctgagtagctacatgaatacatatgattggagatttgtgttaggtttagctgtgatcttaacccttgacatcatagtatagtggttaagagtagaggaaataaacaactaggtaaatctagaatacaggttattctacaaagaactaccctgaacttgtctccccctaaaaagaaacaagagctagggcactgttctagactaaaagacactagcaagatgtgatgaccaagtgtaatacatgaacctaaattgaatcctgatttttggaggaaacagaaataaaataaatttgaggggcaattaggggagataktatggttaattttcttaggtgtggtaatgtgtattgtacttatttaggaagttgtcattattattagaagatgaataacaactggatgccgaaatatttatggtgaatatcataatgtctttatattaaacagttaagaagtgtcttcaaaataagatatgaatgcttaaaaaaaaacacctatgatcagccaggcacggtgactcacgcctgtaatcccagcactttggtaggccgaggcaggcagatcacctgaggtcaggagttcgagaccagcctgaccaacatggagaaaccccgtctctactaaaaatacaaaaaaaaattagccgggcttggtggcacatgcctgtaatcccagctactcgggaggctgaggcaggagaattgcttgaaccgaggaggtggaggttgtggtgagccgagatcgtaccattgcactccagcctgggcaacaagagcgaaactccatctcaaaaacaaaaaaaacactatgatcattctttaaatctctggtaggatttagtagctttattttcaacccatcctttagctccaaggaaaagcagcatgaagtgatggaaagagtactgaatttgttgtcaaaattcttggagtttaatttcagcatcaatattaactctctaggtgactttaaatcatttaaattataataatttaaataatttgtgtaaagcaaatctggcaaaatgtttgaatcccaaatttgaatcctggctcggacaatttcaagtaggaccttggtcacttcacttaacttttctgtgccttcattgtctcgtgtaaaatgaagataatagtaatgtctacctcataaaagtgttgtgaggattaaatagtattataaagataaagtgctcagaatagtgcctgagcattcaacaaatgtagctgctgctgctgttattgttttatatttattttattatctattactttgaagagagcttggaagactcaagaggtagaaaatataaaacagaagtccaggcaggcagaaccctcaaaacaactaggcaaagatcaagcagttgttgttataattaggaaatgagatcccacatgaaatcaccctgcagggtctaacctgtagtaggtattcataaatgttagtttccttctgttatccctttctttccttcctcattttatagtattatttaatctgaggcttgcagagcactatgtgaccatccattctaattctgcttcttctctgcttctggtttgtataacattgagtcttcgaggtgcctttgcacacatcttatttcatctattacattttgatttgatgttggcttgttgcctctactaattactacataatacagttgaataaaatatagtttaagcatatacacagaactgtctgaaaagaaaaatcacgctctagtgttgactgaagatatataatattaagaaaaattataggttattttatattaaaacatatactaattagaagcttagaatctgtctataataccaaaatctaatagccagaaaacagaattttgattattaaaaataactgatcaaatttatctacaatttatatatttctgataattaaagaaataagtgagtctccaaaatatggtaagaatattttttaaaaatctataataaatctttaaatctctgttagaacttgatagcattattaactcatcctttakctccaaggaaaagcagcatgaaatggtggaaagaacactgaatttgttgtcgaaattcttggagtttaatttcaacaccaatattaactctctagatgactttaaatactctaaacatcttggcatctcaagcctcactgtgcattagaatcacgtggggagctttttaaaaaatgcagatataaaatttctgtctcttctgagattctgattcagttgtcctaggatgaggcatggacattgatacaaatacactgtaaaatttcagactattctaatgtatagccagggttgaaaacctttgtatatgtagtttccttggaagcctaggcaaaggaggcatcaaagagaattggctttttatatcctacactgtctaggagagagagagactgaaactgggagatgcaaacaaccttttctagacaggtactctctgctctgtggcactgatgttacgttaggtctcacaggaagctggattagattttgcccaagacgatctgtttttctttgccctgattacttgctctacaagtagcgttctgattattaaatcagcctcctagacacttcagaattataaaaggatgtgcctgagataatgcttgagcattctttttagacacttgagtgtctagaattggttctctagtttatccattagtaccttgtgagtttgcttttagtctctcttggtttgaccaactctggggaaytgacagggtcaagttttgatctctaagggtgaataccagatcctgattcctggtaaatttaccaaattagtgaccctgtgttatctcttgacatttggacattttaaatttatggatataaaactccctgaagccgtgaagaatttgtaataaagtattataataaaaatataaataaagagaaatatgtaataaaatctttcctgtatactcttaagactgaaatagctgtccaaaggcagatttttttttttgccagctatggtggctcacggctgtaatcccagcactttgagaggccaaagcaggaggatcacttgagcccaggagttcaagaccagcctgggcatcctagggagaccctatctctacaaaaaataagaaaactaattgggcttggtggtacacacctgtggtcccagctactcaggaagctgaggtgggaagatcccttgggcctgggaggtcaaggctacagtgaacygtgatcacactactgcactccagcctgagcaacagagcaagagtctgtctcagtcaatcaataaagaaagaaaaaggcaggtttttgttttgtttataatgatcctgattgactgttggtggaaatgtaaatacagccattatggaaaacactgtgaaggttcctcaaaaattaaaatagaggctgggtgtggtgactcacgcctgtaatcccagcactttgggaggctgaggcaggcagattgctggagctcaggagttcaagaccaacctgggcagcatggcaaaaccccatctctacaaaaaaaatacaaaaattagctaggcgtggtggtgcgtgcctatagccccagctacttgggaggctgaggtgggagaattgcttgagcctgacaagcggtggttgcagtgggccaagactgcaccactgcactccagcctggattacacagtgagaccctgtctcaaaaaataaaatgaaatagaactaccatacgatccagcaatctctctattggatatatgtccaaaggaaatgaaatcaggatgttgaagagatactgcactctcatgtttattgcagcactattcacaatagccaagataaggaatcaacctaagtgtccgtctacagataaatagagaaaatgtgtgtatgtctgtgtgcatgcaccatattcatattcagccacaaaacagaatgaagtcctgttatttgcagcaacatggatgaatctggaggacattatattaagtgaaattagccaggcacagaaagacaaatactacatgatctcactcatatatggaatctaaaaacaagttaatcttgtagaagtagaaagtaggatagtggttatcagaggctagagagaaaggataggagaggaggatggatagaggttggtcagcaagtacaaaattacagttagctccatccatgtccctgcaaagaacgtgatctcattcctttttatggctgcatagtattccgtggtgtatatgtaccacattttctttatccagtctatcattgatggacatttgggttgattccatgtctttgctcttgtgaatagtgctgcagtgaacatacgtgtgcatgcatctttataatagaatgatttatattcctttgggtatatactcagtaatggtattgctgggacaaatggcatttagtgggagctgaacagtgagagcacatgtacacagggaggggagcaacacacactgggcctgtcagtggggggcagccgggagagggagaacatcaggataaatagctaatgcgtgcagggcttaatacctaggtgatgggttgataggtgcagcaaaccaccatggcacacgtttacctgtataacaaacctgcatgtcctgctcatgtatcccggaatttaaaataaaataacaggccaggcgcagtggctcatgcctgtaatcccagcactttgagaggccgaggccggcggatcacctgaggtcagtagttagagaccagcctggccaacatggtaaaaccccatctctactaaaaatacaaaaattagctgagcgtggtggtgggcacctgtaatcccagctacttgggaggctaaggcaggagaattgcttgaatccaggaggtggaggctgcagtgagccaagatcacgccactgcactccagcttgggtggcagagtgagactttcccccccccaaaaaaaagattacagttagatgagaagcgtaactggttttctgttgtacagtagggtgactatgactaataataatgtatatttcaaggtagctagaagattttgaatgttatcaccacaaagaaatgatagatgtgactggtgtggtggcttatgcctgtaatcttaacactttgggaggccgaggcaggaagatcacttgggcctagaagtttgagaccaacctgggcaacatagtgagaccctgtctctacaaaaaagtaaaaaaaaaattagccaagcatgatggcacatgcctgtagtccccgctactcaggaggctgaggtgggaggatcacttgagcccaggggtttgaggtttcattgagctataattgtgtcattgctctccagcctgggaaagagaacaagaccctgtctctagaaaaaaacaaaaaacaaaaaacaaatgataactttaaaattatatatgtgctaagtatctttatttgatcatcatacagtgtatacatgtattaacatattacactgggccagacgcgatggcttatgcctgtaatcccagcactttgggaggccgaggygggctgatcacctgaggtcgggagttcaagaccagcctgaccaacatggagaaactccgtctctactaaaaatacaaatttagctgggcagtggtggtgcatgcctgtaatcccagctactcaggaggctgaggcaggagaatcgcttgaacccgggaggcagaggttgcggtgagctgagatcgtgtcactgcactccagcctgggcaacaagagcgaaattccatctcaaaaaaaaaaaaaaaattacaytgtaccccataaatgtgtacaattatgtgtcaattataaataaagttgaaattttaaaaatgatctgtggctggccgcggtggctcatgcctgtaatcccagcactttgggaggccgaggcgggtggatcacgaggtcaggagatcgagaccatcctggctaacatggtgaaaccctctctctactaaaaatacaaaaaaattaactgggcatggtggtgggcgcctgtagtcccagctacttgggaggctgaggcaggagaatggtgtgaacctgggaggcagagcttgcagtgagctgagatcgcgccactacacttcagcctgggcgacaggacaagactccgtccgtatcaaaaaaaaaaaaatcttgtttagaaggacattggggaactgaatgaattattattttgattgctgctttttttttgcacatttatttaataaatgtttattgagaacctaccatgtgctaatcatataggccttagtaatcatcttgattactctatctttcctaaaaataaaacaaaaataacctaacaaaaacccactaagctcttctgctgcactgagtgctacttttcttttcttttcttttggtttttttttggctagatacactctcattttgcctttcctcccttttctttttctttaatttgtagtatggtacttgtctgctttcatgttcttactactgttgaacctgcttggtagatgaagtagccagatcagagcttttgttttgtgtaagttactaataggttattttactattcaagtctttttcccctgtcactaagtacttggttgagaaaaaataattgaatagctttttgaaataaaacatgtcattcattccaaagaatgcaaaagtacatatagttaatgagaagagagctgaaaaacatatcctgcttagtttcccaggaagctaaggggaaaaaacataaacttaccttgccttacctagaattggaccagaatgtggaccttatatgagacagcttgaagccttgacctttgggtacttagcttgttctgaaatcaacaattcagaggactaaagagcctttggtaatcagtcagggttcacttgcaagagagagaaacttctttggtctgggctaggaatgacttctactacaatatttaaattggcctgtcagaggaatgctacctttgctacagtcagaaggttggcattaggaggccaacatgaaatgctgagtttgagaatgcgccatctcaataccaaaaaaacccagtaaaaacataggcaaaagacttgagtaggtgtttctccaagcaaaatatacaaaggtcyagtaagcatatgaaaagatgttccacatggctaatcattactgaaatcaaatcaaaatcacaatgaaatactactttatgtcataaaatggctactattaagaaaaagaacagaaaattacaagtattagcaggaatatagagaaattagaacactttgtgcatatttctagtaggaatgtaaaatggttcagctgctgtggaaaatgatwtggtgactcctcaaaaaatttagcagaattactgtacaagccagcaattccacttctaggtatatacctgaagtaaaagcagggacttgaacagatatttgtttacccatgttcaaagcagtattattcacaatagccagaagatgaatgcagcttaagtgtccatggatggatgaatgtgtaaacaaaatgtgatatatacatagaaggggatattattcagccttagaaagaaaattctgggctgggcgtggtgactcatgcctgtaatcccagcactttgggaggccgaggtgggtggatcatttgaggtcaggagttcgagaccagcctggccaacattgtgaaaccccacctctactaaaaatacaaaaattagctgggtgtggtggcaggtgcctgtagtcccagctacttgggaggctgaggcaggagaattgcttgaacccgggaggcggagcttgcagcgagccaagatcgtgccactgcactccagcctgggtgacagagtgagactccgtctcaaaaaaaaaaaaaagaaagaaaattctgacatacactacaacacagatgaaccttgaagcctaagtgaaatgagacacaaaagaacaaatattgcatgattctacttatgtgaaatatctagaatagggaaattcataacaacagaatatagattagagaataccagggactgagcatgagggggatagtgagttattgcttaataggttacagggtttttgcttggagtgatgatgaagttctgaagttggatggtggtaattgtggcacaacattgtgaatgtatttaaggaaacagaactataacacttaaaatggtaaaaatggtaaattttatgtatagttaaccacacacacagaaaagagcatgtatctgttatgcaggtattaggaaaccactactacttgccccacaactgcagctgcttcatgacccttacaaagttagtgactgaaacctggagaattatgtgcatgtggtcagcatttccataatccttgtggatagccaaaacttcagtaaaacaactcccatttcaccatctgttttccatatctcatgagcatctcatgagcatctagttggctgaacctgattcacatttgaatcctagtagcaagggaccctgaggaataatgattagcttttcagactgtgtagtaggaggaaacgactagagggagactagaaaggatactgagtgctgcttcatcatatctgccacaggcactgagtcagaggtgattcgtagatggcagtgctccttttagtcaggtcaccatttccagtagtattgagaatgtcctgcagctgataagttggagaggtagggtggggacaaagtcattatctctttttgcagttaatgggctgattgtgctatggtatttgcagttttaatgtggtagaacacatttggattatttaaattattgtaaagagatttgggtcactctaatgggatgcattaaagactcattgactaaagactatctgggctaatgtttaggagtaccaaatgtaaggttgttatgtttatgataagcttttttcatttcatcaagtatggatataagaatataatagaaaatatactgagttcttttgctcttaggctgctgaaatctctaattagtatgaactaaatttgtttggagagaaaagaaacaaatttactagtaaagcatttacttgctgaaaattgcacttcttaaaaacagttttcaaaaattctaaccagaggtcacccaaaagataagatatttcatattgttcagaacagtccggtgtttttatctgttatctgtgacttaaaactaagtttgaataattcctgttgataatcggattctgcaggaatgactgttctctcagcaccttgataggtattgacctttgatgcttaagtggttttttctttttttttttttttttttgagacggagtttcgctcttgctgcccaggctagagggcaatggtgtgaactcagttcactgccacctccgcctcccaggctcaaacaattctcccgcctcagcctcctgagtagctggaattacaggcatgcaccaccacgcccgattaatttttttttttttgcatttttaatacagacagggtttcacaacattggccaggctggtctcaaactcctgacctcaagtgatctgcccacctcggccttccaacgtactgggattataggcgtggrtcaccacccattaacattttggacaagtaccaagctttgcatgaaatgctttttaaggtggaccacgctttaatggtgtaataagagttagtatttaaatcagatttgttgatacagttattccacttctagaaatttaacctaaagcaatgcaatgccatttataataataataaaatagtgaacaattgttaacaatggggagatggataaattattgtatagtcatacaatggaatgttttaaaactatcttttcaaaagatatttaatagcattagacaggactcatgcaataatgttaagcaaaatgatacagaattatgtatgatgtgatttctctttatagaaaattttgtgtgtgagagaaatataacaaattataaggagtgatcctttagggattagttttcaaattttctgttcttcagtgaatatatattgcttctatatatttggctttttattatagagagacttaattataaaagattcaaaccatgcagaaacttgcagactaaaaaccctaaaaatccttcctctgtccccgacctagagaaatggagaccaattcatcaatttgtttttatatggattttgtttttggtgtcacatctaagagatctttacctaacccaggtcagaaagattttctcctagaaattttctagtcttaggttttatgttaggtctatgatccattttcagttaattcttatatgtggtagaagtatgaattgaggtttttacatatggrtatccatttgttccagcatcatttaatgaaaagactgtgttttctccactgaattgcctttgcacatttgtagaaaatcagatatctatatatgtataggtttgtttctggactctatattctgtttccttgatttatgttaacaccactttgtcttgatttgagtactgagataggcagaagtccccgggttcaagcaattctcctgccttagcctcctgattagctgggactacaggcaagcaccaccaagccgggctaatttttgtgtttttagtagagacagggttttgccatattggccaggctggtctcgaactcctaaccccaagtgatccacccgcctctgcctcccaaagtactgggattacaggcttgagccaccccgccctgtcaagatacagaattctaaaatgactyctaatgacctatgcttttgtataatgggagggacctgtaatcccacctaatcatgggatatcactcccatggtgactaagaaagggagattatcctcagtggacctgatctaatcagacaaacccttaaaagggactgggcttttcctggagaaataatccaagtacaagggaagggaattcaacacagaagaagctgctgatttttgggaaaagaggaggccatgcagtaaagaattcgagtggtcggtaagcttacggtaatttgttacaaagcaatagaaaacaaatacaggtagttgtataataagtgtttaaatcagctgtttatgaaatgtatcaatatctacaaaattaaaggcccgttgggattttgattggaattgggttgaatgtgcagataagtttggggaaaattgtcctcttaacagtattgattcttctgacctactcatttctcatttttaggtgttcgtcttagcagtgttttttgttgttttcagcatataggtcttgcccatgttttgtcagatttatccctgagtatttaatattttttatgctattataaatggtattttatacattttaatttttgattgtttgttgctagtatatggaaatacaattgatggctgggtgtgatagctcacgcctgtaatcccacactttgggaggctgaggcaggtgaatctcctgagctcaggagttcgagatgggtctgggcaacatagcaaaaccctgtttctaccaaaaatattaaaaattagccaagtgtgccaagtgtggtgcgcatgcacctgtggtcccagctacttggaaggctgaagtgggagaatggcttgagcctgggaggtggaggttgcagtgagccgagatcgtgccactgcactccaacctgggtgacagagtgacaccctgtctcaaaaaaaaaaaaaaagaaaggaagacaattgatttttgtttgtcgatactatatgtggcaatcttgctaaactgacttattctagtaactgtttttggtatagtctattgaattttcaacataaataatcaagttgtcagcaaatagagttttatttcttcctttttaatctgtatgccttttactttttttttttttttttcctcgagatggagtctcactctgtctcccaggctggagttcagtggtgcgatctccgctcactgcaagctccgtctcccgggttcacgccattctcctgcctcagcctcccgagtagctgggactacaggtgcctgccaccatgcccggctaattttttgtatttttattagagacagggtttcaccgtgttagccaggatggtctcgatctcctgacctcatgatccacctgcctcagcctcccaaagtgctgggattacaggcgtgagccaccacgcctggcctgccttttgcttcttttttttatcttattacactgaccagaacttctgatgttttgtagaagtggtgagagtgacggtcttgccttgcatcttttttttttccttacacttgctttttaaaaaaattttatttttatttttgtttttgagaaagagtctcactctgttgcccaggtggctcactgcagcctccaccttctgggttcaagcaattctcctgcctcagccttctgagtacctgggattgcaggcacccaccaccatgcctggctaatttttgtatttttagtagagatggggtttcaccatgttagccaggctggtcttaaactcctgacctgaggtgatccgcctgtctcagcttcccaaagtgctgggattacaggcatgagccaacatgcccagcctttgttattgatttctgccctcatcattattatttccttctgctttgggtttaattttctctttagcttcttggtggtattattttagctgatattagtggatttccatttctcccaacctttgtgctattgttaacatatgttttacatatgttataaatcccacagtacattgctttttgtttaaacagtaaattatcttttttttgagacgaagtcttgttctgccaccaggctggagtgcagtggcacgatcttggctcactgcaacctccgcttcccaggttcaagcgattcttctgcctcagcctcctgagtagctgggactataggcgcgtgccaccacgcccagctaatttttgtatttttagtagagacggggtttcaccatgttggccaggatggtctcgatctcttgaccatgtgatccgcccgcctcggcctcccaaagtgctgggattacaggcatgagccaccacccggcctaaattatcttttaaagaaacttaaggccgggtgcagtgcctcccatcactttgggaggccgaggcaggcagattacctgaggtcaggagtcttgaaaaaccaaacaaaacatcaatacaaatgaatatccttctatcctgaaggacaaatgaatgaggacagcatcctcttccttttcccacaatgtaataattcttgatttgagtgtttatcatggccttataagtgcattgttggctattaaaaactttctgtgcttccttacaacaagcaaagttaaaagctggtactgcggctgggcgcggtggctcacgcctgtaatcccagcactttgggaggccgaggcgggtggatcacaaggtcaggagatcaagaccagcctggccaacatggtgaaatctcgtctttactaaaaatacaaaaattagcctggtgcagtggcacgggcccataatcccagctactggggaggctgaggcaggagaatctcttgaacccagaggcagaggttgcagtgagcctaggtcatgccactgcactccaggctgggtgatagagtgagactctgtctcataaataaataaactaactaacttaaatagtaagaaaaaatgtatatatttatgcatgtggctaccattttggtgttcatttctttgtgtagattcatattttggtatggtaacattttctttctgcttgaaggaccttaaatttttgtagtgcatgtctgctggtgatgaaatcagcttttgtgtgtctgaacaagtatttgcctttgcttgtgaatgatatttcactgggcctacggttttaggttgttgttttttttttctttcagtactttatgttgtttcactgtattctagcttggcttgagcccagtaagaaatctcttatcattcttacctttgttcctaatgtgtctgttttctctttttgcttttaagattttctcattgtcactgtttttaagtaatttgattttggtatgccttggtatagctttcttcttgtttcttatttttggagtttgttaagcttcttggatacacatgtttatggttttcaccaaatttggaaaatttttggccattgttacttcaaatattttttctgttctctcttgtcttttggaagctgtttgatgttgttccacctctcactgatgttctttctttggtgtgtttgtgtgtgtggtaaaatatatacaaccaaatttataatttaaacttttttttttttttttttggagttggagtcttgctctgtcacccaggctgaagtgcagtggcacgatctcggctcactgcaacctctgcctcccgggttcaagtgattctcctgcctcagcctccagagtagctgggattacaggcacccgccaccatgccaggctctttttttctatttttagtggagatggggttttcacagtgttagccaggatggtctccatctcttgacctcgtgatccgcctacctcggcctcccaaagtgctgggattacaggcgtgagccactgctcccggctgaaatgatttttttatatagttcagtggcattaagtacatttactgtgttgtgcaaccattatcaccatccatctttagaacttttaaaaaatcttcccaaactgaaattctrtacctattaaaaaatgactcattctccctgctcccagtccctgacagccaccattctactttctgtttctgtgaatttcactactctagttacctcgtataagtggaatcatacagtatttgtccttttgtgactggcttatttcacttagtataatgtctttaaggctcatccatgttgtagcatgcgtcagaacttccttcctttttaaggctgaataatagtctcttttttaaagttctcttttttttctgtgttttattttgaaaagtttcttttcttttcattgtttttttgagacaggctcttgctctgttgcccaggctggagtgcagtggcgcgatctcagtccactgcagccttgaactcctgggcttaggtgaccttcttgcctgagcctctgagtagctgggactacaagcatgggcaaccatgtctggctaattttaaaaaattatttatagagacgaggtctcactatgttgcccaggcaggtcttgaactcataggcttaagcaatcctcccacctcagcctcccaaagtgttgggattgcaaccagcgcccttgaattgtttctattgttacttagttacatttattgctcttaccttctgcagtggctcagcagctgttagtcccatccagggtatttttcatctcagattatttcattttatctctagaacttggagttgcgttagtctttttttacttatctatttccttttttgttgagatggtgcaggggcaggggacatctccctttgttgctcaggctgaccttgaactcctggccgcaagggatcctcctgccttgcctcccaaagtgcagggattacaggcgtgagccaccacctggccattatgtgtctatttcttcatttaactttttggacaaatgtaatacacaattatcataactgagttaatttccttatctgctaattttattaaatgtgtcagttcttgattgattgattcttctcctcattataagtgatactttcctgcttctttgcatgcctgacaatctttgaatagattccagacattatgaattagttgttggacattaygaattcattgttgggctctagatactttggtatttctattaatattcttgagctttttgtgggatgctgttcaactacttgaacagagtttgatccttttgagtcttccttttaagatttgttaggatgaacccagagacatgtttagtcaagggtagggtttctcaatagcagcaccatggcatttggggccaaataattctttgttgggggaggggatagtcctgtgcattatagaatgtttaacatcattcccccccaaagttgtaacaaccaaaaatgtcttcagacattgccaaatgttccaggaagtggggaggattgcccgcagttgagagttgctgccttagggttagttttgccttactactatggcaagatctttctgtgtactctacccaaagctgttcatgagaccttttttcaatctggctctttggaataggtacttttcttggcctcatgtgagtgctgggaattcawttgggtggtctttccttggtcttggttagtttccttacatacatgtgctgataggcattcagctaaatattcaagagagacccgcagatctctggagttcttgtctgtgtatctcgtctccagtattgtgccccataaacactagccatcttgattgccccaaactctcagctccatctcttcaactcagtgagcctgccaggcctcacatgagtttcccatcctgtgcctcttgtggctgggaaactcaaggccgtaacctggggcagtagggttcaccttatttgtttcctggctctcagggattttcctgatgtccagtgtcttgacacttttttttttttttttttttttttttttggagacagagtttcgctcttgttgcccaggctggagtgcaatggcacgatctcaactcaccgcaacctccgcctcccgggttcaagccattcttctgcctcagcctcccaagtagctgggattacaggcatctgccaccacacctggctaattttttgtatttttggtagagacagggtttctgcatgttggtcaggctgttctcaaactcccaacctcaggtgatccgcccacctcagcctccctaagtgctaggattacaggcgtgagccaccgcacctggctgaaacttttttttccccatatattttgtttgttttttggttgtttcaggtcagaggataaatctggttcttgttagtaaatcttggtcagaagcacatgtcctttaacagatcatttatttgtattaattattgataaaagctgaattcttaaacatttactaatctaatttccttattttatcaatttgtatttatcattcaaagtctcctgttccctgtaattcctttggtacaacataaatattaaattggccctaaagctttttatcatcttttaatatacctctttcatgcaggctttcacagggttagctaagtagtgatttagtatgggcctcttaactattatatagtagcatacaattaaagggcatgcactgacctgataaagcagaacagtgaaatgtgtcatgcttttagggcattcccacagcaggctcaaagacttccaagagacttccacgtataacttatattttctagcagctaaaacgtcagcatcaaagcctattagcctgattgaggttgtaaagaactggtgagctaagacagtggaaaaaaacatataaaagaagagaagaatcattttgaacagagtatgagaggaaactgtcctaacgaataatgctacaagaatgggagtgacatggaacccattggtggtaagctgttagagaaaggggaatgttaacagactagaaataatgtgactgaagaaatctggccttgtattttttatttatttttttttatttttgagacggagtcttactgtgttgcccaggctggagtgccgtggtgtgatctctactaactgcaacctttgcctgccaggttcaagcggttctctgcctcaacctccctagtagctgagattacaggcgcccgccaccatgcctggctaatttttttgcatttttagtagagacggggtttcaccatcttggccaggttggtcttgaactcatgacctcgtgatccacccgtctcagcctcccaaagtgctgggataggcgtgagccaccatgcccggctggctttgttttatgtgaaggaaacttgtctctcagatttgctatatcataaccactacagagattatagcatgtgcttgttggatatccaaggatgaagtaatttagtcagagatactttgggtaaaagaagatatgtatagtaggtagggtgaaagcatctagttatccatgtgaactaaaacagcaaaatcatatttctaatggaattgtatatatgatataataaatgatataaaataatataataaatgtataagttccatgtgttaaagtgaataaatcataattctttgacatttgaggtggtgatgatatgctacagctaaaaagagttaagagtttttgttattccataatgcataagaattagacaactttgtaaaaaatacagactccttgtaaatggatgttataataattttcaaagacagggaaactatgtgggtcaataatataagttcttttgtgaaacaaaatatgacttaagtcttccaaaaattacgattgcttttagtaataaagaaataaatacttaatgtttaactgacacttccctgacattcatctgtgggtggattttatcaagcttatttcttgttttctaaatagttttgatgatataaatggtgctcatgtagttagtgtctgcctttgccaagttactgtaagtcttcgtggcaggagtttatgtgggtagggaaagaatgcagagcaataccagctttttttttttttttttttttttttgagacagagtcttgctctgtcgcccaggctggtgtgcaatggcacaatctcggctcactgcaagctctgcctcccaggttcacgccatcctcctgcctcagcctcccaagtagctgggactacaggcgcacgctgccatgcccggctaattttttgtatttttagtagagatggggtttcaccttgttagccaggatggtcttgatctcctgaccttgtgatccacccgcctcggcctcccaaagtgctgggattacaggcgtgagccaccgcgcccggccgcagtaccagcttttaactttgcttgttgtaaggaagcacagaaagtttttcatagccaacaatgcatttataaggccatgataaacactcaaatcaagaattattacattgtgggaaaaggaagaggatgctgtcctcattcatttgtccttcaggatagaaggatattcatttgtattgatgttttgtttggtttttcaagactttgaaaataaagtttaatctaacatatatagagaaaagtatagatcacaattatacagcttgatgaattttcacaaaaggaacaaactcatgtaactaatatgcagatttttaaaaaagaacatttgtattagaacagtttttctttttttcaagctgggtaataggcacataggtgttcgttgtatcattttattcttttatgctttgaagtttgcctaccatttttaaaaaattatctcaggtggaaatacaatcttcagaggtctggaaagtgtcagaaaacctacaggctttaatagttgagaaagtacttttgagaaatagtgtttttttccatgtaggcctttgtctcctatgtatctgatatactttataaacctgagaaggcccaagtaactgaatgttttacaataaaagaagaacataaatagagctgtgtgaaatcaaagtagtaaaaattattggtactttttaaaacatagcaccttattggccttttattctgcagtataaagtctgggtcatcaaatttgtgagtacatggaaatgacagttttcttttaaaaattttattgctaaagtccgtgatagtttaagaataaaatgccctattcagttctataatgtaatattcaaagctgtagaaagaactgagttattattgagattcaaatatatgtctagtttaaaggcttcatatctgttatagaaatcattatgtgtgcagtagttagaaatacgcttaatctaaagggttccctggaattacagttatctactttcctttatgtttatttccccccaggtggggagatacgttttccatgaacatggagatttcagaaatcggatttttttctcttttctttgatttttaaaaatataataaatcttcctatatttcttgattttatgaaaagtattaaaatgggatttttctcagttctcgagtaggctttttaattaaattgtgactcatgcagtggaaaagccatttgtaaaatgtcgttctgtaaaaatgtttggttattaaattttcttctgctgttggagtcatatgcataaaattattagtgtgttaatctattgaaaaccattcattattgaataatttttgtttcttttactctagaaaccaataggatagtgtaggtaaattactgtttctggggtgcgtgtgtgtatatacatatgtgtgcgtgtgtgtgtgtgtacatctctctctctctctctacatatatatatatatagttttttgtttttttttctttgagacgatctccctctgttgcccaggctggagtgcagtggcacaaccatggcgcactgcagckttgacctcccagactcaggtgatcctcccacctcagcctgccaggtagctgagactataggtgtcccaccatgcccaggctaaaatttttttttttttttttttttggtagagataggatcttgctacgtggcccaggactggtctcgaactcctgggcttaagtgatcctcccaactcagcctcccaaagtgctggggattgtaggcatgagccactgcgcctggcctgtttctggtgtatttatgtgtgtttgtctttgaagaaattgttaggacatactgaagcttttgttttgttttcctgttttctctctacaggcagcggaggaggaaatggcaggtcctaatcaactctgcattcgccgctggactaccaagcatgtagctgtgtggctgaaggatgaaggcttttttgaatatgtggacattttatgcaataagcaccgacttgatggaatcacattgctaacattgactgaatatgatctccggtctcctcctctggaaatcaaagtcttaggggacattaaaaggttaatgctctcagtccgaaaattgcagaaaatacatattgatgttttagaagagatgggctacaacagtgacagtcccatgggttccatgacccctttcatcagtgctcttcagagtacagactggctctgtaatggggagctttcccatgactgtgacggacccataactgacttgaattctgatcagtaccagtacatgaatggtaaaaacaaacattctgttcgaagattggacccagaatactggaagactatactgagttgtatatatgtttttatagtatttggatttacatctttcattatggttatagtccatgagcgagtgcctgacatgcagacctatccaccactcccagatatattcttagacaggtaagttttgtttctagttgctaagtttgtaggatgttgctataattaacagcaatgatactatatttatgataattatattgtttcttattgtggtagatgtatactttccatttgctttatctggcggtataaaatgctttgaaattacctttttcacttagagtaaattaggccttaagcctaggtgtgtgagaaaaaccactgctcttttaatttttcaatttaatttaattttaattttaatttaattttttattttgagacagtctcacactgcactgtcacccaggctggaatgcagtggcatgaccatggctcactgcagtctcaacctcccgggctcaagcaatcctcccacctcagcctcccaggaaactgggactgtagacatgttccaccatgcccagctaatttttaagttttttgtagaaatagagtcccaccgtgttgcccaggctgggtgaactcctaggctgaaacgatcctcccaccttggcctcttaaagtgttgggattacaggcatgagccatcatggcctggactgcttaatttatttttgtgtagttatagctccttgggtactttagattttttgagacagagtctcgctctgtcacccaggctggagtgcagtggcatgatcttggctcactgcaacctccacctccctggttcaagccattcccctgcctcagcctcctgagtagctgggattacaggagcccgccaccaggcccagctactttttttgtatttttagtagagatggggcttcaccatattggccagactggtcttgaactcctgacttcaggcagtccgcctacctcggcctcccaaagggctgggattacaggtgtgagccaccgcgcttggccaggtactttagattttaagagggtatctggaatgatgtttgtaataaatggaacttggctgcctttttttatttttttttaaatgaagaatagggttctgctttttcaaaaatattgatggtgtcatatcaccaaatgaattggaactatcacaaagaggacaagtggattcagtgatagcatgctgttttattaaatattgaatacataaaaaaatgtagtatatgtgtaacatatgaaaaataagaatagggccgggcgcggtggctcacgcctgtaatcccagcactttgggaggccgaggcgggcggatcacgaggtcaggagatcgagaccatcccggctaaaacggtgaaaccccgtctctactaaaaatacaaaaaattagccgggcatagtggcgggcgcctgtagtcccagctacttgggaggctgaggcaggagaatggcgtgaacccgggaggcggagcttgcagtgagccgagatcccgccactgcactccagcctaggcgacagagcgagactccgtctcaaaaaaaaaaaaaagaaaaaaaaaaaagaaaaataagaatagaacagtaggccaggcatggtggctcatgcctataatcccagcactttgggaggcccaggtgggaggattgcttgagtccaggagttcaagactagcctacaagttcaagacttgcaacatagcaagacccccatctctccaaaaaattaaaaattagccaagcatgatggcacatgcctgtagtcctaactactcaggaggccaaggtgggaggatcacttgagcctaacaggttgaggttacagtgagctatagttacaccactgcactccagcctgggcagcacagcgagaccctgcctgtctccaacaacaataataataataaaacagtaaacaagtactcagaactgttttcacatttttgatttttaaatcttttaaaaatttgggtattactttcttgtttgttagtttttggttttgtttttgttttttagatggagtcttgctctgtcacccaggctgcagtacaatggcacgatctcagctcactgcaacctccgcctcctgggttcaagtgattctcctgcctcagccttccgagtaactgggattacaggcacccaccaccacgaccggctaatttttgtatatttagtagagacgaggtttcacagtgttggtcaggctggtctcgaactcctgacctcaaatgatccgcccacctcagcctcccaaagtgctgggattacaagcatgagccactgcgcttggccccttgtttgttttttataaaacattttgcccttctaaaagtgcctttgctgggcattagggctcatacctgtgatcccagcacttcgagaggacgaggctggtgggatcacctgaggtcaggaattcgagaccagcctggccaacatggtgaaaccccgtctctactaaaaatacaaaaactagctggatgtggtggcggacacctgtaattatctcagctactcaggagactgaggcaggagaattgcttgaacctgggaggcagaggttgcagtgagccgagatcgcgccatcgcactccagcccgggtgtcagagtgagactgtctcaaaaaaaaaaatacataaagtaaaataaaactgccgtgtagtatttgtatttgaaaatgaaatgaatttaaaatgtccgtgttcctatgccagaataatgtatacatctcattttgctccctgtcaaaccccaactaaaactatagtaaagaggtttttttttttgttttgtttttgttgttttgagatagagtccaggctggagtgcagtgacacaatctcggctcactgcaacctctgcctcccgggttcaagctattctcctgcctcagcctcccaagtagctgggattacagacatgtgccaccatgcccagctaattttgttgtatttttagtagagacaaggtttcactgtgttggctaggctggtctcgaactcctgactcaaatgatccacccacctgggcctcccaaagtatagggattacaggtgtgagccaccatgcccggtgagctgtagtaaagagttttttgtttttgttttttaagtaagcccacaggatggaktggataaaataggagaaaacagccatacatttttggaagttggaagatggatggatgagtggcaattgacaaacccaaaattaacctaattataaaatttgagcaatggggaaaactgagaaccaaccccgtttatattgcagatttctccaaagtaaggagaacttactgaaagctgtttaagaagttgttatatccgtgtatcttgtctccccttctatacagtttttccaactgtaaacagaagaccactaggaagtaaggaagaaatcatgtggctgtctggggaaaatagtactttaggcaaagcaaacagctgggtgcaaaaatctgaactgggagtgttcctggcaggtttaaggaacaaccagtgagagatgagcagatctgagaggagacaagaagccaggttgtgtaaggacttgaggaccattgtaaggacttcagctttcattctaaatgaaaagggaaggcactggaaagtactgaggacaagagttgagggatctaacttctattttaaaaggtcattctagttgttgtattgagaataccctggggtgtgggtggggatctagagatcatttaagaatttattaaattcatctagacaaagattttagattggatgagaacagtggtagaggtggtatgaaagagtcaaattctatatatattttgaaattagaaaattagagctaacagaatttgctgatgaatttggatttgatgaattaagagagagaaatcaaatattattccaagatgttttttgttttttgttttttttgagacagggtctcactctgttctccaggctrgagtttagtggtgcattcatagatcactgtaacctcaaattcctaggctcaagtgatctccttccttagcctcccgagtcactacgactgcaggtgtgtgtcaccacrcctgcctgatttttaaatcttttgtagagatggggttttgctatgttgcctaggctggtctcaaacttttggcctcaagtgatcctcccatccctgcctcccaaagcactgggattgtaggtgtgagctaccaccccccagcctattccaagatttttaacctgaccatctgtaaagatggagttgccatttacagagatgggaaaaytgtggaaggagctgacttggagggaaaattaagggtttggttttcgacatgtcaggtttgaaatatgttttgtagcaaattcagatgtcaaggaagagatggaaatatgagcagaagttcagagagattgagagagacagaaatctaggctaagatttgggaatgggcagagagagagaacagtatgccagaagccaagcaaaaaaaaaaaaaagtattttaagaagtttaggaacaattggctgtagcaaatgctgctgaaaggtcaagtaagatgaggataattgaccattggctttagcaacatgttggtcatcagtgactatgacaagagttaataagggcaaaaatgggttataataggttcaggagagaatgtgagatgtattggaatttacatgaaggtactccacaaatgtgaaacaacatgagcacaacagtatttgttgtgacattgtttgtaataattataaatattgtaaataatctaaatgcttacccatgggaagctggttgagtagactatcatacatctatacagtggcatactatttaatcatagaaaagaatgaagacaatttctgtgagctgatacaaaatgatttgcaggaaaaactcagcaacaatagcactatgagcacacagatcgtggttttaaaatactgttcccaggccaggtatggtggctgactcctgtaatcccagcattttgggagacccaggcgggaggattgcttgagcccaggaattctagcccagcctggacaacctagtgagatccagtctctacaaaaaattaaaaattagctaggtgcggtggtgtatgcctgcagtcccagctacttcagaggctgaagcaggaggatcacttgagcccaagagatcaaggctgtagtgagctgtgatcatgccactgcactccagcctgggcaacaaagcgagaccttttgtttgtctcagtaagtaagtaagtaaacaaataaatacataccattcctcacgaaaatgaactagaccagggctgagaccaagcaaacaaaaattgtggggtgagaggggaagctcttcaagaataatacgagcaaataaatgtgggcagcatgattattctgcctcctccagtgtattcaggcaagtcatcagtagatgataaaatctattaggtgaaaggccactgagggggagcttattcacatgatctgaaagtttcatctcacctattacttaattacagagggaatgaggtagctttacaatggcaagatctgacatgcatcaccttaaccaaatgatcaaatgtagtagcatcacagtgggacaaacagacattatgtgcattggacgtgatgtccacagcatcacctatgtaatcatcttgtccaaaaaaaaaaaaactttaacctatatctaatcacgaagaaacaatcagacaaatccagaacatggaacattctacaagacagctgacatggactctaaaaatgtcagtgtcatggcaggcaaaatccagggggaaatgtaagggaaattgaagagacaaccaagagccacgtgaaatttaattagatcctatatcaagaaaacaaaaataatgctatacaggacatttttgggacaattaggaaaattggaatatggactgcatgttaaataatggtactaaatcagtgttacaatgtccttggtgtaatagtatattgggttatgaggaggatatccttgttcctagagaaacaaaggggagaagtgtcataatgtctgcaacttacttcggggaggggttcacctccccgaaaagagtatgtgtgtatatgtgtgtaggtatgtatagaaagaatgaaagcaagcaaatgtggcaaaatgttaattattgtaaatgatgagtttaggtgaataatatagtgttgattcttttaactttttttgtagatcagaatttttcacgttaaaagaattaggcaaagaaatgatgagggggagagagagagagagagagagaataggaacagagaaattggagacatatgctatatgatagcatgtttgttgtattgataataagaatgactcaatgtaggggggtaatgatggtagaggaaagagagggtataatgttagaacagtgcccttgagtagatgaaaaggaatggtaccttgtggctgggagaggctggccttaggcccttgggctgttccttcataacagaggggaaggtagaaaataggaaaataggtggaggttgccatatgtgatggtggagcacaacgaagtgctctcctgattgtttttattttctctgtttaaagacaaaatggagaggaggatggaggcttgaggaggaaggatgagatgtataaaataagccatctaggagagtaggagagtgaatagacttgtgtaatgcattagcagcacttaatggtctccttgaggttagtagtcatattagcattgtgtgtttttaccagcctcattcaacagcagatacaggtatggaataggtggagaactggatttaagcagggttgagtattgctaggcagtacaatgaagggaaaagtggcaagggagtggttttaatgagggaccatggactgatatggatgaggaaagaagtaaggccgggcgcggtgtctcacgcctataatcccagcactttgggaggctgaggcgggcagatcacctgaggtcgggagttcaagaccagcctgaccaacatggagaaaccgcatctctactaaaaattcaaaattagccaggcatggtggtgcatgcctgtaatcccagctactcgggaggctgaggcaggagaattgcttgaacctgagaggcggaagttgtggtgagttgagatcacaccattgcactccagcctgggcaacaagagcaaaactctgtctcaaaaaaaaaagaaaaaaagaaggaagtaaaggatataaggtagatgaaaaaataataaaaaacaagcaaaaaataaaaaaacaaagcatagtgggagagcaggaaatggtccagcagaacaatgaggcttttattattttaaagtatacaggctgagtgcggtggctcatgcccgtaatcccagcactttgggaggccgaggcaggtggatcacctgaggtcaggaattcgagaccagcctggccaacatggcgaaaccctgtctttactaaaaatataaaaattagccgggcgtggtggcatgctcctttagtcccagctactccagaggctgaggcaggagaattgcttgaacctaggaggtggaggttgcagtgagccgagatcatgccactgcactccagcctgggtgacagagcgagactctctcaaaaaaaaaataataataaagtatacaattcagtgggttttagtgtatttacaaagttgtagagccatcaccactaattccagaacattttcatcatcctgggaagaaactcatacccattagcagtcatactctattccttcctttctccagaccctagcaaccactaatctactttgtttctatgaatttgtctattctggacatttcgtataagtggaaccatacaatatcgggtctttttgtgtcactcagcataatattttcaagattcatccgtactgtagcatgtatcagcactaccttctttcttattaccaaataatattccattgtatggatgtaccaattttgtttatccatttatcagttgataggtgtttgtgttgtttctactttttggctattaytaataatgctgctatgaacattcatatgcaaagttttgtgtagacaaatttttttttctttttctttttttttttttgagacagagtctcactctgttacccaggctggagtatagtggtgcaatctcaactyaccgcaacctccatctcctgggtcaaacggtgctcatgcctcagcctcctgagtagctgggattacaggtgcacaccaccacacccagctaatttttgtatttttagtagagacggggtttcaccatgttggccaggctggtctcaagctcctgacctcaagagatccgctcatctcagcccccacaaagtgcaagcattacacgtgtgagccaccacacccagcgggacatgtattatcaatttgcagtgaggatttcaaaccaaattttgcctaattctttttacttactatgccactcactaaaactccatggtcttaaacatctaaactttattcataggagaatggtagcagatgctgtcagtgttccttctatatcccctcagatcccttttccattttcttgcacatggatactcccaacatccagcagatacgtctccgttggagggctgctctttgcctacttggagagaaagccaaaaaatacttggaaatttacttcccaccagcagctgttcttaaccagtgactcatttctctttgccctaattgggacgacatttagattggacctacactgtcccaaattacccataagcctgagcgaaagttaccctttcctgagttctccacagggctttgcttgatgtctcacccttgctttgcttccttgccttctaatctcataacccactaccctgtgggttttctttgagaacatttccctgtaattgactttcacactgatgtttgtttcagggtctgcttctgaagcttattttacacaaatccaatatgttcagcatatagaaacagaaaattagaagaagataggaatgtttctagaagcaggcccacctacagcagtgagaagtgagagctgataaccataatagcaagggaggaaacaaaagcactataaaaagcaaacataaataatggaaaaactgcatcaatctggggcttaactgcccttcatttctcagtagtctccaaggtcattaccatatacagtgtaataatcagtgttcatagtgatgactctaaattactaaagaaaattaaatttttttttttgagacagagtcttgctctgtcgcccaggctggagtgcagtggcgcgatctcggctcactgcaagctccgcctcctgggttcacgccattctcctgcctcagcctcccaagtagctgggagtacaggcgcccgccaccacrccaggctaatttttttttttttttgtattttttagtagggacggggtttcactgtgttaaccaggatgatctcgatctcctgtccttgtgatccgcccaccttggcctcccaaagtgctgggattacaggcgtgagccaccatgcccagccaagaaaattaaattatatccagaaaaaagacatatccatgtataatgcattttaaaagcttagctcaaaataatataagggattgaatacacatttgacaggttcctcacaacagtccactaaaatggcagtaaaagagtgaagaaactgtataatcccatgaaagcaaaaacagtgctaataatgaaagtttggaaagtagaacgctaagtacctgttgtgaggttgtgggtggaaggtggccctgcccaagaggtaagtttatttgtacttcagagctcccataaaacagaaagtaccaagcatcactcaaggccaggtacagataggagctaaataggggaaagttggttaaaaatcttcttaagcctgggcaacatggtgaaaccctttctctacaaaaaatacaaaaattagccaggcatggtggagtgtgcctgtagtcccgggtattggggagtctgaggtgggaggatggcttgatcccaggaggtggaggttgcagttagccgcgattgcgccactgtactgcagcctgggccgcagagtgagaccctgtctcaaaaaaaaaatctacttaagcttttagacctgctctactctgacagaagactagtggtctgttctccagagcagttgaatatgaagcactgttgacttagggataccgtgtccagatgagaacagagctgccatgttttaaagaggattcattaaaagtctatataccaatcacagagacttctagctcccttccttaagtagccagacttatttctcatctcccctcctacccaaccccagycttccaagaagggtaagattcctttccttggaaaacctgaagaaaaacaatgtaaatagctggttgggatatccttttctaatcaaccagatctctgcgcaccctgagtgcgcagagaaacccaaagcttgacagagctcagtctatgcccacagaatgtctcatcttttttagtactttactgtcaaatatgaatggtcagtcaagaaaccagacgtctgagaaaaacataagcgcaaacagaaaaaaaaaagtaaattggaaaacaaaatarggagcagacgaacacttaaaaaaaaactttcgtgttttcaagagaaataagagatgttgcattctatgtgacagtaatgagaggcccaaagaaaattcagagaaaaagagcttttgggggaaaaaaaaaaagtagagatttaaaatccagcaggggctgggcgtggtggtttacacctgtaatcctttgggagcgctttgggagcactttgggaggccgaggtggccaggtcacctgaggtcaggagttcaagaccagcctggccaacatgggaaaaccccatctctactaaaaatgcaaaaattagccaggcgtggtggcaggtgcctataatcccagctactcgggaggctgagacagggagaattgcttgaacccaggaggcagaagtggcagtaagccaaaatcacgccactacagtccaacctgggcaacagagcaacactccgtctcaaaaaaataaataaataaaaaataaaatccagcaggattggccagccaccatggttcacacctgtaatcctagcacttctggaggccaaggcaggtggatcacgtgaggtcagcagtttgagaccggcctagccaacattgtgaaacgctttctctactaaaaatacaaaaattagctgggcgtggtggtgggcacctgtaatcccagcaacgcgggagactgaagcacgagaattgcttgaactcaggaggtggaggttgcaatgagccaagattgcatcattgcactccagcctgggcgacaaagygagactgtgtttcaaaaaagtgaggctgggcacgtggctcacgcctgtaatcccagcactttgggaggctgaggcaggcggatgacctgaggtcaggatttcgagaccagcctgaccaacatggagaaaccccatctctactaaaaatacacaattagccgggcctggtgctgcatgcctgtaatcccagctacttgggaggctgaggcaagagaattgcttgaacccaggaggcggaggttgtggtgagccgagatcgcgccattgcactccagcctggggaacacgagtgaaactccgtctcaaaaaaaaaaaaaaaaaaaaactgaattgccaagatgagagttaattttattctaggaaataaccatgcaggaggattggaaaatacaaccattctaaattggaataaaagggagaaggctctaggagagattgccctggaggaaaaattgaaattgatagtttggggatgagttagtaataagcactcaggaaacacagagcaaactaaaaaaaagaagaatttattagctccagagaattacaaaaagttgtacaagagaggaatttttttttctttttttctttttttttgaaacagagtctcgctctgtcacccaggctggagtgcagtggcaacgatctcggctcactgcaacctccgcctcccgggttcaagcagttctctgcctcagcctcccgagtagctgtgactacatgtgcctgccaccatgcccggctaatttttttgtatttttagtagagacggggtttaaccatgtgggccaggctggtcttgaactcctgacctcgtgatccacccgccttggcctcccaaagtgctgggattataggcgtgagccaccgtgcccagccatgttttctttttttaaatacctttatttccctagttataaaattaacatgtcattgtagaaaagtttttagtagaaatgtacaaagaataaaagaaacgtcaataattctggcacccagagatgacctattggactrttttgttcgtttcagtctccttccccttcctttcttcctcccttcctccctaccttccttctttcttccctctttctttttttcttttttgagacagggtctggttctgtcgcctaggttggaggcagtgatgaaacctcggctcactgcaacctctgcctcccaggctcaagccatcctcccacctcagccttccaagtagctgggacttacaggcgcgcagcaccgcatctggctaatttttgtattttttgtagagacctgggagttggggttgttcaccatgttgcccaggctggtctcctgaactcctgagwttaagtagttggcccacctcagcctcccaaagcactgggattacaggcgtgatccaccatgcccagcctctttctttctttttctctccctctctctcctttttctttcttaaagtgacctgtcctttattagtgggtaatcataggagctgtttggtggggaggaaaaagggacaaattgaaaatagaaaaaaaaccagggttacaaaacaaggggggatagagagaaagaggtaaaacaaaaaacaaaaacaaggggccaggcgctgtggctcacacctgtaatctcagcactttggaagtctgagacgggagaatcacttgagctcaggagtttgagaccagcctgggcaacaaagtgagaccccatacaaaaaatacaaaaagttagccaggcatagtttcacgggccttgtagtcccggccacttaggtggctgaggtgggaggatcacttgagccctgggctgtctaggctgcagtcagcygtgatggcaccactgtactgcaacctgggtgacagagcaagaccctgtttcaaaaacaacaacaacaataacaacaaagcatcaagttcaaaccctgattgtttgcactctgaaaagagcacttcatgcaagaaatgggcctttctcccattgtcctttgtgggtagtcctatatccagatctgctgtgctatagsatgggagaaaagggttgccacttctttttttttttttttcctctggtatttgctgtcararaaccctaactgggaatcaatggacaaraaacaggttccgataggtgggggtactttatgacacagattttttctcccagtttctccaaataycattttctgtaagagataagttatataaaaccaattttaaggtcattattaaaagagcaccttactgaaaagggtggcatcattcacatgkatacttcttcaattcaaaatcatttttttctgttccagygttcctagaatcccatgggcctttgccatgacggaagtatgtggcatgattctgtgctatatttggctcctggttcttcttcttcacaagcacaggtacctcattmctccattaaatgactgaaaatgttttgactcctgtatcaagatcataaaatcttaacctttctctttgcagtttccttgktaatttccttctctggtcattgtgacatagttattaacaaaggattttgagtttgatcagtaagagtcagcctaagataatatctacatatttagtaataatcctgaatgcattttgcacrgaaagatcagagatgccctatggctgatcgtgctcatctctgatctaaaaaaaagaggctgggcgcggtggctcatgcctgtaatcccagcactttgggaggccgaggcaggcggatcacctgaggttaggagttcgagaccagcctgaccaacatggagaaatcccgtctctactaaaaatacaaaattaactgggcgtggtggcgcatgcctataatcccagctacttgggaggctgaggcaggagaatcgcttggaccccagggtcggacattgtggtgagctgagataagaaagccttttctttccttagaaacaaactggaaaagttactttctgtaggatagaaactcttccaaggacattctttggtcacatgtttagatggaagaaattttctctgctttgaggaggcccattaaaaaagagattattggccgggcacggtggctcatgcctgtaatcccagcactttgggagggcaaggcaggcggatcacgaggtcaggagattgagaccatcctggctaacacggtgaaaccctgtctctactaaaaatacaaaatattagctgggcatggtggcgggtgcctgtagtcccagctaacttgggaggctgaggcaggagaatggcatgaacccaggaggcagagcttgcagtgagccgagattgtgccactgcactccagcctgggcgacagagtgagactctgtctcaaaaaaaaaaaaaaaagattattagccaggcacagtggcacatgcctgtaaccccagtactttaggaggctgaggtgggaggattgcttgagcccaggtgttcaagaccagcctgggaaacatgaggagaccctgtctctacaaaaaatttaaagattaaccaggtgtggtggcacatgcctatagtcccagcttctcaggaggctgaggtgggaggattgcttgagcccaggaggtcaaggttgcagtgagctgtgattgtgccactgcactccagcgtggggtgacagagccagaccctgtctccaaaaaaaaaaaaaaaaaaaaagaaagattattttgtacaacatgtacatatagtctgtgtggtttacttcagatggtatgggaagttgctaaattggaaagtgtgtcttggcactttcaccaaaaaatatagacgaaagaatttatttactttcattttatttacttttactgcttcttgtggagcagggctaactcacaggcagtgtacccagagtcagccaggaaaaattttttaattaaaaaaaggaagcctggggggctcctttcctagtttaatgggcaggaagaattagtggatttaagtaaaaaacaaggcattgtaaacaaaaaatttaaagrtaaaattagtagmtattgcataagagctcctgaggggctttttaaaaaactgtagatatgtgagcttttgagattgcttaaaaaaaaaaaaaattgtagcttctgctctccattgtctttggaacactggagagaggaacaagggtagttgcttgaggttttgacctttctcctcaccaggaagtgcttgaggtaaaccacagtgatgagctttaggtcctaagcagcagttatttcagtgttctgaaggtgaaaagaaaggttggtggttactattcttatcatacttttaggccacattgagccatattctctcccattttgtcctgttttgcagcaatattttaaattctggattgcttaaaaccagaggtggttttaaaacatgtgtatcattgctgctttctggttaactttgcctcacaagatctcatgaacttgaatttatctactcttcaaaactggagtttaccttacaggaaaccttggtaggtttaacaaagcatagaggtaacccgttaaatccaagtgttaatgtttacttagtcaaagaaagtgtttctcaaagtgtttgtaccactttcattagaatcacctgggtgcttgttaaaatgcagattcctaggytccatctcaggagtgcacactaatgcttgaaacatacctagccttgtgttcagtgctttctctgagggtgggaggatcatttcaaaaatatgwgatgtatggtccctgtcctcaggaatattagtccaacagtactggtgttgtcacagtgcagttcatgattacccaagtgacagttactcagaatttttatttgatatatacttgatataaacattttttttaaaacatagtgttttatagcttaagtttaagttaagagaagttagaatgagtattcgatagctactatcattaactaatttacagtgggtttttttgttttgtttgagatagggtcttgccctgtcacccaggctagagcacagtgacatgatcatggctcactgcatccttgacctcctaggctcaatcagtcctctcccctcagcctaggactgcagatacacaccaacatgcctgactaattttttatagacaagatgttactgtgttgcccaggctggtctcaagcgatcctccttcctgccttggtctcccaaagttctgggattatagacatgagccactgcacctagcctacagtgttattaatgagcaaaaaattccctggaatcacaggtgtttaactttacctcctttttttgttttttatttttattttttgagacaagtctcattctgtaacccaagctagagtgcagtggcacaatcatagcttgctgcagcctccaactcccaggcccaagcaaccctcccacctcagcctctcaagtagctgggatcacaggtgtgcaccaccacatccagctcatttttaaattatttgtagagatgaggtctggttatgttgcccaagctgttgtcaaacttttggactcaagcaatcctcccaccttggcctcccaaagggctgcaattacaagcatgagccaccatcctcggccaactttatctcttataaataatttaagagcaattttcagtaataggactaacaccaggcttacttgtcttctgtcttgtataactcttttactttcttttagccatattttctttttttttgagacggagtttcactattgttgcccaggctggagtgcaatggcgcagtcttggctcactgcaacctccacctcccgggttcaagtgattctcctgcctcagcctctcaagtagctgggattacaggcacacaccaccacgcctggactcttagccatattttcttatcagtgaaatgatgctcttagaatctaatttaggtctgtattgttcattatggcaaaatttaaattaactaaaatgaaataaaatttaaaactcagttcctcagtcatactggccacatttcaagtccgkaagatccacatagtatataaatagcttcttggacagtatatggaacatttcygtcattgcagagaattctgttggacaacsatgcttttgatggtctttaagatttctgtcctcttcaaagagtctagtgatttttctgtttgctcttccttgaagtaaatatttgatgcctggggttttttggtttgttttcttctgatctttccccctttttggttgatctgttacaggtcaatacttctgcgaaggctctgtagtctgatgggaactgtattcttgcttcgctgctttaccatgtttgtgacctccctctccgtgccaggacaacacctgcagtgtactggaaaggtagcctgctaccttctttatcattcttgtttttggkgggttgatggcacactatatgcaatagggctaagattttgcttatagtattaaaatgtgctttttagtatctgcaatgtctataaaaaaaactatagaaataatttggtaaaastcttaagccagattctacctctctcttatttctgttgaaactcgttctatgctatggagctatagaaaacaagtttctttcggccgggcgcagtggctcatgcctgtaatcccagcactttgggaggccgaggcgggcggatcatgaggtcagaagttcaagaccagctgggccaagatggtgaaactccgtctctactaaaaatacaaaaattagttgggcgtggtggtgggcacttgtaatcccagctactcaggaggctgaggcagagaattgcttgaacccgggaggtggaggttgcaatgagctgagatcgtgccactgcactccagcctgggcaacagagcgagactccatctcaaaaaaaaaaaaaaaaaaaaaaaagtttttattttggccgggcgcagtggctcatgcctgtaatcccagcactttgggaggccaaggtgggtggatcacgaggtcaggagtttgagaccagcctggccaagatggttaaaccccatctctactaaaaatacaaaaattagccaggtgcagtggtggacgcctgtaatcccagctactcgggaggctgaggttcaatcgcttgaacctgggaggcggaggttgtagtgagccgagatcgcaccactgcactctagcctgggcaacagagcaagactctgtctcaaaaacaaagaaagaaagaaagaaagaaagaaaacaattttctttcaattatcattttccctttcccaccatccttagcattttaaaagtttctcatatggcatgctctggttccttcactgtcctcctcactcctttaaaaatgttgccggccaggtgcagtggctcacgcctgtaatcccagcactttgggaggccaaggcgggtggatcacctgaggtcaggagttaaagacccagcgtggccaacatggtgcagtctactaaaaatacagaaaattacctggtcgtggtgacgggcacctgtaatcccaggtactcggaaggctgaggcatgagagtcacttgaacccaggaggcggaggttgcagtgagccaagatggcaccattgtactccagcctgggcaacaagagtgaatctgcatctcaaaacaaaacaaacaaacaaacaaaaagaaagttgcagtttgacgacatactcagcactctaaactttactctttctgagataaacaaaataatggctgacttttggttttcattttatattttgtggatttgttttggtgtactgtagacatctcttctcattaaacagaagaaattatgcagatgggaacaaaataagactgttaaaatcgcctgtactttatatacaaaattggctaaaatctgtatacaaatttgcaaagaattttgtccaaattatatacaaatttggacaaaagaactctacttttctaggcctctatgctttaattctgtgttctcacatattcaaataaatgtatgtgttaacacctttgtaattattttaatgttgtttgtaacagcattcacgttcacttcttgtactgcaatatcatagctgaaatgccaacaagggaagattaagcagccaaaggagatcaagagctaaaaatatacccctgagctgaagggtgacaaaactttctcctggtattaggaaggcttagactgaccagtaagaaagggggaagggttgatatgacacaggatttcatgtaaaggaaatgttttatttttaaggtaaaagctgttttgaggtctttttttctttttccaaaaaggaaaagtaattttttcaaattataaaattatatgtttattataaaaattcaaattatatagaaatgtatatattaaaaagtaaaaattcacctgattcttttttaccacaccctataaataatacagttaacagttgtgtgtatagccacacagaccatttttaagcatacttacacactcatataagtttttttgggttttttttttttttttttkttgaggtggagtctttcccagtcgcccaggctggagtagtgtggcacagtcttggctcactgcaacctcctcttcccaagttcaagccattctcctgcctcagcctcccgagtagctgggaccatcacacctggctattttttgtatttttagtagagatggggtttctccatgttggccaggctggtctcgaactcctgacctcaggtgatccacccgccttggcctcccaaagtgttgggattacaggtgtgagccacagcgcctggccctcatataagttttcatagatacttttgaaacaaggtaggattatattgcaaacattgttctttaacctagttttccttttctttctttctttctttttcytttttttttttttttttttttttgagatggagtctcgctgtgtcactcaggcgggagtgcagtggcacaatctcggctcactgcaaactctgcctcccaggttcatgccattctcctgcctcagcctcccgagtagctgggactacaggcgcccgccaccatgcatggctaatttttttgtatttttagtagagacggggtttcactgtgttagccaggatggtctcgatctcctgacctcatgatccgcccgccttggcctcccaaagtgctgagattacaggcgtgagccatcgcgcccagcctctttagcctatttttcatttaatagtatgttgtttacttttttctgaagaagtacatgtggtcatattcatctttttaacagtattccattgtggataccaggctccaaatgatgtacattttggttgtttcaaaattttagtatttataaacagtgctatagtaaacattcttgtacattgtgcttttgcacttactcagttatctccttaagataaattattgcaagtaaaattatagaattaaaggacatgcacattaaaaaatataatatgggctagacaaggtggctcatgcctgtaatcccagcactttgggagtccaaggtgggcggatcacttgaggccaggagttcaagaccaggctggccaacatgatgaaaccccatctctactaaaaatacaaataattagctgggcatggtggcgggcacctgtaatcccagctactcgggaggctgaggcagaagaatcacttgaacctgggaggcagaggctgcagtgagctgagatcacaccactgcactccagcctgggtgacagagcgagactccatctcaaaaaaaaaaaaaaaagtggtatgtgttgctgaaatacacacttgaaaagatgagtttttcactactgccaacatgtatgcgtgtcagctttctcaccctcttgccagcagtgccattctgattgatgaaaggtaatatctaatgcttttatgttcttatttttttatattttacatgtttaatttattttgaatttgtttctgtgcatggtgtgcgcagtttcttcaaaatagtatgctgtgtacatggtatgaagcgtttcacccaaatagtattctagttgattaggggagattttattgtattttagtcattgtttttttaagacagattctcgctttgtcacccaggctagagtatagtgtggcatgatcatagctcactgtcagcctaaaattcctggtctcaggcagtcctcctgcatcagccttctgagtagctgggaccacaggcacacgccaccacagccaactgatttttttttttttttagacggagtctttctctgtcgccccggctagcgtgcggtggtgcgatcttggcttactgcatcctccacctcctgggttcaagggattctcctgtctcagcctcccaagtaactgggatcacaggcgcctgccaccacacccagctaatttttgtattttcagtagagatggggtttcaccatcttggccaggctggtcttgaactcctgacctcatgatccacctgcctcgacctccgaaagtgctgggattacaggcgtgagccaccgtgcctggcctaattttaattttttttttgtagaaacaggatttcactttgctgctcaggctggtctcgagctcctgacttcaagtgctctttccatctccacctctcaaagtgttgggattacaggcatgagccaccatacctagccaggacagattttaaagaagaaaaatataagcttattacactgaaaagagaaaattttccatagctaagggatttaattgtaggacagccactgaggagagggatatccgtgcatagggctgcaacatatgctgcaaaaataaattagataccatccttctatggtataaacagccctttttctgtctctaatgactgtttttatcagttggttatatatagatatttctactccaatctgacctaaatactgttaattgctttgaattataatataacctacttattgacccgtattatttgcagtaattgttataaatagaaatcaaatcccttacagtgaattccataaggtagtttcattataataaattaattgcttgaaattgcattcctggaagtaaggggtttgaggacagaaccaataacatgcctatttttgaaatttagaaacacttaatgcatatttctacaccttctcttgtcaaaacatcctattcattctgctccgttgtgtttcagtttttattttttggaaggatatatgagacatttaagatgggaaaggatggagagataactgccttttgactggcatcactagtttcctatccttggttgagacattttcctaccagtctcttctgtttatttactacatgattttttactttctcaagagtaatatatctctaagcccgtgttcatagcgatcacagaagaaccaaacccatgtgtattatctttctttctctctaataataaattcttcttcctttctttccctcaaatgaggcagaaagggaaagctgggcagtgtataatcagcaggtgagattcctaatgagattgtgatatctatgaggttgtttattttggtcatatttgatagaatctttaagacatagggctttggaattgggttccctgggttcacatcctgactgtgttacttactagctatgtgacctctctaagccagtttcctcatctgcacaattaaatcacttcataggattgctgtggaaattaaatgcagtaacatataaagcacttagcagcatgccttgcacatagtaaatgtacataaaattttagcacctttttgtaccattattatgttattattaaattgtattattataataatactagtatgcctttttgtgtgtggtttttgttgttgttgttgtttttttgagacggagtctcgctctgtcgcccaggctagagtgtagtcaggctagagtgcagtggcgcgatctctgttcactgcaagctccacctaccgggttcacgccattcttctgcctcagcctcccgagtagctgggactgcaggtgcccgccaccaagcccggctaattttttgtatatttagtagagatggggtttcaccgtgttagccaggatggtctcaatctcctgaccttgtgatccacccacctcggcctcccaaagtgctgggattacaggcgtgagccaccgtgcctggcctctttttttttttttttttttttgagatggagttttgctcttgttgcccaggctggagtgcaatggcacgatttctactcaccacaacctacccctcccgggatcaagagattttcctgcctcagtctcctgagtagctgggattacaggcatgtgccaccatgcccagctaatttttgtacttttagtagagatgggttttccatgttggtcaggctgatctcgaactcctgacctcagatgatccacccacctcggcctctcaaagtgctgggattataggcgtgagccaccgcaccctgcagtatgctttttttttttaagtgactgtccctcttttgtaaagcagttgtcactcaaggtcttcctcaaaatggactgcttttttaggcgtatgtgtgggagttgggattaggtttggctattgataactggaaattcaaagtggctatggtttaataaacacacaatggtttattctctctcaaaaaagagtctgaaggtaggtacacaaggtctggtatgataattttacgaagtcatccaaaaaaaccccataattcttctgtctttctggtctgctatcccaatacttggcttgtatcctcaaggccactttgtggtccaagatggttgctggagtttcacctccagttgaatgagtctgagttgtagactaaaaaaaggaaaggtaaaaagttagaaaagacttcctcaaaactgttgtctcttaccttgataagtagccttcccaraaacccttaacacttctacttagatcttattgtacaraacttagtcacgtggccacacctagctacaagggaggctgggaaaggcaatattttggctgaattcattgctgcctcaatatatttgagattgtgttaccagtgaaraaggggaragtggatgttgaaaggtagacattgatctccgtctgtcatagcctatgtcttattggcaagaatagccaagcaactactactgtgatattggattaaaaacttggagatgtttttgtattatagagaactttttattataaaggaactcctagtaaaggagttcatgttacagtgatttcatttatttatttatttatttatttatttttaattaattaatcaatttttttgagacagagtcttactgtgtcgcccaggctggagtacagtggcgcgatctcggctccctgcaacctccgcctcccaggttcaagtgattctcctgccttagcctccctagtagctgggattataggtgtgcaccaccatgcctggctaatttttgtatttttagtagagttggggtttcgccatgttggccaggctgatgttgaactcctgacatcaggtgatccacccacctcagcctcccaaagtgctgggattacaggcatgagccactgtgcccagtctgatttcatttaattaccaaaatatttctgagtacagccaagctttgcccacccattcttgaagtctggctggaattcattagactgaaggcctagatgctttggcttagatcttatttctaagttattcagcatttgaatttcaataggaatggatgttgggaagttcccamctycctaagcatttgaagcactaattcataacttttcttcatagatatatggcagtgtatgggagaaattacatcgagcctttgccatttggagtggctttggtatgaccctgactggcgttcacacatgtggagattacatgtttagtggccacacagtcgtcctaactatgctgaatttctttgtcaccgaatgtaagtatctttttagtgcttctatgcgtattaggtaactagctgcagtgaaggctgtgggaagggtgtcagatcctgtgaagaatggcaaaacagcctgacctgagaaacgtgactgagaagcattggaaggaatgtagctttaaaatgatctttctgtccttttcctagatacaccaagaagctggaatttcttgcacactttatcctgggttctcaacctctttggaatcttcttcatcttggctgcccatgaacattattctattgatgtgtttattgctttttatataacaacaagactctttttgtactaccatactctggccaataccagagcatatcagcagagtaggagagcaaggatttggtttcccatgttctctttttttgaatgcaatgttaatggcacagtacctaatgaatattgttggccattttcaaaaccagcaataatgaaaagactaattggatgaatactatctttctaatgaatttgtgattaaatatataatagttgttgaaaatkagtaactttgcgttctccccctaggttgttcttagatgcctggcttatgtgttgacaaagtaaagttttctgttctgagcaaagttatgattataaaaagcaagaaagaacaatcaagagtccttatgtagctatttgaacagaaagcttaagtagatgttttctgccccttctctttaggaagacttaatgttgtgattgaagtcaggctgtacccttacctgttgagtatttgcttattgaactttaaacaagtcaacttgagcagtttgctggttgaggaattttcattgatttccagtagggctctagtcaagaaataatatgttttgaagctccttattacctttagaagaagaaaccctaacaagtgacagtacttgttctttggactaatctttgtttcattttaaaaaatgcaaccctgggacatgatctgttttactgacaaagagtttttgccttctgaaccatctttaaatatactgagcataccaggatgcctgaaataagaagagaatgaaagaggccatagatgacgtgacagagtactggctaggatgccattggtctcctcattaatgcaaatgtagggctggcatatttcaccaaagatgcaacaaaagatgcagtgccagtgtgaccctcagtgagtattcatgagggaaaaatggctgcatccataaaaataaatgggcttaatgttagtggtataggtacccagaataacttctttgtgctatagttgttagatgacagttcaattttatgcttttttaatggtgttattaaatgagccaaataggagtgttttaccagatgttagataaagttcttaatgccgttaagtagggaggtatgcatgcaaagaattgttttctcctgaaaagaaacttacagcacgcaaaatataactttttggtttttgaaatttatcattcttggctgttggaagtaaacagtctcagacatacttggatatgaaaaagtttcgttgttttttacttttaaatataatggtgtatatacattctttctatttagtcttaatttggcagtcaggaagtgatataacttagctgctatttacaacactagaaatttagtactttaagtaatttcacatctatgataacatttgttactttatttttaatgatttttttacagtagttatgacagtaggatggttatggaattggaatttaaactcccaactaatgagcttaagctgcttggaatattaattatgtagtttttacattccattttaaaacaaaaacttagaaaaggtgctggcattctgaggcctgcaattaggccacatagcagaagcttgctccttccttatctgggtgaaatattttatttttgcactttgagtcatattcccacccctgtataagctacataggagcctgaatgaattgggtaggaaaggaaattatgcaaacaagtctcagctagtgctgaatgaccccaatttgggtctgctgtgaacatcatttttgtatttctcacttgagaaatgctgcaaggcaattcaacttttatgcttttaaatctcacaactcagaatctgatatcttaaatcactgattctgttacatgctaggaacaaaatgccaacatctcatgtaaagaagttgcataatcatgaaaaataaaggatgtttcctatgccagttagagtggtttgacccttcaggtaaaaagatatgttactgttatttttctacgtgacagaacagactgaatttagctagggaggcagtgatgttggcttttgggaaagggttcaaaaaactgtatggcaacattaatgctaaaatgttaagccgagtgcagtggtgcaaggctatagtcccaggttctgaggaggctgaggcaggaggattgcttgaggccaggagttagaaactagagtgtgttataacgcctatgaataaccactgcattccagcccgggcaaggtagcaagacccattctcttaaaaacatggctgggtgcaatggctcacgcctgtaatcccagcactttgggaggccaaggcaggcggatggcttgaggtcaggagttcgagattagcctggccaatatggtgaaacctcatctctactaaaactacaaaaattagctgggcatggtggcacgcacttgtaatcccagctacttgggagactgaggaacaagaaacacttgaacccaggaggtggagtttgcattgagctgagatcactccactgcactccagcctaggtgacagagtgagactccatctcaaaacgaaacaaaacaaaacaaaacaaattagagtgggtgcagtgtctaatgcctgtaatcgcagcactttgggaggctaaggcaggaggatcacttgagctcaggtaaaagagaccagcctgggcaacaaagtgagacctcatccccacaaaaagttgtttagaaaattagctgggcgtggtgatgcatgcctgtggtcccagctacatgggaggctgaggcagaaggatcacttgagcccaaggaggttgaggctacagtgagctgtaatcatgccactgcactccagccttggggacagagtgagaccctgcctcaatcaatcaatcaatcaataacaaaaacttaaatagctattaacctcagtcttctttccttcatataaattctattctaagaccaaatagaaaaataaatgtaactaactttgcagagctattgacattgagagacctaacaacagactgcaatggggattgtaaaataacttttcagccttgcacttgctcatatatgttttgagaaaaatgtaagttaggtataacttattgttttaactattataaggcagtgtttacataaattaatcatctctttcttggaaaacattgagacaaatttattttcagttttacttaaacatgaaacctgtattttagttgctttttgttttgtccagaaatttccagattttgtcttcattttttttcctggttaaaatctaaaccatagtgaagatagtatttatgtttacattttatctgtgaatgtggctaagcagagaagctacatggctttggtctacatattttttgaccttgtatttggttctgtagttgcagacttgtgaaggcttacatcatcatggagactttagtaaggaaggaaccaaaaggtttttggtttggggatgcaaactggaggttatgttacaagtcttcaatgcattttctgtgttcctggcagcagtgttgcctttttttttcttttccttttttttttttaaagaccaggtagggtagtgttattgaagggtaattgaagagtggtagagagtaagaggttttgaaggaggcaggtttgctgttatcacaaaataatttgggggaaacctttcgtggctgtgctgcaagaattctttatgtggctatcctctccatagttttctgaccagaattgcaagggcaaaaatagaacttctagctctatttatttgtatcctttgaaatcagaacttatccttagaaccagtcagttaaataatgcggactatgcctataatcccagcactttaggaggctgaggcaggcagatcacgaggtcaggagttcgaggccagcctggccaatgtggtgaaactccgtctctactaaaaatacaaaaattagccgggcgtggtggtgcacgcccatgcctgtagtcccagctactcgggaggctgaggcagaagaatcgcttgaacccaggaggcggaggttgcagtgagccgagatactgccactacacttcagtctgggtgacagagcgagactccatctcaaaaaaacaaaacaaaataaaataataatgtgggctattcagaagaaaaagtcagtgacagagagaccagaacccattggatcaagagacctgcagggattataactctttactctgtgagcagcggtgtttcgtgccctgtctctgcctgtgtgtttttactaagaattccagaaatcctgtaatttgtaaatgggaaacagaggaaccagattgttttatagctgataagaaacagtctgttttagaaacatctgtttggaaagtattactcatgtattcacaaagtcatatttataacactagtcttctttgactgtattcaacaaaaggcagtttcaccattaatttcatagtaagcttttttaaaggattctagatctaaattgcctaagaatgttaaccacattcttgttttaaactctctaatttaataaatgtaattattttatagtcttttatagacttacattttcttcatactaaaggtaatgataatatagtcatttgccagtactttaaggtattcaggcatttgagacaagaaagctgtcttgtagaatagtccaattgctttcttaaacagtactggtttcatttagacagtttctaagccagcaaaggtgtcaattttaatgccaacttgacagtttaacagttagtgtttgtaagcagtttagcctgaattatcccatactgctgtagaggagaattgttagtaacatcaaaggtcagaatgcttcaggtgactaataagaatggaaagagactgagtaggttttttgtttcttttccctgtctttgagtaactttgaatgactaaaattagtatgaaactaggttttggacccccttctcacctcacccggatgtaatgccaccaatttcaaataactaaaatgtgaccaattactttgcttcaagttctatacaaatatctctgaaatctgtaagccatatttcagctattctggtttttataatacattctaccctaaattaaccaaaggactttttattcagtgtattccatgtttcagcataaggaaagtttgtgcctgatatggcaggagaaagaacactatggtaatttcattgttacttcaggtctctttcaatctgaagaactgggttgtctggagaattgaacatagccaagcaatattatcaattagtaatgtcatcttaaaaatgttcacttttactaagttttattcagaggatctatgtattattagaaaaatgaagtatttctgacatggaacaaagaaagtggaaactggtacttaatgggggaagcaaaattagctgggactaaaacggacatgttttgttttgtgaattctacctaaatgtctctctatccacagagaaactagtattacttgaagatgtgaaagttcctgtggtagccataccttgaagcacagtgtttgtacataagtaaatatcttgattctaaattaaatccagatttaactaatatatattattttatatctttgttgtattaaaatgtttaaaaacactaaaaataaaacatttgaaagttggattacagtttcttattgaaatgtctttgcattattaatggagctggtcagttttttatataatgaattttagtttttgcaaatgattggccaggtgtggtggctcacgcctgtaatcctagctctttgggaggccaaggcaggctgatcgcttgagcctaggaatttgagaccagcctgggcaacatggtgaaaccccgtctctacaaaaaatacaaaaattagccaagtgtggtggtgcgtgtctgtagtcccagctacttgggagactgaggcaggaggatcgcttgagcctgggaagtcgaggctgcagtgagccgagatgatgccactgcactccagcctgggtgacaaagtgagaccctgtctccaaaaaaacaagcaaatgattgagctctgcaactttaaatctgtggaacttagtccagaactgtggagtagttagaatgctaagcattgtcacaggtacaggaccgtatcagcttgatccgcaactgaacttgtcttcttgatcactgctaatatgtagcctctgtagcgctggcccagctagtctttttgagaactctgggaaaaaaatagtccagaagagacctcaaggagcttggtggagtagaaaatgcactgggtttaggctctgatgacctgggtatgagttgtgtttctgacactgattaagtttttcttcaaacctccacttaaccttatttaagtggaaaaaagtgcctaccacataggttgtattaagggccaatttatgaaagtactgtagccttgctcacggagatgttaagatgagggtgctgagttaagagagtgcctcagaggagctcagttgccaccttcagctggaactttgaagatgcacaaatgatagttttaaggcttctggtagagtagcatgacatttaaatgccgtatattctcagttcacggggctcccatgagagccagaaatacagaaccaccaagacctgctcatattccagctttaggagccctgggtcacattatgaagtgaatgtctgtacctgatgggtttttttgtttttgttttgttttgagacggagttttgcttttgttgcccaggctggagtgcagtggcatgatctcggttcaccgcagtctccacctcccaggttcaagcgattcttccgcctcagcctcccaagtagctgggattacaggcatgcgccaccacacccagctaattttgtatttttggtagagatggggtttctccacgttggtcaggcgggtctcaaactcccaacctcaggtgatctgc

SEQ ID NO: 96573 - DNA, 34194 bp, Homo sapiens
tactctataaaatgttgataaaaagtgcttattttatttatgagcaaaagtggttgcaggaaaatggtggcaagtcatgaaagaaaagggtaaactcaaacactgaatgtacaaaagatccataggtacatcgtgtgcccttatgcctgccctgttaccttcagaaatgaaggggtgggagataggaaaaggacttggaaatttccatcatttgtagtttcataaatagatcacaggaaataattgtaaacttttcatttcaagagagctggagttgtagggaaaagacagtgagatttcagcatagactggcaggtctaaatgaccctcatcctctaaaatttttactcgatattacagttatttcatttggccacattctttaaaaatgtatgtattttggggaggattttgataccattagtcatttaaacattaatatggattcgtaaaagaagtccatttacctcctcctaagcaactaagttccccccaagggaatggatattgaaaaaggatgagaaataggtaattttaaaactgtttggggaacagggctgagcctgatgaagtaacccagcagggtccaagtacagcaggaccgtatctgacattttaggagagacattttacaaaaggagaggtagaacaggtttgtattctcttttaaaattttgtctagggttagcccttaccaaggaaggaaagcaaactctcctttcactcaactctccttgcttgcaaactcagtgcactacagattacgtggctttagcaaatctccttggaaattaagagtcatgtataaaactgctgctagaaaaacaagtatcagtcaacaatctacaaacatacttgtggaagacagattatattcaaccacctatcagtgactataataatattcactaagcacttattgtgcaccaaacactttcctatttgctttaccaacattagctgatttatttacatgtctgttactacagaaggggaagctggcttacagaagtgatcccacccaaggtcagagttagctaatgggagttgagatctggtctatgtagttcccaaacacgcacagaagcagtgtcttgaatttagtaagactccttcaatatctgccaaattaataaaataattatttaaaaagtctcccccacccccaaaaagctcaatgtcaattaggttaacggatgtttctggcaacctgatgtttcctaacagcttcacaattgctgggggcggggagaaaaggatcaacattttttaagctactccaacttggttgcattgcagtgagacgagattgtgccattgcactccagcctgggcgacaaagcaagactccgtctcaaagacaaaacaaacaaacaaacaaaacggctactccaacttgtaccgccagagggcagagattagcaaaaaaaaaaaaaaagaaagaaaaaagaaaaaaagaacctacaataaattcaaatttctccaaacctactgatcaagctgacgctctagataatccaaggtcaacctgaagcgtcgctcgtatcccttgctcaactgtctctgattcgcagtttgagaagcgcgaggggtgcaatgatatttccaattctacttccttgggtcactttgcctcagttatcttatcagcgtaaaagggaaattaatatctccctcgtcgcaatggcaagaaaatttatagggccaatgcacacgatagagcacttgggtcatagaaagcactgagctcattcgggttgaaagtcatccactagttatcctcttgtgccctttaacttttctaaggccaaggggaaggacttccgagcacgggcagctggaactccagggctgtcagagccaccgcgggcaccttcacaaacagcgggttaacatcccaaccctatacaggcaagcccgccctggggacagcaaacgagtggggaagcacatccttttcactggactgaagcagccaatttcccttccgcgacaaacttggccacttacaaagaagagagaaaacggagcaagctgcagcaaaaataaacggtgaagcgcgacgatgccggccaagaagacccccagttacttaccggcctgcttaccagccattttgaccagaaagagaagcgttgccttctgggtaagtcatagaggacaagctgggcccagtccgcaggcgcgttacgtcacatcgcgaacagagaaaggccgcttgcgcaggcgcagttctgacgactgccgttcagcacctgcgtaagcacctctcggccagggtgaggccaatggagtaggcggggcattttgcgtgctacattctaagaagtattggttgtgatgtgatgggaagaacacaggtcaggaattaggagaccaaggcttaaagctgggttctgttatttgctgttaatagctatgggagcgtggacagtattaattcagctctttgtgccaggcaggaagctaaatgttttaagggcatcgtcttactttctattgaaggactgatggatgtgccatcccaaaaatatatggaattggtacattgattatttcgagttgaaaatattggagaaattgtagtttcagaaaaggtttgatgacctatctcttcctgcatgcagcaagccataaagcttcctccaggattcctctggagtacccgtcccttaccagagggagaaaatagcacctatcaccagagacgaaactgggggctgctttggacctgaatatactttccgaagtaaccgttatcttccactaagtttacaccccaacacacacacttttctcctaatgactccgcgagaaatttactgcccctagccagatcccctttcttctgatttgtagttcgtgtaaaaagtataaaggcatcttacattggccacttcactcttttgtgcggatccccatgtacatgtaaaactagtaaaattagtatgcttttctcttgttaatctgccatgtgtcaatttggttcctagattcaaccaaagagcccacataagagcaaaggggagggagggttggaggtgatctctcactcccctaaactatcttttaattctaaaagtactgtaattatctcattgtagagaggagaaagctgaggctcagaaaggttgaataacttgtccaagagcacatgactagaagagtccaggttcttcttccagaatctgaaaatccagatgcaaatttggggctccttaattctagggtcatatgctatactgctacactactaatccaggaaagacaccaagcctttcaggccttgggtttctccagctgaagatctatatctagctattttagtggaaggttaggtcagaaaaggttttgggttttttttgtttgttttttttcacccttttttttgttgttcagcctctgtcacccaggctgaatggcacaatctcggctcactgcaacctctgcctcctgggttcaaatgactcgtgcctcagcctcctgagtagctgggactacaggtgtacacactaccatgcccgctaatttttgtatttttagtagagacggggtttcaccgtgttggccaggctggtatcaaactcttgacctcaagtgatccacccacgtcagcctcccaaaatgctgggttacccgcgtgagccatcatgcccagcagaaaaggtttttaaagattaaatctaagatgtattgcagaatttgcacacaattttaagacaaaagagaagtatatagattttctcacttttaaggtctcaaccccaacatgcgaagtcttaggcataaacatctagagacagaaaacaattagggggagctagcatgactgatagttactggtgaacttctaccattactcagtgatatcttttttttcccctcagttttaagctcagagctgggacaatatagagtagaaccttgtctcatcctaagttcaaaaggttagatttaacgatcttagtcacattccagttctaaaattatattgattttcctttttcttctatctccatgctgtcacaatttcttcattagtcagtcctgtatacagcactaaagctgatgaatgatctatcttacactagccaaagtgaagtctgaaagatgtgaagaaatgcagtacatttgtacattggcacattgccctgcagagggtaggtactcaataaactctcctcccttccaccctttaagttttagcttgctggttacaggtgaaggtggcaagaaaagacatatcaaaagatctgaaacccaaaattgtcacaaaatccagctcctaaggaattaagctagagagactgaatgtttgctggtagtgattgttgattcaaaaactatttttggttttctttcctcccagcacaggattagggattgcctctctgccctattaaagttaggcatggccatgtgatactttggccaagaaaaatgtgataactttttaagagcaattcttcacattcctttccttttccatagactggcaacactccagaaatgatggagacaggatacatcaacctgtatcactgaagatgatgtggagcagagcctttgtggtcctaagaaacatgtataagataaaaacttttgtggtttttcaatcatttgaggttttaggattgttcattgtatcaacacaacttgcctattctgactgctaaggttgttcactgggttattcataaaggcaaaatgaggttgtgagccacagaaagagaggacaggatggttccatggtgtccccagcttattttttattgtttcctgtttattgatctcatccattggagaactccatgaaagcacatatctatgccacactcaccactgtattatagaactcaaatgtcggttgcatgaataaaatatgtaacaggaaggccactatacctggccctgaccaattacaaatttagtttttcatgaggttttttaaagggcatccagcacaccacagaaccctgtgcacaacaaactacccccaaagttagcggcttaaaacactttctcccaattctgaattccgctgggtcgttctgcttagtgtagtatctactaagtctgggacatcccagataatttcttcatgcatgtctggtgctcagttggcatgtctgaaaaagctgggtttggccagacatctttctgtccacctagtttctccagcagagtaaccagacctctctacacagtagcttagggtgccaagagcaaatgttccaagagggcaagccctgatgtgcaaatccttaagcctctgcttgacaaatgtcctctgggccaaatcacatcggcccagagtcagtgtgggagaggactaactacacaagagtgcaaataccaggtatggttcatgggggcccccagtgttaacagtctacccaatctggtgatcataaggcagacaactgaagtcatgatgcttcgttttacaaataaaaaagcaaaggctcagaaatgaaatcacttgcccaggataacacatgttgtaaatggaaaacaaatatttgtttactggtaataagtcaaaggctagttaagcctttcactatatctcattgcccctaatctttaaactccactttccttttccttattcttagccaactgtgaatatctgtgttcaagaagttaacaatgtagataatccaaaatgaagtgtgttttgtagcattatctgagcagtagatattagatgactaatgtagtatgctctggaaactcgtaacagttcaaaggaaataaagccattttataatgaaaccactttaaaaatcctccactgttttcatcttcacgagaatgacaaagcaccaacttaaagtaaaccaactctttccccttctctgagcttgctgtatttcctaagaaggaaggaaaaagtcaaacaagaattaagtcactaggaacttgatgaaagttctaccacagtatatgtacccaaatttacagtatcaaatggtttccaatatcagttgagacccgaggcatttaaaaatatattcatttattcatatatatattcactttacaatactgcattttaacatacataaaaatctaaagcgtttttaagaatttttcaaagtcctgtactgatgctttggcaatctcttcacaaaatatttcatcaggaatagatactagtttgtccaaagagatgtagttaggttttgctggatcatactgtgctcttcctaaataggtaagaaacaagtgtctttctttgaccttaaacagccttgtattaaatacctagaaaagaaaaaaaagtttttaaaaaacactgcacacrggaggatgaaatattaaaaagtttacttggcaaaaattttaataggttaaccaataccaagtactgaccatgtgttcagtaagtaggataaatgccagaggatttaaatcctatattttctgkgaagaaactagaaaaagggattcaaaatcaacatacaaaacaataataaaataattcagggctatactgtgtgcaaagaagattgagtgctccagagacagaggagaatgtgttaaaaaagcaaatcttcggccgggcgtggtggctcacgcctttagtgaggctgaggcaggcggatcatctgaggtcaggaattcaagacaagcctggccaacatggcaaaaccctgtctctactaaacatacaaaaattagctgggcgtggtggcgcatgcctgtaatcccagctactcaggaggctgaggcaggagaattggttgaacccaggagacggaggttgcagtgagccgagatcgcgccactgcactccagcctgggcaacagagtaagactccatctcaaaaaaaaaaaaaaaggcaaatcctcaagcctcaccccaaaactacttaatcagcaactttgagagcagaacccagaaatctgtcttaacaagccctctagatgattctgatatctaccaagtttgagaaccaatgttagagattaagatgttattatataaaaatgtataagatttcataatctgtaacacctctctctctcccttttttaaaatttgcactcctccccttaactagaatcaaaatgaaatgaatctgacctctgggagagcaactagggaaagtatgtcttacctgcctcaaagtaaaactcctaaaaactagagtaagcggcagcaactttagaaaggagtcagaagcaggcaaggctctacagccagctacagaaagaagagacaaatgggagatccggccagacttgagctacagccctgaagcctgagagacctgtgaggttccccgatgaggctcagaggaagccctttcaatattatgcctgcctcaagctctcctcttggctgttacagatataatgtgaacacgggatgcgttcacataacccctaggcctctttccctatattcaagtggaaacagtaacagatcagttggaaaggacactatgaaaagcaattgttgaaaaccaaagtactatgagaagagtgactaaaaaaagcacagggtgtacctcaacatgggtttggcttgcttttggaacagaacatctcccttctcagtctctgctattctgcccttgttctgataactaaattcccatgatcacaatattatggataacgaagatgtaagaggttttagatagatttttttttagaagtatgactcctatgcagtgattcttggcttaaaaaactatcacccggccgggcgcggtggctcacacctgtaatcccagcactttgggaggccaaggtgggcggatcacgaagtcaagagtttgagaccatcctggccaacatggtgaaacctcgtctctactaaaaacacaaaaattagctgggcatggtggcaggcgcttgtagtcccagctactcaggaggctgagtcagaagaatcacttgaacccgggaggcrgcggttgcactgagccgagatcacgccactgcactccagcctggcgacagagccagactccatcgcaaaaaaaaacaaaaaaaacaaaaaacaaaaaaaaactatcacccaacaacagacaaaaccacaaatggttctggtgctcctaaacgattactaatttcctaaatataataacacttcaaagcatttatttagcttatgagcagatattatatgtttacttctccagtggaccaaagttactccatcattagagagttgtgtactctttcaagtccaaaagctactgctcagattgcggtgtttctcccttctttttttatggatgtggtggtgtggggggagagttgttggccaccaggggctactttgccattggcacaaaaatttcatcctattaatgacatattaaattcttcggagttaaaaaaagtgcccctagcctgagaattattggttccctctaatcctaaggtggacttcaactttgccttcacagaaagtcacagaggaaggggagagtgaaggtttcgggggatcctgaatataacctctttccttagcctagtgatttcttcacattcattaccctaaaactgcttttgttatcctttaccttccaagatctcttctttgaaatgactaaattgatcatagttattaagttatacttctttccccatttttaattaatcgtaagtcagatctgccaaccaggaatattatctacatgagaaaattagttccatgccactgagatttaaacaccagccaaaaatgtaaagtctatatcagcccrttcacagccttactgtccgttaatgtattttttcattaataagctttttatttttctgtttttattccccaataattccacctagactctaggaatctgagaatcccaatttggaagccacaattctacaacagagcttctctgaggcaagggtttggggtgcctaaaatctgtgtttttaagtgattttgatgcatctggtcagcttataatttcttctatttggaaagctcctctccatcttttaaacaccactccctcttctacagacaattcaaatgtacttctagcagatcctagtaaagggcttgggtttttaaactggactgttggagttctaatcgtggttctgccccaaccttgttacttgggtaaccttggacaggttacttaaatctctttaagcttaagttctttatgtgtaaaataggggtaataatagcatctacctcatatggttgttgtgagaattaactgtgttaatacaaataaagcaataaagatagagctggcacacagtaagtactcaattgctgttattacttctataattctcctaccgcttctaaatcactgtaggagctctggttaggactctaccatcatataaagcaattctatttttaaacctgtcttccacactcgattataagttccacaagaacagagatcatgtctgcttgacttttgtatcctcagtgcccaatgtgtagcactgatggatgctcagtgatatactggaaaaatgaattacccaccaacccagggaaaaacaaattgtcatttctttttcgttgaagattatttcacaattactccatgagccaaattcacaaaactgtaggcttctaacacttctataatgggtatatttacgtttggtaaaataggaaaatcctatattagaggcccgttcctagtgaagtataataggcaaataaatatagctgtatgtgaaggaactggacctaatgcagtctagttctgagagttgtattaaggtcatatttcttttacccatcttttttcaaaaacaggaacatgtgttctagcaaatggagtagagggatcacttaaataaaaattcagtttgtcatttatccaataaatactgagtggctatttgcataggaaataggaaaaaaggattactttgataaaatccaatcattcatttgttcaacaaatattaattgtgtgcctacttagtgccaggtgtagttctaggcactgaggatttggcagtgtataaatcagacaaagtttctgcttttaaagagtcaatattcaagattaatattcttgtgaacagcagataatatcactcactaggtaaagaatatggaagcttgattagcttagaaaatataattacggctttggcatgatggcaaactggatcacttttatattgggatggggatcattacaatatggcttattgattcatgaatttaaataaactgtgactaaaaagtacacgtagcagtgaaaggacctttaagggaagtgatctattccaaagtaaagtagagaaaaacatgagagagaagagagactacattagatttgttggcctgattccaacaatcagaactaggactaggtagaaactccagggaaagagactaatcactgatttctcctcaggagatggacatttgcgccctgcaaattgtaaactcttcccagcgtacagaactatgcagctggagagcagctccaaatgaagcgcaatggcagcgcttacagmgagagctgtgagyggcattacctgtgggaacttgacaatgatgtggtggggaatgctcatcacattgtgcacaaaatcaaacgtctcggtaagtttcattttatttgcagttaacatctttgggattctggtgatcatatgttgaatttcgttatgtttaaaaccaagttcaagacgataaacctaaaagaaagtaaatttgctatgaatcgttawgtagaaatagttattttggtaccatggcaaggctgcactgattttttttttttttgagatggagctcgctatgttgcccaggatggagtgcagtggcatgatctcctgcctcagtctcccaagtaactggaactacagaggaatgccaccacacctggctaattcttgtatttttagtacagccagggtttcaccatgttggccaggctgatcttgaactcctgacctcaagtgatccacccaccttggcctcccgaagtgcttacaggtgtgagccaccgcgcctggccatgatttttttttttgagacggagtctcgctttgtcatccaggctggagtgcggtggcacgatctcagcttactgcaacctccgtttcttggattcaagtgattctcctgcctcagccttctaagtagctgggattacaggtgcccaccaccatgcctggctaatttttgtatytttagtagagatgaggtttcaccatgttggccaggctggtctcaaactcctgacctcaagtgatctgcccacctcggcctcccatgccagggttacaggcatgagccaccacgcctgaccatgattcttttaaacttaaaataacattttaaaatttggagacagctatgccagtgccttcaaggaattacagcttccggctcctggggtcaccagaatttcaaacccctctgctgagaaagagctacaccatgatggtcatgaagctcaccaaaggggcaaccataattacaagagggaatgagtgacatgggagcgctgcaggtcagaggcatgggcccaacaccaaacagatccttcagcagcaggatcttcaaaatgctttttgagcttttgctcccaagtacacccacatatgtgttgtctgaaaaacgacatgtcaacattccaagcagagatgaggaactaaacaaccaaacacaggccgggtcctctacttgctttcatagtgtcctgtgtgcccccaccaagtaactgcccccatcactctggatttgatcccccactagattgtaagctccttgggaggagaagctgtctcctcagcatggcgcttgggcaggagctcaataaaaagatttcttcaatgactgaactgttcacctcagaaaacagcccttatataatatttcaaatactactacagctttatatactaactagtcagctgctcttggctttatcttattctcttggaggaaggacagtaaagagtgtctggtacattctgtgacagaatgagagytggcaattgggacaggtgcaaaggagaacaatgtgctggctgctactcttttcacagaagtcttttggatccagcctccaaaactccctgagacatacacagactgtcatgctggccaacaggagtactttcgtagactggtaacactgcccaggtaacaaagacgtcagacgcccacactgggcaacagaagcagtttcagggtaccacttatatccctatctaatgctttaggattgtgggtatcaatgtctgcaaggtgatttactcaggttaatacctgctcaacgtgaaaatattaactgaaacaaactgcttgctagacatttgttaaagataatttcctatttctctttttagaaataacttatyttaaagtctagttttcttttacatgacaatagcaaaatctgttctcttcagaggattttaacacttaaagaaactgatttctcaaaaagcctaaagttgtcctaccttcatattttctttcacgggttccagacttccagttagcagccttgggagacgaactaccagatctctagtctgtggttgcaaacaaaacaatctagtattactatacgtgcatctttaactagtttggaaaattaaggcattattaagatacaaagttaaaacttaaaatatgacccaatcagaaaaatgataggaaccccaggaatagataagattaatactgtttggaaaaaaagaaaacaaaaactgaaggaaccagtttgattaagtattataaaatgatggagctctatgtttaaactagcaggataattcatttttgtacaaaaaataccaggaatttatatgattcacatgggccaggcatctgctgggaacatgagatctatcagctattaaaatgtacctgacatggaaataaacaaattctctccttttctttaccttcttcacactaagttcaagttctttctgaaaaaatcccaatctgttatccagtctttccactgaaaagttcagcaaaaatggtgcttttctgaccatctgtgcaacatctgctttactgaaattttttgaatgcagataagccaccctagagaaacataaatacatacgcatgtgataaacayttacattctttttttttgagatggagtctcatgctacttcccaaagtaacagctgtttttaaaaaggctcccacaccctaaattactaactaaataaaagcattctgtaacaatggcaaaaacacgtttaaaacaaaacaagcattcacccaactctagatggtttccacttatacttaaaaacagaaaataattctgaaatccactaataggtattagttgcggtttttgccattactttcaatagcaaaaacatgattacttttgcaccaacctttagattctcttttcaattaatctggtttattacttggtaagaaagaatgaaatagcttctgcttaagatttttttttttttgataagaacagaaaaacacaaattaagaaaataacacaaattaagaaaattaaggaaataatggttataactgagagaggcattttttaggttagtatatttactgagcccctcccctcccctcttctattcttttcttttcaggaagagtcccgctctgttgcccaggctggagtgcagtggcatgatctgggctcaatgcaacctccgcctcccaggttcaagtgactctcctgcctcagcctcccaagtagctgggattacaggcacacaccactagacccagctaatttttgtatttttagtagagacggggtttcaccatgttgaccaggctagtctcgaactcctgacttcaagtgatccgcccacctcagcctcccaaagtgctgggattacacttgagtgaccatgcctggcctgagcatgtatttttataaatgatttttactacagtctttcaatatgtattttgtcaactgagagattttcctgctaagtttctgaagatcaaactatgtaagttagtaaaatatagaaagtttgactataaaataacatttttaaaaaatctaaaacatagtaaaagatggttttactaaatgtctaaaatatatcaggatattattttgtttaattctaaccagaaaaacaaaaaaacttgtgagccaagtgaattttccatgaggaaacatggattcagggaagttaaataacttgtctgagatcatcacctaattactgacaaaactaagatgtgaaytcaggcatgcctacatctaaagcctatggtatttttatactatataccaaaacttatattactttataatcacatgactattactcctttaaaaatagttaaaatatttatacgtttaagtatataaaaattttaaatgcatggcaaaacaaaacaaaacaaaaacaccccactataaatgaagtcaaaagacaagtgacaatctaggaaaaatatctgcaacatgtctcagagacagaactaattttcttcatatataaaagaacgtttaccgaaaaagaaaaaagcctgattaaaaaatagcaaaggatatattacagaaaaggaaatgtaaacagaaattcaacatatgaaaagatgctccaaacaacattccatgtttcaacatctgatgctccaaccaacaaataaagtactctttttatctatacaatcaactgaaagcaaagtgtgatagcactgtatctgtaaggataacagggaagctggcacttctgtacactgttggggagagtataaactggaaaacaacccctatgaaggacaatttggcaatatctattgaagttacagatgaacacaccctttgacctagcatttccacttctagaaatacgtcctacagagagacaccaatatgtgtgatttttcagaagtatgtacaaggtaagtcactacagccttgtcctaacagtggactggaaacatactccatgcttatcaataggtactagcgagatccgcagcatggactgtactagagttaaaaagaataggcagcaccaagaaaaaataatctccaagatacagtgaaggtaagatagtgggatacagaatagtgtgtataaatgctaccaattgttatgtatttgtattcatgtgtgtatacacagatatatgcttcctagaaggttgaacaaaaaatcctgataacagtagctgtgtcgataggtgggtcttgaaaggccaagggacaaagtaggagaaaaggaggtattacttgtttttttggcagcaaggttcagcatttgattaaaaaattatcaaaactattgtctacattgtaatgatttttccaataaaaaatcaagatataaggcccacccaaccaaaaaaagagtatttaaataattaaaatgcgactattcatttgaaaattctacaaggattttttaaatataactttttatttaaaaaataagtacatgaaatcagtgctgttatagaaataagactgctgcatatatcagaaccagaaacaaagttcatttaaataaaggttctcatacctgtgcctattcagtattttttactgtatactcttttgaatacatgtggctgcattacctattaaaaaattctaagtaatttttaaaaatgttctacagcttaatttgatagccagccaggtttaggaatcaatggactatgctaccgacgtgagaatattcctcaattgttaggagcatatatggcttgagcaagtaacttaagctattaagtttccttcaaagaattaaatgtagagacagtgtgtagtagtcagaaccctggagtttgattaactggggttgaaaccacttactctgctacttatactaacggtgtgtaatcttgggcaaattatttaacctctctgcgactcctatgtacaaaggtgctattaacaataatggtgcagcgtgtgaaatgatccctaccctcctggtattcatgctttcttggaataaatcttgagcaaaaagggcaagctggtttttgactgcagagagaattagtgttcctgacagccaagaagactagagctggatatgtcagatgagtttcttagaatcattctctctcccttctgtattgtgatagactatcactctcatgaagggaaagactgtttttgatgtctaaagtttaggccagtgtctcacatatagaagggctcaaatgttcaatttaataaataaggtttttgtttagttttttttcctaattccgagaaaagacattagactgatggtttaaggaatcgcaaagctctctgaaatgtagtaaggatcaacatcagtgtggagaacagtctggagggtcatgactagaggcagaccaattaggagaccattgcagtaatcttggtgtgatattatggggaactgaggcaaaatagtcaaagcaaagattcagagaaatgtcatgactgatttgagctataagaagagaagaactgatgggctttcatgatttattagatgtagatgataaaagaagagaaagcaagttaataccagtatttctgagttgggcaaaagggtattcagtgaatctgggaatacagactgggttgaatgacaggtgggggcgacgatgaattcaacatgttaacttagggacaggggttttgccttgttctctgtggtattcccaatgcctagcaggattcttacctcacagatcaatatctcactgtatttattttcacaaattcaataattctttgaatgttgaatgaagtacagagatgtttataaaagtgctccttaagaagaaaacaaggaacaaccaaaatagccaacttacggaaatgattaagcaaattatacagtaatttgccaagacaatctcaaatgtctaacaacaaaaattggccagacaaaaactacaaaaaccacaaaagatcatatctttaagtgcactctcagataagttagctatttgttgatgggttttttttttttttaagaaaaaaacgtattccagtttctaaagagaaagagttaattactgactcagtaataagttgaaaacataaaaataataatggagccaggcagggtggctcatgcctgtaaaatcccagcactttggaggccaagatgggcagatcacttgaggtcaggagttcgagaacagcctggccaatgtggcgaaaccccatctctcctaaaaatacaaaaattagccaggcatggtggccacctgtagtcacccagctacttgggaggctgaggcagaagaagaagaagaagaagaagaagaagaagaagaagaagaagaagaagaagaagaagaagaagaaggaggaggaggagggggggagggggagggggagaagaagaatgggtacttgaatgaaagaactgttgtaaatacttaatttagatcaaagaaggtctataacaaaaaaaattcatgttatctcagtagacccttgtgcagcagagatttaaagaataccttccacatatatttccttcataaccacttcttaggttatatgagaatccttttaaaagtcctacctggtcttcagattttcaaggtcttcagagaaaattgcatgattttttgtcaggaatgctcccagttggttatcctctatacccacatctttaagaaacagaagcatttgcttaatgtctttttcaaaatccagtctcagaaggaggtttgctgcttctggatgtttttctatcttggacaaatccacgcctataataaattataaatactgtttgaagatgacttcttagttcacccattaaactcatatacataagcacaagaaattactgatggagatcaatacctatccaaaggagcactgagatagatcaatagaaacttctaaatatttttaaactaagttggttgcagaaacaacatagtatttattttaaaaatcaagtacagaggaaaatagagcatttagtgctacatttccccccaaaacaaattcactaagtcatattggtgtagggtcatcatctttgtctaaggtttcttgaatattgtttcagaatgtttgtcagtcccagatgaaccccacagtaactggtaattctgcagggtaacaaacaatatgaataaaatgttaccttctttgaagattttatttttcsttagttataagcattatttaaaaaatatgtttatgattcccatcatagggggaataaaaatgaccctgtgccttactcatcrttgtaatctctaggtctttagcacggagacacgtcccttgaagaaactcaagaaatgtctgagtgagaacaagtgaacacatagcccttcaagtatacaacaaagcagaaagtayacaaccttaaacctccacatttaaaacttcttaatggcatcacacagtcaaaaaaaaatcgtcatattcattataactccaaatattattagaaccaaatataattataaatccaaatttcttgatattaaacaggtattaagatgcccatgaacagtaaaatagattaaatacacagacacaatgatatggttaggctgtgtccccacccaaatctcatcttgaatccccatgtgtcgtgggagggaccaggtgggaggtaactgaatcatggggagaagtctttgctgtgctgttgtgtgatactgaataagtctcacgagatctgatggttttaaaaaggggggtttccaggcacaagctcccttctcttggctgctgccacgtgagacgtgcctttcaccttctgccataattgtgaggcctccccagccatatggaactgtaagtccattaaacctcttccttttgtaaattgcccagtctcgggtatgtctttatcagcagtgtgaaaacagaataayasgcacactcaatgaagatgagaaacagatccagaataaactaaaaaatgttattatacaaacaataatgcatttcraatcaaatagatagactatttgttaaaatatatgggaccattagctatacttttgaaaaaaattatctttatatcttatacggaaattaattctagataaagaatctaaacatacattaactctactagaaaaacaaaaaaaattacgtttaactacagaatagtataaaacctagtgtagaaaaaggtctggaaagctattccacaatttggttaatagtggttacctttgagaagtggaactggggacgaagagagggtaagaggtccttctcttataatatctgcacttttgacaaccggatgtaattcttttgtaatttaaaaataatattagtagaaaaataaatccaattattagatggacaaataaataagatgaaaaccagttccaaaaatctgtgataaatgggggagcggatgctctaaaaataacataaagggttcagacttcacatttaactaaatattacagctgacatgaactgaagtgctttgctcagcatgagctgtcacaccctgactgtgctcgaacagaaatcctgaaaagctgctttttaacagcagtaggagagcagaatctcatcaggaatgcacactgctctcaatgcaaataacttgggctcacttcatttcattaacttgaaaaaatattccctgaatgcccactatggaccaggcacttttttaggtattggggttataaaaaaagaataatacacgattctaacctctaggtgaccagtctagttgggctttacctcatcagttcagtaattacgaatattaccattttattcagttatggttacacgtatttagtacatcaatcagggtctagcaggctatacaacgtgccctggaaagtacaaatgacaaggactttaatgaagggactctatacagcggtgtgagcagccttaagagaacaaacaagagccttcccaacaataaagagacaaggaggcaaaatgttaccacggcgcagagggactagaggctattaaggaagggctgctcaagagtgctgttgtcatggagtgaggcaggtacaggacccaaagaagggaaggaacgggaaaaatatccccacctgacccttctaccttctgtcctgtaggtgcctcccactggctgaagctgccaagaagccagctggcataggagccctggtgcataggggttggcctcctgggatacagatcgggcagaaaacaggtctcagaagcaaacagagaaaaaactaggacttgggtactcaaaaatactgtctgacagagcaaataaggctcccctaagttactattatttaagttacttctaagacatgctgttgaagtatcagcatacaggtaaaggaatggctgaaacatattccaaacctgtaagtatactgtaaattatttaaagataaggactaggccaggcacggtggctcatgcctgttatcccagcactttggaaagccgaggtgggaggaaagcttgagcccaagagtttgagaccagcctgggcaacacagtgagacctccctctattaaaaaaaaaaaaaaaaaaaattagcccagatggcatgtgcctatagtcccagctacttgcggggctgaggtgggaggatcacttgagcccaggaggtcaaggctgcaatgagacaagactgtgtcactgcactccagcctgggtgacagagcaagaccctgtgtcaaaaaaaagataagacagggactgtgtcttaggttttatcttgtatcatccatagcacctgccataagacagggaaagctgtttcgaaaggaaaagtgactgtctcctcacagcagacatcatctttttcctgcctctgaatgtacactttttaaattatatgtttatgggatacaacatgctgttttgacatttgtatacatagtggaacgattaaatcaagctaattaacatattcattaccttacatattcatgacttttttttgtggtgagaacacttaaaatctactctcttaacaattttcaagtatacattattattaactaccatcatcatgctggacaatagatctccaaaacttatgccacctgtctaattgaaactttgtaccctttgcccaacaactccccattcctccccaccccactccccagctccctctgctcctatgagttcaacttttttagctttcatatataagtgagatcacgtagcattagtcattctgtgcttatttcacttagcatagcatcctccaggttcatccgtgttgttgcaaataacaggatctcctttttcaaggctgactagtactccagtgtataaatataccacattttctttagccattcatccactgatggacacttaggctgattcacagaacactttatttgcctctcatgtgggacttatcactttgctcttcatccttgcattccagttattcttatatatttagatgtttctgaggacttgaagcttcttgagaacaaaggccattctaaacatatgggtaacatatgggtaactgggcacagacagatgagtatacaattataatagagtgtcattaatgctaggatccaagtaagcagggagtgaaatgagagcctgaagagggtcactctgtctgcagggtcaagaagacactttagaagttacttggacttcagtgatgttctccagttgttggagttggctaaacaaaggagggaagtggcaagccatgaagctgaacaggtaagcagaagccaaatcaggaaaagctttgatgccatgggaaggttttgaaggattttaaataggtcactgacttagatctgcatttcagaaagagcactaacactggaaagatatcagagccaatactgctgaggagaagactatcaagataggaggctcctgcagccactcagtgacaaatgaggacctaaacaaggtagtgactgtaggatgagagaagtggatggatttgaaagaaatagagagggtagaatccataggataagctattaaattagatgtaaagaggaaggggacaaaagcaataagaatcaaggataggccgagtgcggtggctcatgcctataatctcagtactttgggaggccgaggtggacagatcccttgaggccaagagttcaagatcagcctggccaacagggtgaaacctcgtctctactaaaaatacaaaaaatagccaggcatggtggcacgtgcttgtaatctcagctaccagggaggctgaggcaggagaatcacttgaacctgggaggcaggttgcagtgagctgagatggtaccactgtactccagcctgggagacagagtgagacccagtctgaagaaaaaaaaaaaaaaaaaaatcaaggatgacccccaaagtttctaacagagcacagatttttctctttttcctctcctgttaaaaatcacctcccaaaaatatggggaatgacaaacaaaaaatgagatccttctttgaggaaacgagattatatccccacatatctgaaaacatctgaaaacagatgaaagcatggcaacagccttatcrgagaggagaaagacgacactgaaatgcctgcaaatgagaatctggcaagtggtaagtgatcagtaccacaaaaaactcaaaagtctccaaaattggagtccctagaaatctgagagattagaggtgaggtacagactaaaaactggggtattgggtatggagagacccgacctcccccaaatccagttcctctcaatgcactaggagaaaggagattcattatctgggaaaatcaagtatgagaagtaccaaacccagagaaatgaggaaagcaaaagtttgtaataaaatgccagactaaaaataagatgactaaatgaaagtttggacggagatcccctggctcccttaagctatccagatccaagtgcaacctaatggtcaacaagtgaaggcagctatagagtaggcctagaaaccattcaaatcaggaggacagtggcttcaggaaggaggtcggggtagtgtgacaagcagggaacaatccactctggagaaatgaaatacatcatctgatagggttacctgggaaaaactgtcctgagaggctactggaaggtatggaaaagtttaaccccagaaacaaacaaacaaacaaaacaattcatcaaatgaagaacaaggcaactattactgccggaaaaatgaaaagttgtacaggaaggtaaataatgatagcatacttcttgttagggcagatagcaatatttatagtcataatttaactactgactaatgatttatctaaaattgtaatttatattaggagaattgaaaagaatacaggaaaagtacatgtgtacatacaagagatcaaatgatgtctaaaactgatgaaccaaacaacagcactacaaacaactattttaaaatgaggaggttgaacacaaacagaaagaatgatacaagttaagtagatgcatctggggaataggatgcaagatcaccaaggatgaggcagggaatacrgtttctcactagaagcctttatgctattagacttttgcttatgtttgtatactacttagtatagattaaattgttaatttaaaaaagtaaaaaaagtaatgaagagtacatgcaaaaagtacttgtagtttagtcaaacttacctagaagaaccaacttctgcagagtctcagaatgatccacatagtctcgaagtgtgaatgaagctggtggcaatggagggtctgcaataatctgaatagcctcttcctctgaaattggctgcattggagacaatggaggcaattcatccagttctttgaaagagagaaacaaattagtgctctaatatgcacacttaaaactatttctgcaaagaccagctcttcccttgtttgcttctttcagtggttaaatcttgggatcattttagaattaaacatccaagtccctaatttttcaccttttaagaggtaaggttacaactatttagacagactaactactgttcctctgagattagaaatttgttggtaaatttcaaagcacacaatgcctttccttcacttaatcagtaggtgagaatgctaaaaatcacctaactttcaagtgaattttgaaacagagattgagtttaccatagcctgttaacttggctaaaagtacacatatgccaacagtctgaattgcatggattaaagtaatcatatcccgaaagtctttgttttgacccaatgccctcccttccaagttaccctcaaatacatctttaaaagggcttctatgattgtttctacaacctgcagtcctctctacaggagatgtgactctctagtacagccctgattctgaagttgtttttgtttttttaaaatcaaacgcagcatggaagacacttagaactacacattaccttaagctaaggaatcaggtctgtgatcttttgttctgttttgtgcttctcatcattaactatcctttctcatcatttatagccagcatctcctccctgccctctccccagctctctttccttcatattctacttaaccttatatcatttcattacyagcgaaatattcctagaataggacccataggaaggagaggattgactaaaaagcgaccatgagggaactctgtggagttaatataattgttttatttgttgattgcagtagttcttacacactaaatgcatatgtcaaaattcatagaactatatatcccacaagatgaattttacttgatataattataccctaataaaactaattaycactagaagaattttgttttaagaatctaaacaataaaatatttaaaaagcaaatgttttatatgtgtagctataaaataatcttacacgttagcccacaaactttttttcttaccagtaaaataaaggcatgatagaagttcatcaatagaactggtattattctttttctttcttggcacaaaatattacctgaaatgggctagcagaaggtaaacaggtagcttgttcaaatggccaaagtagggaaagggagacttttctgaaagttcagaattaccttctagaaacagctcagaatcaaagctggatatattttgtgtcttctgtgactgttcattcatggaaggaagcagactgctttgggcagaattattctcctgactacttgagctagtagactgggaactattccataaggaggaagtcctgtaagtcttaaatccccactggagaaagcaattgtcagaggatatctgaggctgagcagaaaagccatgtaacagtgttcttgctggtctagtaaaacgttttgtgagttgtgcagcattaatgaggctcctcaacttaactgagttaaaccatctgggtatctgttgggctgacaaagccatttttcttagtctacaaaggaaagatataaccgtcaaaagaagagaaatttaatttacttaaatgtttaaaacrgtattcaaacaacaaaaagataaactggaaattatttttttctaattgaaaggtgtttaaatatatatttagtctaaaatagtgagatgtttcttatgtacaggaaaagccaacaacaaggcaatctcagttacaaaccaacagacaggaacttctgagtggaaaaataaagatatactttacaatttaaaaacaaaatgcaatgacactggtgtaagaaaaatgcttaaaacaaaaatctgcaaatgttcaagtgacagcagacctcactaatctgttaatttaatcatttaaagagaataagctgatgcaaataagtgttcttgaaatttggtgtgaagggtgtttccgcagcacattgctgatcaaagtaacactgaattattcaaatgcattttatgtatataaatttgtcccaaaatgaaaaaacagaaatctactgtgtcctaaacaaatcatcaaaatattatcattgatatacagaacagtgaaagcagtttcttgcttcattctcagggctgaacactgttgattacttcacagataaagctgttcttccaaagggaattgaacaaaaccagttttgtcaagttttgtttcactgtaggaaaggagaaaaaagccttcaaaaagaaaaggtcaaaactagtaaacaaaaccaagtgacagaaataaataagcaaccagcaattaatacctgtatattttgactgaaaaagtagttttcaaaaatatttttatcaggaaaggctagtgctatgttaaactccaggaatatgaagggattttatatttagccagctaattagaaaggtaaatttgatgcatataatcttacgttaaataacattatccatataaaacacaggatggagtcaggatataagaaatgctcaataaatgttagccattattattggttacacaaccaaatacaaaaattctgctgaattaattgctgcctacaactttatactttgtttttctgcatactggaattcagcttgttttatgctctaaattagaccaaatacttgagggtctaatcttttcttggagatctgtagttttgggaagtttgctgaaagagattttacaaaagtgaaagtttcctttcattctgcaattatttattattattattattattwttwtttttgagacggagtttcgcccttgttgcccaggctggagtacaacggcaccatcttggctcactgcaacctctgcctcccaggttcaagtgattctcctgcctcagcctcccgagtagctgggattacccacgcccgctactatgcccggctaattttttgtgtttttagtagagacggggtttcaccatcttggccaggctggcctcgaactccttacctcaggtgatccacccagcttcccaaagtgctgggattacaggcgtgagccactgcgctcggcccattctgcgatgattttagaaaagaagtaagtattcacaataccctgctgggataggtggtttctgttagattttggtgggaaatgggactccaaatgtgccaagttttccctcaaacctacaacattcattctctgcacggtagtcataagggcactaaattgaaagtcagaagacctcggttgtgctaccttgacaaggctgtttctggcagcagtctaacaaaagcagcagtctagcccatgatgtggggggtgggggtggggtcaataactattcttcaaataatgcttttttaaaaggctaggggtacaataagatgattcttaaggcccctatcagctctaacattttttgacgtctaagcacttcatcctacttcaaactcctgaaatcccaaattcatcctgaagcctttccacactcaataccacttaaacatcaggaagactcactttcaaatttcaccccgtcattaaaagatctttgtgcatacaactaatgtttatccttgcatttttatttacaagtgcactatcttctccacatcctttcattgctgcctacacatcttaacaattgattaactgttcatgcacgagagcagagctgggtctcatccctggatccatccttccggggactattctccactttcccagagccttgtactgctctaatgtttgcggaatggaaataaatcaatggcaagtacagttaactcacttgcttacacagtatgcaaaagcgggtaggggatgtgcagatgtgtataaaagccctgtaaggtggtaacctgaagtcttctaacaaggtcctttcatcaggaaaattacagaaaacccttaaagaaactgaagtctcttaacaattcatatatactgttctcaatgagtgcctagtgcttcgctagaaaaaggcactgaaatagagttcaagatttctacctacgaaatgctataaatgaaatcaggagagaaagggaggttatgggggcagcttcctaataaagggtctctcaatacttcccaggccattttagcccacttcagttccccaaacttgcgcaggaaggcagagccccytcctgaggcttctcacactgcgctaattarccagcatggttgagttttcactacatcagccagggaaaaacacaaaacaaaaccaatcaccctctactgggccgcgaaaacctaaaggcccttgaggccctggggcgcggtctggacgcgggtgcgccggaacctgaaccctcgccaggagcgcgatcctcgtgctggggcagctcctgctttacctgtggcgaggcctgcttcccgtagcgggtgaccccgggaccgaccaactcgctgggccgcacgtcccgtcccgccgcgccgcacgccggctcctcagccsgccctacacagcgcagccgcgctcccgggcccacgtgggccgcgcccggagtgggcgagaccatgtgccgggttacgcggggagacagcgggctacgtgctctgaaaagagccagccaggggccccggctacccttctccggctcgctattcctctgaagtcctgtggacttggagtctgaaaattcctcgagtggtagagatgcctcagctaggatgacagcgtggggacggccggcggcgtcccctgccccaggccgcggtggcggcgccgcgaccccgccctctcgcgcctgtccttccctctgctcccagcctttgctgggcgccagacccggctttgccgtccggctattagcctactgtggctagtcacccccggggtcccggccttctcgggctggggccgccgccaccgcggcaggacggggaggcgggccatggcgtcctgcgtggggagccggaccctaagcaaggatgatgtgaactacaaaatgcatttccggatgatcaacgagcagcaagtggaggacatcaccattgacttcttctaccggccgcataccatcaccctgctcagcttcaccatcgtcagcctcatgtacttcgcctttaccaggtggggcggcccagccgagcggggggcgcgtccaagggctagggaagaggcgggagggagggtggcggggaggggggcccggcatggctctgggtgaggaagtgggctggctgctccacgcacacgcactggcagcccgccgcccacgcggcccctccgcccgcccggtgtctcacagtacgctagcctgctcccctacccctcagtgccccttctccatacagcgcctccggttacacggggaacgcacgcgagtcacctagcacgatcgccccctcacccaccgcactcagcatcgctccacacaacatcacgacgcgggcccctcctctgcactgctccagccttcgtccctacccagcacaccgcatgaatcatgtcgtatgcaccactttcagcacacaccgctacacatacaaagcaccccaatccacagcgcctgcaggcaccatacacaggcccaggacacaacctagatcccttcctgtggaactccggtattcggcactatccgtaacgcacaaaaaatgcacatgtgtgctgcatacacggtctttcctgtgcagcacttcccgtatgcattgcacacaagtcatccagcataacacttcccccagcctcaaacactaccatctgtaccacggcacaaactgccactctaaacacacacctcacagcggacctttcctttccagcacagcccaatacccatcatctgtgtacatggctgcacagacaccagcccgccacacatcacgcggtgcataccctgctcactcattacctaacatacgtgctgaaatgtgatcttgtccagcaattttaatggtgcctggggtatagtaactgctgtgtgttaaatgaaacacataaacctcacacagcataacacaactctcttattccctggaaaacatacacacacattctaatatataccggttcataggagctgcccagcccaaatcttgaacacacctcatgttaactctggcactgcgcctgtggctcctcattcctaacctagagaactaattcatccttggttcataaggaggtacacaccgtggttcctacttagaatgatttatactttctgaatgaacctctttaaagaaagggaagtcacacctctctcaccattatggcttaaaaggccaacttagagtagagtagtttttgagccacacttttggtttcaaaactggctgtgtgtccttaattaagttgcataaccttgctctgagcctcaggggccacactcgtaaaatggggatgaaatatctacttatatagggttatgaaaattaaatgaatgtgtgtgaatgcatttagcagagtccctggagcacaatgtacaattcatgtcagttacttctctcccagtatttttatccaacaatcaaggttctctgtcagggtcagcagaacatgtgtagggatatatatattgggtagtcacaaggattgagagaacttctagtatttgggagggggagcagttaacggatactaaatgtattgtgacatatgtgacagcgctgtacaacataaagggaattgtcttctacacagtcgtttgcatacacacacacaagtgccggtggtgcctcccttaggaataactgcagtttttcaaatcctcataaaactaatatcctcccacatcacacttgttccttacctctgggattcatttgactcttggttcttgttatgtaagtgtttatccatttgaaagaatctacctaaaggtataaagcttaagtaacaattgcttactctttaatgattgagggatcttgccactattactataaaatctgctaaagctgtgcagcaggtgaagaccagacctttccacagtacctgaccagacatatttctagctttggagagaaatgaatcatgtccctaactatggttactttcaaatacttcattatgttgcctgattttatcacttaatagctgtgtggccacataattttgctaggcctcagtttccttatctgtatgtaaaatgaaaatatcaatacattaatctgtcgggattatttgtcatgaggattaaattcatctttttagataatctgtttagctcagtgcatggcaagtattaagtgcttaataaacattagtggttattacgatgtgatttcattgaatgctactgtcttctaatttatatttattattgaacgaggatgtagtatgctctgtaattgagaaggataaaagcactggaaaaatggacattagataacatacatacctgtttgatgttaacttcagtttaacttcatcttaggtgtgggcttgaaataatgaaattagtgagggagtttctctggaaattagaaaaataattatggtattttgttttaaataatgagaagcaagaatgagccatttgtttcagcctttcatttttaatattattctaggtcctttcaaaataggtttctcttcctcttttctgatataaaaagtcacaatcttctgaaatttccttttacatcatattctgtcaaggcagtcaataaattgcagcagtgaaagtataagaaatgaatacgaattttaacagcttgtccaaaataatagaagaaccataatctgaacttcagactgtagtctcatccaaaaatgttaacaattttatttcttccactaatttcataaagagacagaaatcacataatgaagaactaattaataacaagtttcactttatataaaatcataagcaccattaatagaattcgtacttactaaatcttactcattttttgtaatgatttgtgacttaagtggggcattacaatgatagctctatattcctccataaagacggaaagtaacgacttcttaaatgaaaatgtatcctatgttcttttgtaatgattaactccagtgccttattatttattttataagattttagttggacaattgttcagtgcaattctttcagtaaaacttaaaagatatgtcttaaagtttgttttgcaaagactagttgtctaagagaacgaggagataggattcttttgggatgtcatataaccagtatgtgagaaacagtacttgggtactgtcacatgcttcagagatccagcaagaatttaaaattacagaggattagataccttgcactgaagtctgagacaagtttggatttgtcaagtagttcttttgttagatggcccttaggtcaattccctgttaaaccatagtatttaaatatctcctgtctttatcaccatcattaaaaataaagttagatactacctaatcattttcctatttgaaaaagctcatttccagcctggacaacatggtgtaaccctatctctacaaacaaacaaaacaaaacaaaacaaaacaaaacaaaacaaaaattagctgggcgtggtggcatgcacctggaggctgaagtaagacgatcacctgagcctaggaggcagaggttgcagtgagctgaatcacgccaccatactccagcctccaccctactcactcgacagaatgagaccctgtctcaaaagaaaaccaaaaacttattttcccacattttagaataagtaggctgggtgcaatggcttacgccggtaatcctagcactttgggaagccaaggtgggaggattgcttgaggccaagagtccaagaccaacctggctaacatagcaagaccccatctctattaaaaaataaatagtatttttataaataaatgcttacgcatatgtcttagaagtttgttagcaaagtagggcaaggaaaacttttgtctcaagctcagagtataataattacctataagataccctcatatttactctgcattcaggggttggtaaacttggaaatattgaatgcctttagtttaaaaaactcaagctttagatttagaaaacaccagaatctattaattcacattcaaagaagcccacctctccttaagaggcacctgccattaaacagtagaatcagcctttgttagcacttgtccaacaaaaattgttacttacctagaagacgttgcctttctgcggatttgtgtacttaagtgatcatcaatttgtctatgcttcatttctcctcgatttagaactaaggagacaggcaaggacagggaaatggacagactgattgattgactgattgatttgttaataatggtttttacttaatttcccttattggctttggaactccagttcaccgtcatatcattggggcatacttgtggccacctgtattatattgcttatggatacttgctagcattccctgttctttccctcttgaccacataaattcccattagaaaatgtcccctgatactgctgattcagttgtctttatcctgtttcctttatatacatcatgttccttctctcccagcaacaaaagccctgcatgcccttgttggctgacactagcaatgttaaatgctcatctatagtgattatgggctaggattaaaccagccctggaggtgaacattgtgttaggttgcacctgaggtccagttatcaatgattgttaacatttcttttccctggttaccatttgaatcaaattttttattgaacttaatgttttacattttttcttatactgatttccagagttttatgtccataatacgatttctaatttgttaaagggggaaatgtgccatatatttctctggggtctactgcagtgaatgggcacttgggtgacttaaatatttatttggcttagatgatgcctcagcccacagagattatatacctaggaactgctgcctttcagactcctctttagtaagcaaccttaattcaagttcatctgttctgaataaactgtgtttagcattttagatgtagttctattaccagatgtaacacaatttatcttgtgacataattcctattgccccagatttctgtagagaagttacagtttttcagtcttaactaatcccagaacgaggactagtccggtcagcctgcactgcttcctcagccctggcatcccatttaattcaattaattcaattcaacagttcatagtcctcattgcctctagcccaggtttctcccaacctggagttcaccatctcatttatcttcagcaggtctgattgggcctttatagctttcgggactgttctctttccgttcccaagcctttgctcagcaaactcccaaccctttgggatagctgactctcaggccctggcttcccctccctccagtgctgcccctgtgatctttttagacaaaatcatggtcccatctttccctgtttaaaattctcgtttatctaataaatactttaaaacatatcacctttctcctgctttacttgataacttagctgtaattcttcac

SEQ ID NO: 96574 - DNA, 21910 bp, Homo sapiens
  misc_feature (1)...(21910): n = A,T,C or G
ggtaatcagttaatatttgttgaatgaatgaatgaatgcatggataatctctaatgacttccaattcttcaactgtgtgatttattaaagcaggaacttaaaatatcttggacaaacgcagataaaatttacctgaaaatcagtaagtgactaacgtgtgaatccttgttattacctttctcattagaaaccaatgatattgactgtgttcggaaaagccagtcatgtcttcatccttttctgattaaaatatattgttttattattattattatttgagacagggtcttgctgtgtcactcaggctggagttcagtggcacaatcatggcttactgtaacctcagcctcctgggttcaaactatcctcctgcttcagtctcccaagtggctgggactataggtgtgcaccaccatgcctggttaatttttaaatttttttgtagaaatgagggaccgggtgggtgggtctggctatgttgcctgggctggtctcaaacttctgggctcaagtgatcctcccgcctcagcctctcaaaatgttgggattacaggtgggagctgcgatgtttggcctattgtttaaaaaaactgttagattagccactagagggagctcatgcttttcttgttaacgggaaaattacatgatttgacatgcccacaaactaaacagaaatctcataaagaattatagtccttaaagctaatttaattttttattgcattttctttcttctttctttctttctttttttagacggagtctcactctgttgccacgctggaatgcagtggcacgatctcggctcactgcaacctccgactctctggttcaagcgattctcctgcctcagcctcctgaatagctaggattacaggcatgcgccaccacgcccagctaatttttctagttttagtagagacggggtttcaccatgttggccaggatggtctcgatctcctgacctcgtgatccgtccgccttggcctccccaagtgctgagattacaggcgtgagccaccgcacccggccttttattgtactttcttcctcctctctctcttttacagctttgttatgagttttccccacaagcccatgtatttctttgctcctgtgggcagcgaaaacttttggccttgcctctggacaaatctatcagggctgatagattttgtcattggtacaggccctcgcttctcatccacctccactgcctctctttttgctgatccaaggtccccaacattctccctagctggcagagatcatccctgtttccccattattcagagaaatttagcttagttttgctttaacttccataccatcaaaagtcctaggcccatctctccctaatcaaaggctccatacaaaagagacatctgccctgaggtaaattctgaggctttcagtattgcagaagtgattgctggcatttctttttctaagcaacacattttttccctctctgttatatagtttattttgacatgtatcctcttacctaatagattgtgatttttagttcttcattccagaggaaatgcaggttgtctactccaatggttaaagaaagctggtggtagatggctgtacctacttggtcctatactctaccagaaggcagaggccaagatttagttttctggagatggagataccagcaagtccttccttctttttttctttgagcaaaacaaattctttattaaaacagttgacttgaaacagtatattatatctaaaggaagagtttttttttaatctgtatagcagacttttaaagaaagcaactagttatgtataacttgacacctttccctctaatcttttgtcagtttgccccagttcataatcttattaatggacttagattagactgttcctttgtgatttattcatctccttaaaatgtagggtccaaagttgaaagttccctcctgagaactttaaaccaatgtgggtatcaaaatgcctcaagtgacttcttggcttgtgatgacttgggagctaattccactccctattaagaagtgttgcctgtttttctttctcatttaatttcatctcctgtctatataggccaaaaacgagacagtacctaaagtatctgtgattgtagtctctctttatcttcctttccaataagaaggcaactttccagtttccccgtaaggataaaacaactacagatagcttcctcccagttaactgacctagagatcgctagcatttatttatttatttatttatttaatttattttgagacagagtctcactctgttgcccaggctggagagcagtggcacgatctcagctcactgcaaactccgcctcctgggttcaaacgattcttgtgcctcagcctctcaagtagtggagattactggcgtgtgccaccacgcccagctaatttttgtattttgagtagagacagggtttcactatgttggccaggctggtctcaaactcctgaccccaagtgatccagccaccttggctgggattacaggcgtgagccatggtacctggccactagcatttaaattcataagaatagtttacagattaaatacgtctgagtcttttatccattgctctaatgtataaaatttgttcaggcacagactgctttctagtatagcaaaataattgaagattttaatcatagaacaatccttactagttaaagtcattttatgacagggcatggaggtggatatcagtgtggccaggaggattctgggatggagtcatgggaaaagtgggacttgaatcatgtgtaggtgggagtcagatgagttggaaagtaggacagggcgaataaaagaatgagcaatgcgagggcagaaatgagcatgagatgaacatgacaagagtagttgaaattgatttggaaaaggcctaaaatgaaaatttagggtgaagtatatgtcaatcaactaaaaaatacatattaggagcttcctaagtgccaggcactgctctaggcatgcagtagtggggaagacaaagtttccatggtcgaggaacctaaatttgtacatgtggtagggtaggagggaagatataagtacacacattattttaaaaggtaattgtagattgtgatggtttgatcattatatctaatcatgataaaagaaaatgaaacagactctagccaccggatttttaaaattgtgtacccttctagttaaaattagaacagccatcccatctatgtatgttttgttctcttgttagtttatattagcattattaatatgatcttccacaggaatttcttagcaggagtcttttagagccacttgcccattttgtgaaggttggcttagtgagcactctgtcttgtaatccttaaatccccttaactacatgcacataaatggaaactcatgttgcaatctgcagaaggtgaatgactgagtgagggcacatgccagcccctcagttgtggcgatgtcaccttttcctcaggaatttcttagcaggagtcttttagagccacttgcccattttgtgaaggttggcttagtgagcactctgtcttgtaatccttaaatccccttaactacatgcacataaatggaaactcatgttgcaatctgcagaaggtgaatgactgagtgagggcacatgccagcccctcagttgtggcgatgtcaccttttcctcaggaaattagcacatgacaaatgatttacagtcaattttcagttttttcttgttttttagacaaaaatgtaagttctaaatattttcatcaactccataaggtacacacactggaaccactaccactaccagagagagagtctggggaaagagtggttattttactaagggtcataagagaaggggactctgtgaagtgacatttaaactgagacttaagtgatgaggcaagaaccgccatgcaaagaagtgtgtgtaggcccaggtgtttcagggaagcagagccactatgagtattatgaggataaaaatttactataggattcagatctcacagatgaggaaggatctcagggagtgaacatctagaagggagagtcaggggatcagaggaagaatcagtgactggtccatcagaagcactgggacagttggacaaatagagcttgtgtgaaaaatccaagaagttaagcccgttcagcgccaaattggggctgctagggtctatgggagctgttgcttctgtgtaactaccgcctctgtgggtccactgccaaatatctgggtggggggcctgggaccatcactgatcatgaggccagcagtcctgagcataagctgaacgtggaggaaaagagcaaggacaagctgggatccactggctaccagtgtgtctgtcaatatgtctaatcaagattaagggtcactccttcacttttgatttccaaatctcacatgagttcttctttggctaactataacctggaaccacacagggaaggagattctgggaaatgtagttgtaagactaaccaagttgatatagtacaacccagaaccacagggaacaaaaaccccagaaggcaatgaattcagtgtgctcaagagacatacagaaaaaaggtgatgctgaggctcaacaaaggaggggagggtagagggagcatgattagataagcaggcagatcccagcttatgttaggccagctcatggtatgttttgacttaatgctaagctgcaggattttaagcaaggtggcagcattctgtaagttattttttaaaaagattattctagttgtcatggaagttagggaagcaagagaaatgttgagaagaagagccaacagggaaaacagcaggctactgaggtagctcaggaaagagacaatgatggcctggactaggattataaaatacagatattgagaactggtcaggaagccttttagtctcatttctccaacatgttttttcagtgctggaaacatttctctctctatgagatgtaggatccatctgctgcaaggaagatgcagcagaggtaagtggttagggaggatctgggacaaacattgaggactttctctgcaccaagacctatgctgaacctgctcctcacaacaatctggaatgaggaaaatgatgcactgggaggttaaatattatactttaaccagggtcacacagttaataagtagtgggcccctgattctaaccaggatatctcagaatccaggatcttagctccttccagagtcctgttgcctctcaggtgaaggcccttgtgagaattcatgtctaccattagcagctgttatctgcccgaatattacacctgtctggcctctaaagtgtacatcaagtgtacaggctgatgctcttcgttccactctcaaccttcttagagactccacgctgcgtaatgcctccagcccaagtttcctggacccttaaataattcattcagtgtttaggtctccatcataactacttgaggctttacaatatttaaacatatacaattttagggatagaaaagaagacgtgttggcttcctggggacacacctcattggaatagtgttactcttgaggattaggaaatacattgaattctacataatgctttttttttttttttttgacagagtctcactctgtcacccaggctggagtgcagtggcatgatcttgcctcactgcaacctccacctcccgagttcaagtgattctcctgcctcagcctcccaagtaactgggactataggcgcatgccaccatgcccagctaatttttgtaattttaatagagatgggctctcaccatattggccaggctggtctcaaatccctgacctcaagtgatccgcccacttcggcctcccaaagtgctgggattataggcgtgagccactgcgcccagccccacataactcttttaaatcagtgttgttgtaaggcagtgttgtcatattttccataggttttttttcctgttcccgatcgaccctttaaagagctttcatgtgttatctcaactagtgttacactttatttgagagaaagctaaaaagtaaataaggacatataagatttactattaaacattcaacagttgaagggtacattcaagagaaaaaaaatcaagatctgttttctgattaatggtctatttattgataccattctattttaacaaagaaaatatttcaaattacaaggtatacaagtcaatactgttttgaagtgaaaaattatttgctttgagagtgtatgcatgtatrtatatatatrataaatgattataacgtgtgtgtcagtgacaatatgtagtctttggttgttagttatatactgtctacctgtgagatgcaaggtaagtgggtcacagactctcaaatttatgaaacacttagatttttcagggaagttacatgaaggaactagggagtttcatgattagataagacgttcgggtgggatctccaccggacagcactctaaatcatcagcagtgtgagcrgtgattcaatttgggaaagtgagtataggtttaaattctggccacagacaacctctcctacacaattcactgaacctcccctggaaggaggtttccacatcctgcagaggctaactgggcaccaatcatgcttccactaaccgacttggctgcttcctctagcgcttagtacttcaccgttccctttcttcatgggagatggtgtggtaattgataatcacaatacaaactctgaaacaagtaaacggacaataaaactcatatttgcctaaaatgagtttcgataaggatctcggtggctatcttgttagatcttagaaagctgaggcttattgagaaagcccttttccttcgggaaaaggaatttttgtatggttgggaaaaggttggtcactggctgatctataaagtccttttcattgtaagattatatgattttcggtaaactgtatattttttaaaaacagtccagaatatccgcaagtgttttaccacgtgcttcttattgttggagaagctgagcaaacatcctgtcataaaaagacaaggatgttgcatcatccctggtccctgtagtgagtgtcctgaagataataagtaagaggttaccagaggctagccaacatggagtagccaggaaagagccagcacctgctctgagacaatggtctggttgccatcctgcccataacaacatcaattaaaaaattattaaaacctagttccacagtattattaggcactgtggaagaaacagggaaatatactgtggctcttgccctcaaggagctgacaatctggttggagagataggataaacacccaagaattagttaaccattgagtgttcacccatgtggtactgaaccaagtgaaacaggagttttaagataatttgtgtgtccaaaaaggtttatttaagaggcaggacttgaactaagctggactgagtgaggatgaattgggagaagaaagcacttctgtggggtgttggggacaagatgagaaargagttgactcagataaatcagagcatatgacaggtgcactggagagaagaaaggcactgcattgtggtaggatggagaagagctgacttgaatgaagcaaaggggaacaaaaagaaataaagtggtcagcctgagcgggcaagatggaatcacatggcttccaaagccagaaaggaggctctgaaagccacacactggtgatctccagtggtgatacccaataacaatcagcatgaatctctcagacacattgtgtgtgaggcctgtaggctgattcaaatacagaggttgatggccacagcagcttggtgaggtccagctcaatttcaaactgcttggctcaccagcatgctaacaggcttaggacttgctgacatgtgcctcagatactctctggaggctgcagtacgtggaagcctagggctgctcttccaggcagctgttgtgagtgggatgtggttgggtgaacatctgtgtagacatgggtattgctaaaatcatggccttaagcatgatgaaattcaactggtgggtggtagaagaacaaagacaatcatagcctttaacaattcttaacgtttggattcttaaaatcaactttctaactttagttacaatttcagagtaatgttttaaattttctagtcaaattaataagcctttgtattatatgccatcctcctttggaatgatagcggtataattaaaatagaacatttttaacacagaatacttattggtgaagtggtctcttatgtagtcttcttttgacgagaacgttgagattttcgaactttcagaactttctttttttgatgttttttcccattcttttgctttttcttttggctgacctgtgagaagaaggggaaaaagggcaatgtttctgaatcttaccatttttacttccttttatttggactctcctgatcatygtctcatacccacatagtctcaaaaccacattaaagtcacttcactctcagaggggctcccttagattctctctactttgctcactttgaggaggaggcaacagccttcaaactggctgtcttttgtctattcttctggcttattacattctcctggcaaccttgcttaccactcacctgccccagctacaaccctytgaaggtggcactattatcatccacgttttacataggaggaggctgagttctggagagggtgactttcccaaatctagacagctagtatgtggcagaacctccagtctgtgagactccagaacccaatctcccacccacatattctgtggctctcttcaaatccaactccttagtatgccatgcaggattcctcccgctttgtcctgatctacttttctgcctcagtcccttcactctcttcacacaaactccagccacattaatggaggctccctgaacacagcaggttctctcatgattctactcttctgctcatgctgtccttaccttcctggcaaattatttatccttcaagacccaaatcaaatatcacctgacatgagaaatcttccttaacactttctcctgccccattcccccagcaaagttaagtactccctcctctatgtcgtcaagattcttgtgcatacttttatatttctcacattgtaccataattattagcatatgcactacaacaggaagggactataccttattatctttgtatcctgtgtctaccattcaattcattacatatttattgtattaaataaggacaagctctgtacccccaaggaacacacattcttccagtgggagacagagaggggatactatatgtaggaacctaattttgtcctaggaacaaaatagaagcaccataatatgaatgaaaaatgtattcttaaaagttatgtattcttatagtgttaatgaaaaagcagattctttgtcttctaaagttaatttctaaaagaaagaaaattttgatcttccttttcaccaacctgtttctcccactttttaatcagttccttcacatctgctgaatctgggtttagacatgtttgaactccattcttcagtgtagcactgccaaagaaatagcaatgagatagttttttctcattaataatttaaatgcttcttctcagaaataatgaaaatcagtatgaattgtgctgaattttctaatgaaactacttaaaattatttcctaggacaagatgagtcactggttgaatttttttttttttctttttttgagacagaatttcgctctgttgccaggctggagtacagtggtgcgatctcagcttgctgcaacttccaactcctggattcaagcgattctcctgcctcagcctcccgaatagctgggactacaggcatgcgccaccacgcccagctaatttttgtatttttagtagagacagggttttaccacattggccaggatggtctcaatctcttgacctcatgatctgcccacctcagcctcccaaagtgctggsattacaggtgtgagccactgcacccggccctggttaaattttaaaaattacttacagtagactgtctggaaataatttaaatgttcctttaatttttctgtatagtctgagaataagagtagtcaaggatgacttataaagacaaaatatgcacacatccttcaacctagcaatcctaatctctagaaaggaaagaattacagacacaatactgccacagtaagttttatttcagcagtaaaaatttggaaataatctatatttccaacaataatcctggtcatataaattatggtttatccatatgatgaaatacagtttggccattaaaaatgacattaagtaaaaatgacattattagagatttactgacacgagaaaatgttcatgatatagtgttaatgaaaaagcagattacaaaacagtgtatagtatatgatttaatttttgtgcttatatacgtgtatgtaaaaacatatctatgttatgtgcacacgaagcaagtaaggaagatttagaaaactgtatactaaggggttaacagtatttgtcactcaagggtagaattatgcgtgatttttattttcttctattgtgttacctgcattaaacattttgtacaataaacatgtgtcattcttggggcctaatctaccagaaattccttgcatttttaaggagaagaaaagaaaggagctgcccaaatttatggagggggtaaccatctgatttttaagtgtttgtatgggcaagcactccaagggtaaaactcatgctaaatttaatgttcttgccaatatggtgcatgcatgttagctgggttgttacttacatgatttcaattttctcgcaggaagggcttggggcaaattgtttaaggtctttcaaggattgtaggtggatagtcccttggttggtgctgatgcaggaacagcgaccctttctcactactggggttcctgagggaaagaaaaagatagaacacatcagtataggccaatgtttcagtttaggtgatctatcaaaatgatacacttgactgagtcatgattattgctatcatttaccgagtgcctaaaaataatcaccacaaacctttgaaggaggtatcatctctattttatacataaggaaactaaggttcagaaagattaagaacaaagtcatannnnnnnnnnnnnnnnnnnnnnnnnnnnnnnnnnnnnnnnnnnnnnnnnnnnnnnnnnnnnnnnnnnnnnnnnnnnnnnnnnnnnnnnnnnnnnnnnnnnnnnnnnnnnnnnnnnnnnnnnnnnnnnnnnnnnnnnnnnnnnnnnnnnnnnnnnnnnnnnnnnnnnnnnnnnnnnnnnnnnnnnnnntaagtccgtgggagaaaaagagactttcacaatatttaataaatgcctatcacaagacaaacagataactaattcatgtatgctatgctgatcacagtttcttaagcaactcctaaaccatctattatttattatctgaccttaaggaatggaactggtgttggtgttgaatagaaagcactcctttgtaaccaatcaccactttcatcctcatcctctctcctccccactgccttgcttttcaatagtgttttaaatttttgaaaaccccttaaaatacattatcttaattcttaaattcatatatttacttggtacttattgtaccatatgccatacattgtgtagcagtcagaaaaggtataactacaaagttctattttacagatgatgaggaaactgaggtctagaaagattaagtaatttgtccaaggtaacaaagatagttagtaaatagattagggacaaattctctgattattggttggatccttaattggttagccacagatatacttagcaaaaaacagtatcagggagaagaaaataatttaggagatagagttctcattattacccagttcaatgaacatttattgaacacttactaggaattcatacacctagactacaaagacttgtgtttgacttggcagatcgaagttatgaactttggataactggtcatgtcactgagaagcttttatgactgaycaaatattactcttcaatgcaggcagaacattcacctttatctggctaatcaagattcttttacagtgaatcacttctcttactttacaacctaactcagaaccccttaccttgcactccaatcagaaccagcaagatgatgcccaagaggaaaagaacaccacttttcttcatagtgatagaatggagttccaagtcactcctgtattggattttgagcctgagaaattctttagagaacacattttggggatcatatttatttaggatattcatttctctcctaaactctgattggctrgtatctttagctgagctaactaaattgaccacaracttgattgtgctgggggaaamcctagtctcagatccaagggaatttctgcatgtttttatttccatttcacataaatgggtggtttatagtaagggatgtgaaactagcaacactgatagcctttggcacattcacagttgctcacctgtgtgaagaataggttatataatgaatatactaatgttatacaacaaaggttggagatgtggtttccagatgggaaatattaaagtccagataaataatatacttttcaaattcccttactatttatggcatattcttctgtataatagatggctacattgatattttcttatattgcccacttaacaacttaaagcaccttaatttcctctgggaccaggtcattttctactagtggtaagctcattctgtatcattcctgctacagtattattttttaaactaatarattggttagaataaggggtcagttgcatgtaagagacccaaattaacagtggctaagaaatgcaataaaaatgaagataaatagctgggacctaattaaagagcttttgcacagcaaaaggaacagtcagcagagtaaacagacaacccacagagtgggagaaaatcttcacaatctatatacctgacaaaggactaatatccagaatctagaatgaattcaaacaaatcattaagtaaaaaacaaacaatcccattaaaaagtgggctaaggacatcaatatacaattctcaaaagaagatacacgaatagccaacaaacatatgaaaaaatgctcatcactaatgatcagggaaatgcaaatcaaaaccacggtgtgataccaccttacacctgcaagaatggccataatcaaaaaatcaaaaaacagcagatgttggtgtggacttggtgatcagggaacacttctacactgctggtgggaatgtaaactagcacagccgctatggaaaacagtgtggagattccttaaagaactaaaaagcagaattaccattttatccagcaatcccactactgggtatctacccagaggaaaagaagtcattatttgaaaaatgtacttgcacatgcatgtttatagcagcacaattcacaattgcaaaatcatggaaccaacccaaatgcccatcaatcaatgagtgaataaagaaactgtggtttatatatacacaatcgaatactactcagtcacaaaaaggaatgaattaacggcattagcagtgacctggatgagattggagactattattctaagtgaagtaactcaggaatggaaaaccaatcatcatctgttctcactggtatgtgggagctaagctatgaggacacaaaggcataagaatgatacaatggagtttggggacttgtggagaagagtgggagcggggtgagggataaaagactacaaatagggtgcagtgtatactgcttgggtgatgggtgaaccgaaatctcacaaatcaccactaaagaacttattcgtgtaaccaaataccacctgtaccccaataacttatggaaaaataaaaaaaaaaaaaaacaacaacagaaaacagtggctaagatagaagcttatttctccctgagagatgwaggtggattagcacttggatagtggctctttcccatgaggtcttccaggcttctcctttcttgtgttgtcaccatctctagattgctgccctcatgcacatggccaaaggtggcttgccaccatgtccaatttccaggtataggatgatgagaaggcagaaaaagggcatgtccctcctttttagacatcctagaagttgcacccatcattttctatcacctcccatggaggcaggccttaatcacatggctacacctagttgtaggggaagttaagaaacgtcatctttattttggttgactagctaaagattggagatttccttattgtaaaacaatgtttctcaacgttttttttcattatggactcagcactgcatgcgtgtgtgcrcgcatgtgcacccacacacacacacacacmcccccacatttcaccttgctctgagaaaaaataaaatgaactgaaaactaaatttaatttcttcctgaagagagaaatcaaatgctaagaaataagattttgttgggtagggttgaaccttggtaggccactagtcattgcaatatctaaaattttttagctctccaagaaccaatattttcccccttgggagcaatttacctctcttcccattgacaatgcatgctgtagaattggaggaaaatggatattagcatttcatgtcacatggtgcacattttttgactgacttctatacagattattaatacttaaatggaattacagaattctttttgaataaaacatgtggtgaccattgatacagcttatccatttgctcatgcttaattttggtactgactgtggcaatgcatagagtgcaaataggttcacgttcctgctttaccacttaatgactgtgtgcaaaatacttaatttttgtgagcttcatctccctcatttaagaaaattattagacctcacagggtgttaaaattaatgccaaggacggattgtcaactgcaaagcctcacagggctagtggctgttctttccagcaaagaaaggaggatggaaatttcttaggataagaactaaggcccagcactgttggtgctacccacctttctagcctcttcttacacagctctctgctcccatcactttgtcttctctcagttttcttttcttttctccttctccttcccctcccctcttcttttcttttcttttctttctttttgagaccgttttttttttttgcccaggctagagtgcaatggtgcaatctcagctcacggcaactttcgtctcccaggctcaagcgattctcctgcctcagcctcccaagtagctgggattacaggcatccaccaccatgccaggctaatttctgtatttttagtagagacygggtttcaccacgttgcccaggccggtctcgaactcctgacctcaagtgatctgcccgccctcccaaagtgctgcaattgcaggcgtgagccactgcacccggcccttctctcagttttcaaaggggacaatgctccttcccatggcactgtttttgctcatgccattcttctgcctggagcgactgtgcatgctcctcattcctgccctcctgcatagtagttactcaccatagttacccaggccagcatcatttccctgggaagacttycctgaaccccagaggggctctcaccgcacacttgcagaggccttgctgagcccgtgtccgcagcaacgctacgtttccctgcaaccctatggttaacatttccttccaccactaggcaaggaaggcctgcgacgctccccgtctgagcatggtgctaaacacagtgcctagcacccagtaagcgcacacgcatgagggaaggagctgggagctggctcggcaggtctggaagttggatagggtctgtaaagggctgcctggctccaggggcctcacacgcagcgacctcagccgggcccaaggtgcgtgtactgcgcatgcccagccaactggtcttccagaaccttcttcagtgaggaggttatacccggaggtctcgacgctcgctcgtgctgctcgtgttgccgctgggtacgtttgctgccagtgctgatccagccggaggcgaagagaagcactttgggggcaaaaggtaggggttgtgccttcaggatctctcctctctgtcccctgagcggcccgcagcctccccagccgagatggccgtgcttttggggatgggtgggaaggttctcagcggcggtggccatgagcgaagaggcccgttttgcaggtttcacacgaggcttgggtgaggccagcagggaacgacggccccagaagggccagggcactgggcttaggggtaaccctgggccgtgggcttcagtgactgggaaagaggcccttcggataagagaaaggaggtgttggggtcagttgggagtcactgaggccagatcttatttgttacccaaaaaggggctaattttctgagatagcaagcggaatgggagggcttctctcgcctgaccctacttcgtggtgaaactgttctgccatggtagggtagggccccgcccctctgagcaggctggggccgctgcgcccagctcaggcctgtccagacactagtttcctgggcttcgtttaggaacttgtcatgcaaagtctgagagcaaccacattctctcaggaagcaggcagcgggaaggagaaaatcccattgatcgttgcatttatggctagacaaggcttttaggagaaacagaaacctgatgagaggatgttgcaggcgtttctcacagccctgggaatggagccaaagatgatctagagttgaaatcaacagttaccaattcctttttggacaagaattttaacttcctgtgccttgaaaaattccagttctgtgtccgtaggggatccaaatgctaatgtaaccccaaagaactttacaaagcggaattcttagttttcacaagtgtggcccagcctccctcttgaatctttttggttgtggaatcgaggtgttctgtttaattatccagtgtgactgactctgtggcagggacggtaagagccttccctttttacttgtgagaggagaagtttctctcataaagaaacctccaggcctgtttgaatttctcacagtgtggatttcccctcctctcggcagctgttgttagtattaaactgactagaaaggggtttatttcttgaaagtcttagaagccccaagagaatattctgatttttctttttccctctcctctccccacgcagggagtcattccttccttcctaaatacaacatggtgagttacatgcaggcaaatcctagctgtgggaggttttatatcctgtctgcatctaagtcactaagagaaaggaccaagttcttcctttgctaatcttattatctggcttcttggtttatatttctcatgtaaaacttaaggactgggttaggtttgtgaataaacagttttgagagagcatgttaaggacatgatgtaaaggacaacttttgcaaaatgttgacaatagcaacatttttgcttggtgactttaggcaagtcagcttgtagtctgaggatatgtaacaatagccattaagaagctgctgactaacctggagaaaaattatcctgaaaagaaaacatgtttatacttaaaatatccatacttatttaaaatgtcactttaaaattgcatatgtaagtaattttacaagaaaaaatccacattcttaaaaatcttcatttactgtttatcattcatttcatccaccaaacttttattcttatggttctagactctgaggtcacatatgtgaacaatgatttcctcagagagttcacagttcagtgggggaaaacagcatgtacattaacacttattatagaagaagtggtatgataaaggattgtacagaataattggaggtacagagaagtgcacaaccctggctgatgggttcagacgcagctgtctgagttaggtctgaaaaggagaattggctggaatttgttacaagaagaagttgggggaatattctaagcaagaggcaggagaaggtatgccaaatttgagaagctgcaagtactttagcaagggtggacggtagagtgaataatggagtggtgagaaattggtctagaaatgtggcaggaacaagacgatgaagtgccttgtgaatctctatgtggggaggagacactgcagaattttaactaagggaataacatgagatttatatatacacacacacacacacccctgtgtatacatctgccccttgtcaccagtctttaatcttattttacttgaacatttccttgtgtctacgtagtttatatatttgtaaaatgttctcatatttctagcctcttcattctcagttctgtgtatttgagttgtttccaataatgtctcagtaatacaacagtgatcttactattttaaaaaagattttactctcttggggtatttcccatctttgaaactgtagggacaaaggttaaaaaacgtttctgtatcttctgtaacattttgacagattgcttgccagaaagattgggctatcagtatgtagatgtatctgtttcacaatcctcttgtcattttatttacttttgttcatttagcatgtgaaaattggcactagagactagtgttaattccattttctttacaaattgatattttactttgtattggtttaacatctgcatttcctacctttttaagaccacttgtcaagtagagtcagagttttgaccttgtaaatatctatcaattctttacatattttgattaggaagctctaatgcatttttagtgaaaatatttgctttttccattttgttaaattaatttccttcataattaaaaaaaagaaaacacaacttaggggctgaattgtgttcccccaccgaatgcttatgttgaaaacctaactgccagtacctcagaaggtgactgtatttagagatagggttttcacagaggtaattaagttaaggtgaggtccctgaggaagcacagtctttggacttactagaccaagatattaaatcagctgtcttaaatatactcaaagaactaaaggaaatcatgtacaaaaaaacaaaaggaaacaagacaaaatgagaatattaataaaggggtagaaattataaaaaaggaaacaaatagaaatgatggagcggaaaagtgcaaaactgaagtgaaaaaatttagtagatgggttcaacagcagttttgagccagcagaagaaagaatctgcaaatctgaagataggacaattgaaattttcaaggctgagaagtagaaagaaaaaagaatgaagaaaagtgaacaaagcctaagagacctatgagacaccatcaagtggaccaatatatgcttaatatgagtttcggaaggagaagagagagaaagggacagaagactattcacagaagtaatgactgaaaactaacgaaatccaatgaaacgtatgaatctgcgtgactccaagaagctcagtgaactccaagcaagttaaactcaaaaagatccacactgagatacctaatagtcaaactgctaaaactcaagagacagagaatcttgaaagcaacaagtgaagtgattcatcatatacatccaagggatcctagataatattaacagctgatttcttatcagaagccaaggaagcaagagggcagtgaaacaacatgtttaaagtgctgaaagaaaaaaaatctgtcaatgaagaattctatatctggcaaaactacccttcaagaatgaaaaagaaatgaagacatttttaaatagactgaagctagggggagtttattactagtagacttgctctacacaacatattgaaggcagtcctgcaggctgaaatgaaaggatactaactccaagccatataaaggaataatactggtaaaggtaactatgtaggtaatataaaaaccagtattattgcacttttggtttgtaccttctcatttttcctatgtgaattaaaaaatgcataaaaccataattataaatatgtattaatgagcacacagtgctgtaatctgtgacaataacaattgtcaaaggggagggatgcagatgtataggagcagagtgtgtttgtttactgttgaaactaaggtggtattcaaactaggatgttacaagtttaggatgttaattataatccccaaagtaaccagtaagagaataactaaaaatatacagaaaagaaaagaggggactcaaaatagtacactctaaaaattcaactacttaccaaaaaaggaagtaatggagaaattgaggaacaaaaaaataagacacttaaaaaattcaatagctgaaaggcaaagtaaaaccttccttatcagtaataactttaaatgtaaatgaattaagctctggcctaatgagcttatatgtataaaggtttgatttgctttggtttgttgagacagggcctcactctgttgcctaggcttgagtgcagtggcatgattatggttcactacagcctcaacctggctcaaacaatcctcccacctcagcctctcgagtagctgggaccataggcatgcgccaccatgcccagctaatttttgtattttttgtagagatgggtttttgccatgttggtcagtctagtctggaactcctgggctcaagcgatcctctggccttggcctcctagagtgctgggactataggcacaagcctggcctgggattataggcacaatgcctggcctaggtttgttagtattttattgaggatttttgcatcaatattcatgagagatattggcctgttgttttcttttttgatgtgtctttgattttggtatcagggtaatactggccttatagaatgagtttggaaagtctttatttctccttcatgtttaaaggatattttcactggatatactattctaggttaaacatgttttttcttcagcactttaaatatgttatgccattctatcctggcctgtaaggtttccactgaaaagtttgctgctagacatatttccagatatttgaagatatttgagtgttgctatctaagccatatttgcgttaggaataccccaagcccagtaatactgtagtttttgcagactcaaagagataccgccttggtcttagataagatttggaagaattctctggattaccaggccgactcttgttctcttcccttagtttctcctaaacaaatgaagtctctctctctgtgctgagctgcttggggttgggggtggggtgacaccaagcacacctgtggccaccaccactgacgttgtgctgagtcagacctgaagccagcacagcactgggtctcacccaaggcatgtcactgtaaccactacctggctaccatctgtgtttgctcaaggccctacagctctaccatcagcatgtggaaaagtcagccaggcttatatccttccctgcaagcagcaagttttcccaggcaccagatgggcccagagatgctgtctgggagccagggactggagtcaaaaaccttagatatctccctggtgctctattctgttgcggctaagctggcactcaatctatgagacaaagtctttcccattcctccctcccctttccagaggcagaggagccttttactcatgcccatcaccacagacccatgggatgtacagacaggctacctaacaccaatattcacttaaggcccaagggctcttcagtctgcttatggtgaatgctgcccagcctgggactcacgtttcagggcagtgggctcccctctgggccagggcaggtccagaaatgccatctaagcccaggctggaattgggggcccaagagcccacttggtgctctacctcactgtggccgagctggtacctgtggttcaagaaaaagtctcctttacttttccttctgcttttctcaagcagaaggaatct

SEQ ID NO: 96575 - DNA, 25721 bp, Homo sapiens
gtaaaccggtcagtttaggcacacattttctctggaggacattagaaaactcacagaaatgctgggaaagctgaagaaccagtgtgcttgttattaatttattgcctctcagctctaaatccgtccttcattatctactctgcaatagtggagttgaatcctgtagacttttctcctttgcagtgagtgggatgtcagactttttcagtagagggcgctggagggaccctgcaggaggaaagggcttcttcctggtcgggcgtgtttccatttgcttcttgcttctgctcctggctgtaagcaacatatggcagggacatccagtaatgctcctccccaactattgcaggctaaattgtatccccccaaattcatgttgacatcctaacctgcaatacctcagaatgtgactgtatttggagatagggtctttaaagaggttattaaggttaaatgagattactagtgtgggccctaatttgatatgcctggtgtccttacaagaagaggagttgaggacacagactcccacaaaaggaaacatgtgaaggcactggtggaagacaagccaaggaaagatgcccctagaagtaaccagccctgccaacaccttgatcttggacttctagctgcagattgtgaggaaatacatttctgttgttgaagccccccagtctgtggtattttgttgtgggagacctagcaaactaacataccagtgtgcacagagagggcacagtcccttggcaagccaccagctccagttctgtgaccacctggctgcatgcagccctcctaacaccaggcttcatgacaagcagtcagtaaaggggttcttgatgccctcaatccctgcacaggtccatccactagcctcagccctctcctacacctcggagtggtttgccaaccttctcacgtgcatcccagagacatgtttcccacttggtagtcctaactgtggttttctggccagcctccgtccccctgctccctagaagaatattacctgcctgtccagtgacttagactggctctggcctggatcaacccagcaaacttgtccaccctccagtggactgcagccacaccttctccagcagagcttgaattccagcttgaccagaggaatcccttccaagtttgcttcttcctcaagtatttttctcagctctagagtactctttagcattctgcttaccccttttagttattcccctcctctagttaatactatttattaaactttccctgttcaaattacactccgattctggactagtacagaatccaactgccacaaaatggtgctgggagtagtcctaggagatagacctgcggaggtgggatttgagggctgaccctgtccttggagttcagcacagtgctgaactccttagcaatgggaaatgggaagctagtgacctgtggcatgcagggacatcacacatcaagctagcacttgtggctaattgtaatgaagttgtaaccaaagcaagtgtcttaggagcccaaatggcagttgcaactaactgttacggcagtacatgatgcctgtaaggaatgtactgtgggacagatttttctgagcatacttgagtagtaacagaaaaatgacaaacccaaatcctttaactctgagctcaagtcattgttagaggacgacagagctttgaggatagccctaaaagaatcttttattgctcacagccagagggctgatattgctaaaaaattaaacataaaatttaagggtgtgggttgctgacttacaacaatagttgaatgtatagttttgagcttccctctcctgtggaagtagcttgctcttggtagaagactagccttcctctgcttaaatatctgtgttaagctcatctggggacagatgccttaaaaggagttactcattctctaaatctaccacaaccaccccttgttgccactagactcatgattattgccaaagctcagcaagttccagtaggacagggatccaccatgacccagcaagaaatagtttatacgccaaaagaattgccacacttttctaatgtgtatcttcagagacctggggaacatgtgtggaagtacatcctaaagatgttcgaatgagaatagtgggatagaacactagagcaggctaacttcattcctatgagcgcactttaactagacagctttcctgtcacaatatggaagagagactccaaaggcttagggcgataggcaaatgggactggatttaccatgtgcaaactgcatgcccagcccccagcatgttccaggaaaagagtcaggagacaactccctgcactaaggcaccagcagactggaaaagctctgtgggtgtctcctttgcaggctacgtgtggctgtaaagaatgcgaccattgagagaggcttccagatttcaatggggatgatggaatcccagagaggcagagtcaaagtgactgcatttaaccaccaaagacaagaagcgtggacatatttacaatacagggcagcaggaacatagtgctaaccagttgccttagctcacaaagatctgtggtggtaattgatcatagtgttcctaggaacaaaatggatgggtagtcaaaaatgtagcttgcatcatcatagtaaaaagtcacagccttttacccagttttcagacttaataaatttacagatgcagagggtcttgattgaagaatgtctctggtggcccaccctaaccagagccatgcaggcagaagaactgtgggacatgtagttcagtctagccaagttgacaattataaagccaccactcctaaggaaggcgcagagcagcgatttgaccgtaggtggtcaggagtcgcagcctccactcttgactgttactctattttgcctccttggggtacaaggtgaaaaaaccctcaaccctggtctggagggcctggaactccagctgacacccaccacagtgtgagtgatgaggaaaacacaaggcaactggatccagtggcaaatctgccattttaagggggatgattatcttgtcttttcttctctgaggaaagaggcttctaggaagctgtacctggtggctgtttgttcatgatgctactgtactgataaactcagaccttcctaggtgggcacgtaaggcctgcttatcccccagctagggtgagcaaacctcctggtttgccagggcatgggagtatctgcactcaactatgaaaatactgggcaaaccagcacccccagaatctggcaatccagccaccactcagctgctgcattgtttgggagggaggacaacaaaacagtacgatgatttgctcagattttctccctactattttgaatctattaaacagattacagagacttttggctctacttcaggatagaatcaggtgtgttaatgtaagtgtaatattttgtaaagcatacatacttttgctgggtgcggtggctcacgcctgtaatcccagcactttgggaggccgaggcaggcggatcacctgaggtcgggagttcgagaccagcctgaccaacatggagaaaccctgtctctactaaaaatacaaaattagccgggcgtggtggtgcatgcctataatctcagctatttgagaggcggaagcacgagaatcgcttgaacccgggaggcggaggttgcggtgagccgagatcgtgccattgcactccagcctgggtaacaagagtgaaactctgtctcaaaaaaaaaaaaaaaaaagcatacatactttcgagtctacatattctttggccgttagtgtggattccagtaagatggtggaacatttaccataagctcaatagatggagagttcattgaggcagcttcgcggcccagaactacataaggtctgtcatacattttctttgtaaataaacctgagttaaaaataactttctggctgggtgtggtggctcatgcctatagtcccagcactttgggaagcagaggcaggaggatcacttgagcccaggaattcaagaccaacctggacaacatgatgagcccccatctctataaaaaatacaaaaattagccaggtgtggtggtgcatgcctgtagtcccagctactttcagggctgaggcgggaggatcatttgagcctgggaggtggaggctgcagtgagccatgatcgtgctgctgcactccagcctgggtgacagtgagaccctgtctcaaaataataataataataatttcctcagaacttttagaatatttatttttaagaaggaagtgtgtttaatttttttttcaggatttagtggaggccattattggataccaggggcaaaggtcagcccagggtaaggtgagtccaggagaaagcccagcctgtcctacaacagccctgcggcatagaaccggtggtgagcctgccatggtttgcttctgggcagcaggctggaccacctggggagcatggaagactgtgtctgtgttccctcaaccatccccaagtttacagcagccccactgtgagtcaggagtcattcctgactcacggtagggacagtttgcatttatggaaagcaaactggaaggagtggcctgagcccatattgcccatggtaatgactccttgcaatgcgaataaccaaggtgaggcaggttgggcaggttttatcctccccacaaaggcgagcctttgtgccacagccagcacctggcagagtgggagagatagcagaaccagagctgctcatttccctccatcaggctagagtgggtcagtgggatcatggaccgaaagaagacattgaatggctggtctgtcgctcagaaacagggtcctggagctggagtggccatgggttgggtggagagagtaggtggtatggcccccttaaccagacaactaaaaccaacctgccccttagctgcccacccccagtgagttctgcctcagcttcctgcctaagcccttgtagaatgccctctagggcaagacttctggaggggatggtcctgccctgagccatcctcacatgagggtagagcagttcatgggcgcaaagggcatcttgctgactgcgcccatctgctgcttctgccgcacctctaccagcagcattatccctggctgactactggcagggcatgtaactcattgccacagtcttcttcaggtagggcaagggacagccactggtcacagtaccaatcatgggccctccatgctcaggtgggactgtgtgcctgcatcagggccccctcacacatcaaccccacacgcctccactgcactttcccttcagctggggaacaatgaccttggctccagggaagtcgagagcagctcagtggcacttccccaatgtccaactgaggctgccctccacaggggtagtgtgttcatcagtgtcactcctgtacagccggaggcctgcctccaggcgcaagctgccagcactgccagctttgcctctgggttttccagaagagctgatgcggggtgaactgcccccgctgctggcaccaagatgtccacaccattctctcctgtgcagccacagtgtgtaaggtggcggccagacacgtcaaacacctccatcacagcactagtcatgaaggcagtttcctcaggtcagctgccgtgctggcctgtagcacctgggccacagggggccctttcagggctagcagggcagtatccactacctccaggcccacatctctgccctgcctctaaagttctctgaccttgtcctgcatgaaggccaagtctttttcccagcagccagtgttggacatcacatgtaggtgcccctcagaagtgctggtcacaatcaagtcatctaaggtgcctccagcctcattggtaaacagcaacagtgtcctctggtttggcctcagctctgcagtgtctccaaccactagactctgcatcagcttcaccgggtcaccaccacgtatctcggtctgtgcacaactaagcagatgacacaaggcaggagggaatgcctgcaggagaaaaccccgattggccaccgtgctcacagcccactgcattgtcgcctctgacgggtgcagatggtgcacagaggccaccactctgccacacatgctgggagatgtagttcttagaatatttaaacaccagcaaaaactacagttattaaagagaacaggtaagtatgtagataaacttaatgcacaggaggtggggaactctcttttagactttctttcaaaagctgcccactgagcacttttttcttttaaaaaattattgctcttttttttttwaaattatactttaagttctagggtacatgtgtacaatgtgcaggtttgttacataggtacacatgtgccatgttggtttgctgcacccattaactcatcatttacattaggtatttctcctaatgctatccctcccccaacccgccaccccacaacaggccctggtgtgtgatgttccccttcttgtgtccatgtgttctcattgttcaattcccacctatgagtgagaacgtgtggtgtttggttttctgtccttgtgatagtttgctcagaatgatggtttccagctttatccatgtccctgcaaaggacatgaactcatccttttttatggctgcttagtattccatggtgtatatgtgtcacattttcttaatccagtctatcattgttggacatttgggttggttccaagtctttgctattgtgaatagtgcctcagtaaacatacatgtgcatgtgtctttatagtagcatgatttataatcctttgggtatatacccagtaatgggatcactgggtcaaatggtatttctagttctagatccttgaggaatcgccacactgtcttccacaatggttgaactagtttacactcccaccaacagtgtaaaagtgttcctatttctccacatcctctacagcatctgttgcttcctgactttttaatgattgccattctaactggtgtgagatggtatctcattgtggttttgatttgcatttctctgatgaccagtgatgatgagcattttttcatgtgtctgttggctgcataaatgtcttcttttgagaagtgtctgttcatatcctttgcccactttttgatgggatttttttttttgtaagtttgtgtaagttctttgtagattctggatattagccctctgtcagatgggtaaattgcaaaaattttctcccattctgtaggttgcctgttcactcggatggtagtttcttttgctgtgcagaaggtctttagtttaattagatcccatttgtctattttggcttttgttgccattgcttttggtgttttagtcatgaagtccttgcccatgactatgtcctgaatggtattgcctaggttttcttctagggtttttatggttttaggtctaacatttaagtttttaatccatcttgaataartttttgtataaagtgtgaggaagggatccagtttcagctttctacatatggctagtcagttttcccagcaccatttattaaatagggaaccctttccccatttcttgtttttgtcaggtttgtcaaagttcagatggttgtagatgtgtggtgttatttctgaggcctctgttgtgttccattggtctatatctctgttttgctactagtaccatgctgttttggctaccatagccttgtagtgtagtttgaagtcaggtagtgtgatgcctccagctttgttctttttgcttaggattgtcttggcaatgcaggctcttttttggttccatatcaactttaaagtagttttttccaattctgtgaagaaagtcattggtagcttgatgaagatagccttgaatccataaattaccttgggcagtgtggccattttcacgatattgattcttcctatccatgagcatggaatgtttttccatttgtttgtgtcctcctttatttcgttgagctgtggcttgtagttctccttgaagaggtccttcacatcccttgtaagttggattcctgggaattttattctctttgtagcaattgtgaatgggaaytcactcatgattttgccatttgtctgttattggtgtataggaatgcttgtgatatttgcacattgattttatatcctgagactttgctgaagttgcttatcagcttaaggagattttgggctgagaggatggggttttctaattatacagtcatgtcgtctgcaaacagagacaatttgacttcctcttttcctatttgaataccctttatttctttctcttgcctgattgccctggacagaacttccaacactatgttgaataggagtggtgagagagggcatccttgtcttgtgccagttttcaaagggaatgctcccagtttttgcccgttcagtatgatattggctgtgggtttgtcataaatagctcttattattttgagatatgtcccatcaatacctagtttattgagagtttttagyatgaagggatgttgaattttgtggaaggcttttctgcatctgttgagaaaatcgtgtggtttttgttgtttgttttgtttatgtgatggattacatttattgatttgcatatgttgaaccagccttgcatcccagggaygaagccaacttgatcgtggtggataagctttatgatgtgctgctggatttggtttgccagtattttattgaggattttcgcatcgatgttcatcagggatatgggtctaaaattctctttttttgttgtgtctctgccaggctttggtatcaggatgatgctggcctcataaaatgagttagggaggattccctctttttctattgattggaatagtttcagaaggaatggtaccacctcctctttgtacctctggtagaattcagctgtgaatccatctggtcctggactttttttggttgataggctattaattattgcctyactttcagagcctgttatttgtctattcagagactgaacttcttcctagtttagtcttgggagggtgtatgtgtccaggaatttatccatttcttctagattttctagtttatttgcgtagaggtgtttatagtattctccaatggtagtttgtatttctgtgggattggtggtgatatcccctttatcatttttattgcatctatttgattcttctctcttttcttctttattagtcttactagcggtctrtcarttttgttgatcttttctaaaaaccagcttctggattcattgattttttgaagggtttttgtgtctctgtctccttcagttctgctctgatcttagttatttcttgccttctgctagcttttgaatttgtttgctcttgcttctctagttcttttaattgtgatgttagggtgttgattttagatctttcctgctctctcttgtgggcatttagtgctataaatttccctctacacactgctttaaatgtgtcccagagattctggtacattgtgcctttgttctcgttggtttcaaagaatatctttatttctgccttcattttgttatttacccagtagtcattcaggagcaagttgttctgtttccatgtagttgtgtggtttcgagtgagtttcttaatccagagttcaaatttgattgcactgtggtctgacagtttgttgtgatttctgttcttttatatttgctgaggagtgctttacttccaactatgtggtcaatttttgaataagtgcaatgtggtgctgagaagaatgtatattctgttgatttggggtggagagttctgtggatgtctattaggtcagcttggtgcagagctgagttcaagtcctggatatcgttgttaaccttctgtctcgttgatctgtctaatattgacagtggggtgttaaagtctcccattattattgtgtgggagtctaagtctctttgtaggtctttaaggacttgctttatgaatgtgggtgctcctgtattgcatgcatagatatttaggatagttagctcttcttgttgaattgatccctttaccattatgtaatggccttcttcgtctcatttgatctttgttggtttaaagtctgttttatcagagactaggattgcaaaccctgcttttttttgctttccatttgcttggtagatcttcctccatccctttattttgagcctgtgtgtgtctctgcacgtcagatgggtctcctgaatacagcacactgatgggtcttgactatccaatttgccagtctgtgtcttttaactggggcatttagcccatttacatttaaggttaataatgttatgtgtgaatttgatcctgtcattatgatgttagctggttatgatgttagctgcgcattagttgatggaatttcttcctagcatcaatggtctttacaatttggcatgtttttgcagtggctggtaccggttgttcctttccatgtttagtgcttccttcaggagctcttgtaaggcaggcctggtggttacaaaatatctcagcatttgcttctctgtaaaggattttatttctccttcacttatgaagcttagtttggctggatatgaaatcctgggttgaaaattcttttctttaagaatgttgaatattggcccccactctcttctggcttgtagagtttctgccgagagatccgctgttaatgtgatgggcttccctttgtgggtaacccgacctttctctctgactgcccttaacagtttttccttcatttcaactttggtgaatctgacaattttgtgtcttggggttgctcttctcaaggagtatgtttgtggtgttgtctgtatttcctgaatttgaatgttggcctgccttgctaggttggggaagttctcctggataatatcctgaagagtgttttccaacttggttccattctccctgtcactttcaggtacaccaatcaaacgtagatttggtcttttcacatagtcccatatttcttggaggctttgttcatttctttttactcttttttctctaaacttctcctctcactttatttcattaatttgaacttcaatcactgatactctttcttccacttgattgaattgactactgaagattgttcatgtgtcacgtagttctcatgccatggttttcagctccatcaggtcatttaagttcttctctacactgtttattctagttagccatttgtctaatcttttttcaaggtttttagcttccttgcaatgagttcaaacatcctcccttagctcggagaagtttgttattactgaccttctgaagcctacttctgtcaactcgtcaaagtgattcactgtcccgctttgttcygttgttggcgaggagctgcaatcctttggaggagaagagatgctctggtttttagaattttcagcttttctgctctggtttctccccatctttgtggttttatctacctttggtctttggagttggtgacctacagatagggttttggtgtggatgtcctttttgttgatgttgatgccattcctttctgtttgttagttttccttctaacagtcaggtccctcagctgcaggtctgttggagtttgctggaggtccactccagaccctgttcccctgggtatcaccagcagaggctcagttggaaatgcagaaatcacccgtcttctgcatcaatcacactgtgagctgcaggccagagctgttcctatttggccagcttggaatgggaaaaactctttttttttttttttttttaccccatttattcctttatgtaggaagactgatagttaaatgtctaaaagacagacaacagataaaaggcaagagaaaagtaatttttttttatcctggcatcacaggcttaatcatgtcaagtttcaaaacaaccccagcagycatctgaccctgttcctgcagttacctagtggaagggtagtgtcaagagtgataaaagtgtaagaatatttacctgtggtttccttcttaaaataaagtggaagccaggcacagtggctcacacctgtaatgccagagctttgggaggccaaggcaggatgatccgttgcagtcagggtttcaagaccaacctggacaacatagcaagacctcatttctacaaaaatttaaaaattcgctgggtgaggtgatgcatgcctgtagtcctagctacttgggaggctgaagcaggaagattgcttgagctcagttgtttgaggttacagtgagctatgattgcttaactatactccaaccaggacaacagagtaagactctgtctttaaaaaaaaattaattaattaattaattaattaaaacaataaaataaagtgaagaagattcaaagttccactatctacaggtctgtcaggagaaacagataatagagaaatgataacagccggtacccacagagtgctacttactacatgccaggtgctgtcctaagcactttacatctgcgaactcattattcagttgagggaactgaaagaatcttcgctttcaaccgtcagttatattgccttttcacaggcaaggcaattgcagttatgttgcaattttcaattgcatctgcaatcagatgcaaaggaattgctaaagactcagtagttgagggctatattttgagccaggaccaaagcaaagaactactttcatttataataagggcccagatgcaggaagtagacatctcagacagtgtggtgtgagagcagtgtgggatggcaaaaagaggatccaggccatcctggaaatagtcctttggccacagaagttaattgttaccatcagtgccttagaaagtaagaagtagtgactgacatcaggactccaaaactgggtaaagttcagaatagatgcagtcattcttcttttgtcatcttcacgaaatcctgaattatgaaattcctctgggaatatttatatgttgatacctgcacaaaatagaccctacgtgataataatcatctctattttggtgcatagttttctgtatttcctgtgtgcatgtgtgtgtatgtgcacacacgtgtttgcgtgtgtgcatgtgtatgtgagtgtatgtgtgtggtgtgaatgttttcaatatgcatcaagggcctggacaatgtgatatatgcgtgtttgttacttttaatctagaaataggaatttagcatttgaagtgccctaatcaggaatatactctccaggataggtttgaaatgtttttctcaggtctccacattccagaggacctgttacaagtggtttgactattgctatctcaatgtactagttgttaatatacttttaaaatgatagaaatagttttcagttggcaaaatgtgcgatgtttaaaatatgtggattagccaggcacagtggcatgtgtgtgtgatccttctcaggtgtctgaggtgggaggattccttaagcacaggaggtttttgtctgtttttgatttgtttttgttttgtagagaaggtgtcttgctatgttgtacaggctggtctcaaactcctggcctcaagagatcctcgtgccttggcctcccaaaacactgggattataggaatgaaccaccatggccagccaagcccagaagtttgaatcctgcctgggcaacatagcaagaccccatctctaagaaaataaaataaacttaaatttaaaaaataaaatgtgtgaggccgggtgcggtggctcacgcttgtaatcccagcactttgggaggctgaggcaggcagatcacggggtcaggagatcgagaccatcctggctaacacgatgaaaccccatctctactaaaaatacaaaaaattagccagcatggtggcaggcgcctgtagtcccagctactcgggaggctgagacaggagaatggcgtgaacccaggaggcagaggttgcaacgagctgagaccacgccactgcactccagcctgggcgatagagcgagactccgtttcaaaataaataaataaataaaaataaaataaaatatttggattaattagcaatactgtagaagaatctgtgtccttatatgtatagaagtgcataaaatttatgagcccagcagcctatctatatctttcagagtggtctttgtggctcaggctctgatttggacctgaagattctgctayctattctgaatagtaagtgagcttaacttggctctagaatattattgcatctgccttgattaattctttcctgcaagatacttggcagtgtgccaatggtggagacaaccagttttctaccaaatagtccattctcctcttcttcttaggtgcttggctacaccacccaatccagctcacctaacagatagctgtattcatgtggctaagtttcacctgatggcatgtgagtagaagaatgtatacctagatttctgggcctacaccttaagaacatgaatatgcctattctgagttcttgttcccttcttgccatttggttggctagaactttgctatgcagacaacaaaaggcccagagagtagtgcagaatcacgttggaaggaacctgagcccctgagtggctcatgaagcagaccacctgccaccttggaacattcaccttggactgttgctttaaaccactgtattattattacagcagcttttccttatctcatccgatacagtgcctaagggactgagctgagcttgtaagaagagcacgcctgcttrctaatgattacagcggtagcagaattccatctagggctggataccaaggtaacatgcaaacatttagtgagtctggggggaacagcaacacaaagccctaccctacctcttacttttagaggccttcaacatctcccagtaagaatctaacaggtgtttaaaaatgcagattttgttcacagctaatattatacactacagtgaaaatggaaagcctttcttctaagatcagaacaacgcagagatgtccattcttgccacctctattcaacatagtattggaaatcctagctacagcaattaggcaagagaaasaaataaaagacattccccaaataggaaagggagaagttaaattacacctgtttgccaataacgtgtccttatatatagaaaaccccagagactccaccaaaaaactgttaagataaacaaatacagtaaagttgtaggatccaaaatcaacacacaaaaatcagtacactgaaaactatttaaaaaatmattagaaaaatagaagacacaaataaatggaaagatagctcatgctcatggactggaaggattaaagttgttaaaacgtccatattacccaaagtgatctatacaatggaatactattcatctacgtctgggtgccttagactgcagaattatctgcccaaaccacttggagcctatttacagggctagtacattctctttcctgattaagtcctcctaagggcagactgcacagctggagtacacaaccctaatggctaaggatgcccaggggacacacattttatgaagtgggtgtggttagagcttagctatgcagcatcaggtgtccacacatgtgtccacaaagccctttgtagtgtaggatggggcataggtagaaataaaagaggaaatgccctcagaccagggatgggcagccagggagccagctgtctccataatctggagaccccaagaagtctgagaattctaaataggaacctgcccttccaggttattataaaagtgtatttgtcaagatgtgagggtagaacatattttatttaacagttcgttacaaatatttagacctggccgggcacggtagctcacacctgtaatcccagcactttgggaggcacctttgccctaagggccttcagcagaggcatttccaccaatgaacaagtcatcagtgttaccctgcgtcctacttaccatctttccctccaactccaggcaagcctgtctgcaatctcccaaatcttatacatgttgaactattgtggctgatgatgccagggtaggtaatcatgagagcagctaaagggagaccatggtgttgctaacttagcagaagcctggagctcagagcgagtgcagggtagccagagtggcactgggtggggaagtgggtggaaatgcgggattgctttcttgatttctttttaattagttcatcctggttatatagaaactaccaatttttgtatattggtttttgtatccttcaactttactggatttacttatcatttgtaagacttttttggtagtctttaggtttttctaagtataagatcatgtcatctgtaaagagagacactttcacttcttttccaacttggattatgtccttatttcttcctctttcctaatcgatcaggctaggacttccagcactatgttgaataagaatagtaaaggtgagcatcattgtcttattccagttcttagaggaaaggcttttagcttttccccaggtggtatgatgttagctgtgggtttgtcatatatggcttttgttattttgaggtatgtttcttttacgcctaacttgttgagacgttttatcatgaaggatgttaaattttatcaaatgctttttctgtgtttattgagatgatcatatggtttttgtccttcctttggttaatgtatcacatttattgatttgcatatgtggaaccattttttgcattcctgggataaatcccacttgatcatggtgtattatatttttgatggttgttagatttagtttgctagtattttgatgaggatttttacatctatgttcctgagagatatttttctctcatagttttctttttttgtgtgtccttgtctggttttagcatcaggtaatgctggccttacagaatgagttagaaagatttccctcctctttaattttttggaatgatttgagaagaattagtgttagttctttataagcttgatagaattcagcaataaagtgatccagttctgggcctttctttgtggggagastttttattatgatgtaatctcattattggtctgttgaggttttctgtttcttcctggtttaatcttagaaggtagtatgtttcctggtatttaatcaattccctctaggtttcctagtttttgagcatatagttgttcataattctcgctgatgaccttttgcatttctggtgtctgttgtcatgtctcctttttcatttctgattatgtttatttggatcttatctcttcttggttattctagctagcagtttatcaattttgtttttctttgcaaagaaccaactttttgtttcattgatcttttgtctctttcattatttatcattgcggtttggtggttttctgtagtggtaacatttgattcctttctctttctcatttgtgtatctgctatgccagtgagttttacagtcttatgtgttttcttgatggtagacatcatcctttctgtcatgtgtgtccatgtgaagagaccaccaaacaggctttgtgtgaacaacaaggctgtttatttcacctgggtacaggcgggctgagtccgaaaagagagtcagcaaagggagatggggtggggctgttttacaggatttgggtgggtagtggaaaattacagtcaaagggggtttttctcttatgggcaggggcgggggtcacaaggtgctcagtgggggaggttctgagccaggaggaggaatttcacaaggttaatagttcagttaaggtggggcaggaacaaatcgcaatggtggaatgtcatcagttaaggcaggaacaggccattttcacttttgtggatcttcagttgcttccggccatctggatgtatatgtgcaggtcacagggcatatgatggcttagcttgggctcagaggcctgacactttcacttctagatgaaggactctcaaacatttcttgtaggactggtctagtggtgatgaattccctcagtttaaagtatttcttttaaacaaatgaacacttttctctagatagtgaatctaaatctcctccagcttgttccattgcagattgacttatataatttggtctgaagataattcatcttagagaagatgatgcactcaaaacagagaagatgttaagaggcttttgaaactataaagcagtcccactgctgttgtccgagtttatcaactcttttgcaaattatgtatgagtcaacactactgcttacctggcttctactttatgagtaacagctaaataaatgagtctaacttggagaaaatcaatgttcattttcttttgcagttgtcatctgcagcaggacctcacttgagtactgcctctgagcctaggttctgaaagctagtttaaaattccctctttaagtttgtctgctgaatgttctgtgacaaattccctttcacgcacgtccatgtgaagagaccaccaaacaggctttgtgtgagcaacaaggctgtttatttcacctgggtgcaggtgggctgagtccgaaaagagagtcagggaagggagataggggtggggccgttttataagatttgggtaggtaaaggaaaaaggggggtttttctctggtgggcaggggtggggggtcacaaggtgctcagagggggagcttttgagccaggatgagccaggagaaggaatttcacaaggtaatgtcatcagttaaggcaggaacaggccattttcacttcttttgtggcggaatatcaccagttaaggcaggaaccggccatctggatgtatacatgcaggtcactagggatatgatggcttagcttaggctcagagtcctgacattccctacttcatctctcatgctgaatatagtccctgcaggatactttaattttttggaatgatttttaaagattggtgttactttggtaataataattgtttttattttggtaaatatttaactttaatcaggtcttcattagacttaaactagttgacttcaatagtcatggaatgcctttaatattcaagaaaataaaaaataggctgggcatggtggcttatgcctggaatcccagcattttgggargccaaggcaggaggactgtttgagctcagaaatttgagaccagcctgggcaacatggcaaaatcctatctttactaaaaatacgaaaattagccaggaatgggggcatgtgcctgtagtcccagctactcaagaggctgagtgagtattgcttgtgcccaggaggtcgagggtacagtgagccgagatcatgccactgcactccagcctgggtgacagagtgagtgagaccctgtctcaaaaaaaacaaaaaaacaaacaaaccaaaaaccaaaaactaaaacaaaacaaaacaaaaacaaaaacaaaaaaactcaagaaaataaaaacgaatataaaattctagaagaatactacagctcatatgttaaatgtaagtcaataataaagtttttatgaaatgttatcccttttaaaagagttcttcttatgaatataggtttcttagtgtatatttcaagaataaacagtaagacagtttgtttctgccatcccaagctacctgagattaaaaactatattttctaaaattgagttgctggcaaggaatttgtcttatcatacttattcagaatttgtttttctaggccagtaatgcctgtaatctcagcactttgagagaccaaagtgggaggatcacttgagcccaggaattcaagcccaccctgggcaacacagcaagaccctgccactccattattttttaaaataaaaaataaataaataaaaatttgtttttctatagcctaaagaaaaataattgcctctgttaacattacatttccaagaaaaattgtctgcaaatagtttaattttagatgattacccctctccaaggtagggctggaaggaggataaatttggcagagacataggttgcacatactgatctcagtttctgttaggtgcatataaataaaaaaaagtttcttcattttattaaagccctatttttgtatcatttttagtaatgtatataccaacataaatgcttgatctcagtctctcctgataattacaaatcaacatatccaatgcttaaagttactgttaaattaatgtagaattgtcaggtcttcattagaagtagtaagtagaacacagagattggtcaaatttttcagtacttatacttttgaaaaaaagaaaagagtattctattcctgccaattagtatagtctttaccctgataaacaatgtcaatatacattatgattttaattataaaccccctggagacagcaagtatgtttatattttattagtcattgtacttaagaagccccaaagctctctattcctagttcagattttcttttgtttgtgtgtgtttttgtttttttttggatgaaggttaagaggaagctttctttcttacttaaaggtttgtatgctgggcagatagttaatggtacagaaatccaagctttatttgggggaacaagagagcagacaggacatagaggtcttattggcagaagtggcaaagtaggggacaatctttcataggatcataaaattatagcccccaaacacaatctagtgaaatcaccttgtttctaagaaggttttcacaaagagctaatactaaagaattggggttacagaatacatggtattatccatgccaaatacaaacacatggacatctttattggaggagaaatttgttctgctcaagagcatcttaaagatttctatttcccagtcattattctttcccacaatcccctcccaataattagtccagaggtaggtctgggttcccatggtggcaggatattcaaatatctcaagatggctcaccatgtcatgaatgacatcttaattaatcagtcttcaaacaggggacacagtgagaataaggactccatgtttcctgatctcaaaacacacttgagagttaagagcatgggaatgacacttctgtgaattaccacttggtgcctgttcatttttctcttctgagcaaagtcctctcttgtgaaattctaatactttgcatagaatattcagaatttccagacctcatcgttgaagatttcttttgccttcacagtcataaatatgttgtaagatttgtgttcccaagatcaaagacaggtctcacaaggggtcccctgctctactaccaggacaccaacatttgttcttggtgcatcttacatcagcaatctttgaaattcattaggtgaggtcctatatcctttgttgtatcagtcatcatccccagcacaggttaaacctcagatttctccactctaagtgtccttgccctcagggagggtgacaggatgtggggtttctttccaatgttttaggacacactcatagcaaaacatgtccacatcctgttgcaatcagtgtggtcaaatagtgtggaacaaatcagcccttcctgatatcttctgcatctgaggcaatcgtgtcccttatatgatgtctgtagtcaaaggttagactagactagacaaaggttggttagaaaaccaactctcaaccacagaccttggtagtttcacaactgtttttaaataatctcttacttcctccttcctctcccttatcaatggggaaatggtgggagtctctggagcagaagccataagctaatgaaatgtcatgggactggacacactaatgttaaggtctatgggctttacatccacagttccaaaaatctgtcatctcagagcattagcatccagctattttttttttagtttttgtagagatggggtttcaccatattggccagactggtcttgaactcctggcctcaagtgatccacctgtgtcggcctcccaaagtgccctgaaccaatacgcctggccaagtgtgtctctctttaaataactctccccctttttttctgttccacatcatcctgtttggaagatagagatttcattttgcagcacttctcccaaacacttgtcatcttccctttgggagtctctgtccagggaatcttattatttaggaaaaatttttagatgtgtcttaccaaagtctcggatatatatctaatgatgtccaactctccctatcatgaactctagaataacctgaccacttttgcccatgggtttctgtcacttctacttttcagactggttccttccggtggccagcatttggtacttcctctactttctgtgaagactctcatttagttaaaaaaaagaaaaaaaaaattactgatgccgtggagcatagtatttgtagatacaaaggacctcagaggtcagcccctctcacttgttatatgaggcatctaaagttctaaggactgagatgtttgcccaaggtcatgtagttaataaatatcatctatatcaggccacttcgtatgattgggcaggatgtttattaccaaaaagcaaccacctgacgggtgagtagggaccaaaatccagtctgtgctcctcttgccttgccaagctgtgagtcctgcttaggactctatgccacaccccaccaccagagaaaaaggcctctctgtgatttttataaaggcactatttggctaatagtgacgctaatctatatgtaaacttttcttctaattatctcaaacctaagtgttagaaaaaagttaattaggaagaaactttgcatttttattttaaaggaattagtatcctataacttttatgttcctaacaattcttacatctttttcaaatgctatttgttaattcttaagcaatcttggcattcacagattgggttgtttgtttgtttgtggaaacaaggtctcactatgttgcctaggctggtctcagactcctgggctcaagcagttctcccgcctcagccccccaaagtgctggaacaacagggatgagccaccatgcctggccagatttgatcatttttgcttcacctactcaaattatggggatggggtacagattcatttttgcttcacctactcaaattatggggatgggatacaggttcagactagggtctcaggatccaggactctgcttgagaataagaagggctggcccagggttatagggtggaaccaaagagagacttatgcccccacccacataagggcagctttctgtctgatacaaaggacctagtccaaggagacaagaacttaatcacaagggaaaagtctggagtagaggacaggacagagagtagttcagaggcagacgctggaaagatttcctgagacaaaggttcctggggagtgttcttttgtaggggcctcctgtgtgctttggataaaactggaaagtccaaaaggcctagtcagcctgcagagctccgaggcaatgcaacaatgccactggaggtcaagaggaggcgatgacatcagagaccaatgacctggtttcagtgggacaaaacactgcaacgagagcccagcaagtgcccactgggccaaacaaaagcccactgtgaaccagccacaacaccaccaatgccacgtgagtgcataaactttccctctccccaaggccatcttggctaagggaagaggagagaagaaaatgcctaaaacgctgagcatttccccaaaagagattaggttaaccccaaagtagactctggctacctttacttggaaagtttatgtttggtgatctaccttcacttcatcactctatctcgccatcagaggaaacggggccttctggacaagaagagaatagttacagaaaacaagaaggctacgtgttcaagctttgaattcaacttaaccccattacacctggtccctcggatcccagaggacatgctttgcacattattcagaagttacagagttcaaatataaacgtagatgactcttttgatgcccttgaggttggcttttatgcatcgaaaaaggttattcagaggttacttagctttaaaaattaatatttaatttactaaagttacaacttaaaaacttcgcttaccgccaggcatggtggctcatgcctgtaattccagtactttgggaggccaaggcgggcggatcacaaggtcaggagttcgagaccagcttggccaacatggtgaaaccccatctctactaaaaatacaaaaattagctgggcatggtggtgcacgcctgtaatcccagctactcaggaagctgaggcaggagaattggttgaacctcggaggcggaggttgcagtgagccaagattaccccactgcaccccagcctgggtgacagagcgagcgagactccatctcaaaaaaaaaaaacttcattgaccttaagatttaagttcaacttagaattcttgttgttctttcagaaatatagcaaattttaaaagcacttgaagggcctaaatatggtttggttccattaacaaatgctattagataaactccttaaaacctcttaaagtgcatttataaatttaacattatttattttcttaatatcaataattattcaatttaatgtcaaaactttcctgggaacctaaataatgcatacaaatctagtagatcaaacacataaatatggtgatttttaagttcttaaaagatcttagtaacaatctgacttagaatgtaagtcactccctttggtgtttaggaaacacaagactgatctctagtttcaacagaccaaattctcttaaacattgcaactacttacagtaagtaatgtacacattaatacaaaaatatgaatactgtagataatatcctcttaaacatttctactcctaaatctaaatcttcgcaaggttggaatatgattacccaccatattagtttgcaagaactgctatgactaaataccacaaactgggtggcttaagcaacagaaatttattttctcatagttctggaggctggaaagtccaaggagtcagtaggtttggtttcttctgaggcctctcttcttggcctgcagagaccagccttctcactgtgtccccaggtggtctttcttctgtgtatatacatccttagtgtctatttttctgtccaaatttcctctttttaaaaatttttcattttttttaatttttatttttttgagttggggccttgctctgctgcccaggctggaatgcagtggtgcaatcatggctcactgcagcctcaacctccgggcctcaagcaattcttcccgctcaggttcctcaggtgtacactaccatgcccggctaatttgtgtattttttatagagatgggggtctcgatatgttgcccaggcaggtctcaaactcctgccctcaagcaatcctcctacctcagcctcccaaagtgttgggattacagacatgagtcaccagccccaccccaaatttcttcttattataaggacaccagtcagattggattaggacccacattaatggcctaattttaattcagtcacctctttaaaggccctatctccaggccaggcatgatggctcacacctgaaatttcagcactttgggaggctgaggtgggcagatcacctgaggttagaagttcaagaccagcctggccaacatagtaaaaccccatatctactactaaaaatacaaaaatagccaggcatggtggcatgcacctgtagtcccagctacttgggaggctgaggtgggaggaccacttgaacccaggaggcggaggttgcagtgagccaagattgtgctactgcactccagcctggtcaacagagcaagactctgtctcaaaataaataaaaaataaataaaggacctatctcctaataagtcccattctgagatactcggagtttgagctccaac

SEQ ID NO: 96576 - DNA, 30586 bp, Homo sapiens
  misc_feature (1)...(30586): n = A,T,C or G
gggcttgtcctgtggggagctggagaagcatctgaaatgggtgcgtctcaggtttgaggttcagaaagaacaaccaactgggagggagagaaaggagacagggagtgccgtgggaggtggctgcaaaaagcatgaggcccgatcatagcagagcaacccatcatactgaagccgaaaagtggaaacaggcccaacatggtggctcacgcctgtaatcccagcactttggcgtgcggatcacctgaggtgaggagttcgagaccagcctagccaacatggtgaaaccccgtctctactgaaaacacaaaaattagccaggtgcggtggtgggtgcctgtaatcccagctactcaggagactgaggcaggagagtcgcttgaacctggaaggcagaggtggcagtgagctgagatcgcgccatttcacgccagcctgaagaagtaaacgttggagggcatatgctgctggacttcaaaacccatgcctatatgaacatgtgatttgtgatacttatctgtgggttaagatggccttaaaaaggtttttttttttttaatctctttaatgtttggcttaattgaagacagctggattcttacagctacttctgcagtcaactgcttgcaatatgttgctgtaattgacgtgcacaaagaaaatccaacctcaggcccataattggaaaagagggagtattttaatagaccttaaaataatataatttctttaatattacaccaaatttgacaagtggtaatttcttaaaggttgttacaatgtgaaaacaatctatatggaatttttcataatcagattaaaattcattaatctagtttgcattttgaacggatattttaccatgcagtttgtaacatgcatgagttacttgtaaactacaggttaacagacttatgcagatattccaacagttgacacctgtcactatacattttccaaagatcacgttctttactatcaccacccacatcattagaaaggtctttgcgtattggaaaattggtaaattcatggtggcagatacaatgttgtctcatttttagggcaaatgttatacatttattgaaatgctttcagttgtttcccctgaagtgctataattacttcatttttaagaaaatatctgcagctgggctcggtagtgtacgcctgtgatcctagcacgttgggaggcctaggcaggcggatcacttgaggtcaggagttcgagaccaggctggccaacatggtgaaaccccgtctctactaaaactacaaaaaatagccggtcgtggtgacaggcgcctgtaatcccagctacttggaggctgacgcaggagaatcgcttgaacctgggaggcggaggttgcagtgagccgggatcatgccaccgcactccagcctgggcgacggagcacgacactgtctcaaagcaaaaagcagccagtcttgcaactcaaacagctgcgatttattaaatgatctaattaaatacaatttaattttatttcttattactgttaacacccgaggaccaaaactgtgctcccgctgggacagggtccagggcttgcatatgggatgggtcagggcggccgagaacgccagcccatccgtctcccggggctcatgctcgcacttaaattttctcagaaaagccgaaagccgtgattccgatctacgaaggcgattaccaccctgagcccctgaccgtagaggtgcagatccagctgaaccagtgccgctcggcggaggaggctctgcgcatgttcgccgtgtagggcgtgggcagtaaaggctgttcccagcactcccgcctccgcttctgtcccgccgcacgcgtcggggggcgggtgtggcgccggcgtcctggggaggaggagcagcctctgcccgacccggctcgtgcggaccccaggaccgggcgcgggacgcgtgcgtccagcctccggcgctgcggagacccgcggctgggtccggggaggccccaaacccgcccccgccagaaccccgccccaaattcccacctcctccagaagccccgcccactcccgagccccgagagctccgcgcacctgggcgccatccgccctggctccgctgcacgagctccacgcccgtaccccggcgtcacgctcaggtaggttgggggccgggacgccgctgctgtgagggaggctgggtcaccgtgcagggaggggcgtcgccagggcggccgtgcctttgcaccccgcggcccgctccccggtcccccagggtccccgcgaggacgccggccccgcccgggtgcggcgcgagtctggcctcggcgggcacggctcggggcccacgggccgctcggcttcggttctccaggctggggacagaggctggagccgggcgcggtagaccccgccagcctgggccgcccgcgcccgacgcgcagcgctgctgccaaccccggcccgggggtccccgcagagtgggtctctgctgccgtcagcccttcggagactgtcgcgttgaaagaatgaaccagagttcgccccctgcccgcgccagggcgttttgggtcaccgagtcctgtggggatccgaggcggctgccgcccaaggccgagcgcagcctcaggacccgcgccccaccagacggggtcgtgcgctccgcggcgggtggagagccgggctctggggtctccgcggctcggagggcggcggggcgaggccgtgcggccagcgcctggggacgcccgcggcgggacaggggccacccgggccgcggcgcagcctgggctgaaacctcctgggacggaaccaagccacctgctgtgcgcccttctcggtgaatggcaccgccgcccgcccgggcctctcgtccacagcccgcggtgctcgcacacctgagactcatctcgcttcgaccccgccgccgccgccgcccggcatcctgagcacggagacagtctccagctgccgttcatgcttcctccccagccttccgcagcccaccagggaaggggcggtaggagtggccttttaccaaaggtcagattctttcaccgcctctgccagacccccttgtcccccacccccgcatagatctccagggggctcagaaaactctggccggtggctcacgcctgtagtcccaacgctttgggaggccaaggcgggaggatcgcttgaggccaggagttccagaccagcccaggcaacaaaagataccacatctctacaaaaaataaattagccgggccctgcacgcctgtagtcccagctactggggaggccgaggccggaggatcgcttgaacccaggagttccaggctgcagtgagctataattgtgccactgcactagagtctgggtgacagagacactgtctcaaaaaaaaccaacaaaacccttagctctttcactagccgggctggcctcttcctactgtaaacctgctgggcccccgtctcccttctttctcccctctctcctgccctggagctgcctgactctgcccacggcctgcagagaccccaggtcttcacgcaaggtgccattcctcactcagttcttgctcaaacgtccctccatcaaggagggctttttagctacccttggctatgggatccgtcctccgcgtcagccaattctctgcattagactgtaacttctcaacatacctggttcctatgcgttttgtgctcccctctgagagggcagcgaccctgtcttgcttgccactgcatccctagcacctagcagttgcttttctggtgacggcggctgtggcagtggccaatgcggcagactggtcagaagtgaagggacaggatgacttggcagtggaggtcaaggggaggggactggggcagagggagacaccagagggacaaaaatgagaaactgaagacaggctttgctacgtggagctcgggcaggccacactggtggattctgtctcctcatccttcttttcaggtccctgggagaaatcagcacttagaacgtggtgggaaggcggggcggggtgcctcggaagccatccctgatacaagtccccagctttcctgcttcccctcttgtggtgtgtggctttgtctccctccctccctcctggaagccccgacctctgaggcaggtgtaaagggtgtgtgctttggtggccacggccaccctgtggtgctggttctcctccgagggaagcagtgcactcctggtcatcttggagacgcccaacacaggaccccacaggcaccaagctttttttgggaaatggtttcacttcccacttgaaaagccctgaatgtcagttccacacttagtgaatttgatccaagctaaactgagtctgtgcctaaaactcatcaggtgctcgagtttcctggaagaatggctgggaacgtttatggtgtcagctgtaaagtggctgcaagtccttttgggaaaaacagacccaggagtcctcagatgatggcagaggagggcaagggctggcaaagcagctgtgcttagcccatcctcaggggagggaggactctggaaagagcctgaggatacgctgagaataaaaagtccagaggccagcagggacttagcggctggggtgcaggttaactcctgcccaactcttggggacagggacccggggctgggccctgctcaggtggctctctccttgcagggaccggcgatgctctgcaggctgtgctggctggtctcgtacagcttggctgtgctgttgctcggctgcctgctcttcctgaggaaggcggccaagcccgcaggagaccccacggcccaccagcctttctgggctcccccaacaccccgtcacagccggtgtccacccaaccacacagtgtctagcgcctctctgtccctgcctagccgtcaccgtctcttcttgacctatcgtcactgccgaaatttctctatcttgctggagccttcaggctgttccaaggataccttcttgctcctggccatcaagtcacagcctggtcacgtggagcgacgtgcggctatccgcagcacgtggggcagggtggggggatgggctaggggccggcagctgaagctggtgttcctcctaggggtggcaggatccgctcccccagcccagctgctggcctatgagagtagggagtttgatgacatcctccagtgggacttcactgaggacttcttcaacctgacgctcaaggagctgcacctgcagcgctgggtggtggctgcctgcccccaggcccatttcatgctaaagggagatgacgatgtctttgtccacgtccccaacgtgttagagttcctggatggctgggacccagcccaggacctcctggtgggagatgtcatccgccaagccctgcccaacaggaacactaaggtcaaatacttcatcccaccctcaatgtacagggccacccactacccaccctatgctggtgggggaggatatgtcatgtccagagccacagtgcggcgcctccaggctatcatggaagatgctgaactcttccccattgatgatgtctttgtgggtatgtgcctgaggaggctggggctgagccctatgcaccatgctggcttcaagacatttggaatccggcggcccctggaccccttagacccctgcctgtatagggggctcctgctggttcaccgcctcagccccctcgagatgtggaccatgtgggcactggtgacagatgaggggctcaagtgtgcagctggccccataccccagcgctgaagggtgggttgggcaacagcctgagagtggactcagtgttgattctctatcgtgatgcgaaattgatgcctgctgctctacagaaaatgccaacttggttttttaactcctctcaccctgttagctctgattaaaaacactgcaacccagctaacttgtccagcatatgttgaatgggagccaaagtgtagcaaatgctgccaggaacctgtcggggcattccgggcgctgcctggggcgctgcagtctgggacctcaaggaaggaggctgcataggaccccaggagagacgcattttctctttcagatgcaaacaaaatcttacactcttctcctttggatacaatagagaaacggaaagaaaggaaggaacaagaggcctgtgttaagtcctgttgatgttaagtcctgttgagagcaccaggtaaacactctgcaccccttctcttagtagtaataggtttttcactccttggcctcagctgtcctcacaggacagtgggggcagatcagagaacacatcagaaatacatacaaagaaatcgtacaaactggacaggttcccctccccctgccacaactggcatcccaacagagggaacaagtactaaatcatttttgacgacgtaaataagactgaaaacaggttaaacagttgctgaacttaagggcatgacaaaaaggactcctctctctgacccaggtaggcaaaatgctttgggtgtgaggtaaaaaaaatgggtaagagcagctgtacagagtggggtgaaatgttaaacagggtgcagtgcccaagggctaagaaccaggtccagcgcaagcctgagaccacaggaggcactcacagctcacaaaggcgtctcgcctgattggccagggcaggayctgccgcctcttctcggtgcacagacagtcatgccaaccctgggcagggtggcrtctgcccctgctttccccactgagtggggagacagggcagtgtgctcaggccctcaatcctcacgcaggtaggcctcctgctcygactcagcccgctcctccccttcctcctgtgttttctgacggagctcttctatctgtgcttctgccagcttggtttctgctttccgggagagctggtgcacctcttccacctgcagtttcaccagctgaatgtgattcctggcggttatagaggcctgatctgcgcctgccaaaagatgggacaatcgggttgagcagccgtgcagggcgcggaaggctcatgtggacgttggcctgggggtgctgtggctgtcatctgaacccctcttggggtcactttccttgacctccctgtcttctctctctgcaaagaaacttccacctctatgttcaggtctggatttaactgacactctgtcaaaaacagcatttttcttcagctgtcagcggccaacatcacaattattaaatgcaactctcacaatcatctttatagctacagagcttttagtacagacctttgattaatttttttaactacacatcttccatttctttttgacaaagagatcatgaataaaattgtcaaagatccctttcatcaccttgactaatctttaaaggtaaaggaatgcatagaaaaatatttttttactataaatttatgtaacagcataaaaggtattaaatatgttttataattttttcacttaaacatgttttgaaggccgggcgcagtggctcacgcctctaatctcagaactttgggaagccaaggcaggcagatcacctgagggtcaggagttcgagaccagcctggctaacatggtgaacccgtctctaccaaaaatacaaaaaaaaattagccaggcatggtggcgcatgcctgtaatcccagctacttgggaggctgaggcaggagaatagcttggacccgggaggcgaaggctgaagtgagccaagatcgtgccactgcactccagcctgggcgacagactccgtctcaaaaaaaaaagaaaaaaagaaaaaaggctgggtgcagtggctcgtgcctgtaatcctagcactttgggatgccgaggtgggtggactgcctgagctcaggagttcaagaccagcctgggtaacacggtgaaaccccgtttctactaaaatacaaaaaaagtagctgggtgtggcagagtgcacctgcagtctcagctacttgggagcctgaagcaggagaattgcttgaacctgggaggcggaggttgcagtgagctgagatcgcgccacttcactccagcctaggtgagagtgaaactcgtctcccccccaaaaaaaaaaatgagctctctcattttacctgctgctagttagtgtatttcaccatctgggtatatacattttatcaattcgtctgtagaacattttgatcttactgcattaacaagaaccttcaggacaatgttgacaggtagtggagaatggcaggcatcctcctcttctaacttcgatgaaaacacttctgaaagtccacacaattaagtaggattacttaacctttattacattaagaaaattatctcttcataattgtacttagattcgaatcataaatggctactacactgaagatgttttgggcatatgttaagtggtttttctcctttaatctatggatatatcatctcaaacagtgaattatatttgtttgagaaggagtctcactctatagttttttacagtgttgaactatcattctattttgagggtaaatggctacgtttgatttacggctacattttgaagtgatactgagcttttcgttttggtgctgccctagtccagtttgggatcggggctatgctggcttcatacagtagtaagaggaggcttgtcattactttctttgcgctggtacacttacagtaacataggtattatagttttggaagatttgataaaactctcccacgaaacatcctaggccctggtgtccattttggggacatcaaaatcttcgaataccatttctacctttttttttttttttttttgagatggagtctcacttatcacccaggctggagtgcagtggcgcgatctcggctcactgtaagctccacctcccgggttcacgccattctcctgcctcagcctcctgagtagctgggactacaggtgcccaccaccatgcctaatttatttattttttttttttattttagtagagacggggtttcaccgtgttagccaggatggtcttgatctcctgacctcgtgatccacccgccttggcctcccaaagtgctgggattacaggcgtgagccaccgcgcccaggtgatatatcaactttttaaatgattttgttgtctcttccttttgtcacctggtacaaaatttactgtgtgtcttagaagagtatgtaaatttagagggagggggcaaagttttatatttagtatatatacatttgttaggtgtttaaaaaccactctgcaaaaccagcctgggaaacttagcaaaactctgtttctactaaaaataaaaaaattagctggggcatggtggtgtgcacctgtaatcccagctactggggaggctaaagtggggaggatcacttgagtccaggaggttgagactacagcaagctatgatctatgatcccaccacagcattcccgcatggaccctgtctctctcacacacacaaatctgattttcctttgtttagttaaaagtaaaaaaaaaaaaaaaaaaaaaaaaaaaaaaaaaaaatcacagacgggcacagtggctcacgcctgtaatcccagcactttgggaggctgaggcaggtggactgccttagctcaggagttcgagactagcctgggcaacatggtgaaaccccatctctaccaaaaaataaaaaagattaatcgggcgtggtggtgactgcctgtggtcccagctactcaggaggctgagacaggattgcttgaccctgggaggcagaagtaacggtgagccaagatcaaggaactgcactccaacccgggtgacagagtgagaccctgtctccaaaataaaaaacaatcacactgagctgggtgcagtggctcagctcacgcctgtgatcctagcactctggcaggccaagacgggaggatcacttgagcccatgagttcaaaatcagcctggggaacataacaagacaccaactcttaaaaaaaaaaaagaaaattagttgggctgcttgggacgctgaaatgggaagatggcttgagcccaggtcaaggctgcagtaagctgtgatcatgccattacactccagcctgggcaacagagcaagaccctgtctccaaaacaaattctgttctaatccttaatagctttaatagctttaatttttttggttgtcttgacctgcaagcgtgctcagaaaattgagtattacacacatctcagatctccttgtaattctatcagtttttgcctcattaagtacatttcatgattgataatgtcttaatgaattgttctgtcctactgattactttttatcttgaattctttgatttagctagttttagctaaattttggaacacaatctaaacgtgtcatttaataagtttatttttactgcaatcactgatgtttgaaattattcctataatttttttttttttttttttaaattacagatggagttttgccatgttggccaggctggtctcgaactcttgacctcagctgatccatctgacttggccttccaaagtgctgggatcataggtgtgaactactgcacgtggcccaattttgtattttctaattgacgggttttctttttaaacctttcctgcctcaactggagctaccaagtttcctcccactcctactaattctctttgcagtgtttaacaatgtctaatgtcaatgtgcttagcatgttttcactttcccaaatttaaaaacttgttttacactcagaacttttgaaaaaaaatcttagtagcttctctcaaaactgatttttccttcttcatagttcttccagaaagtgtatacaggtggtactttgagtctatgtctgaggatatcttttattctcactttttgatggtagttggctatacataaaatcctaggttatggatttatcgtcacctctagtgttgcggagaagatgcctgatgtttgattctacttcctttgtaggtaatctattttttcttagtagcttttgggattttgctctgaatctttttgttatgctgttactttattgttcgcttatttatttatttttgtttttttttttgagatggagtcttgctctgttgcccagggtggagtgcagtggtgtgatctctgctcactgcaagctctgcctcccaggttcacgccattctcctgcctcagcctcccgagtagctgggactacaggcacccgccaccacacatagctaatttttttgtatttttagtagagacggggttttaccatgttaaccaggatggtctttatctcctgaccacatgatccgcccacctcagcctcctaaagtgctgggattacaggcgtgagccactgcgcccggccatttttttgtttttaagacagggtcttgctttgtcaaccaggctggggtacactggcctgatcatggctcactgcagcctcgacctccagggcccaagtgatcctctcacctcagcctcccaagaagctgggactacaggcgcccatcaccatgcctggctaatttttttgtagagacagggtttcatcgtgttgtcaagtctggtctcgaactcctgagctcaagtgatccacctgcttaggcatcccgaagtgctgggattacaacaggtatgagccactgcacctggaccagatttttggttaaaaaagtgaaatcataaggccgtgcacagtgtctcatgtctgtaatcccagcagtttgagaggccaaggcgggtggatcacttgagctcaggagttcaagaccagcctggacaacatggcaaaatcctgtctctaccggaaacatataatcccagctacctgggagactgacatggtaggatcgcttgagcccagaggctaaggctgtagtaagcagtgagccatgattgtgccactgtactccagcctggtaacagagtaagaccttgtctcagggaaaaaaaaaaaaaaaattccgtttacaactttgttagccctttctatgagttctaggaaaatgtctacttttctcaaataatgcttatacatcccctccttttctccttctagatattctccttttctccttctagatataagcatatcctcctgttcactgcacctagaaatcctctgccatgtttgtgtggcacaactataatgctgcttccacacttccgttgtttcattcttgttccaaatctctgatccctcaggatcactactttttctcaggatcactactttttctgggccaagcgcagtggctcatgtctgtaatcccagcactttgggaggccgaggcaggcagatcacctgagatcaggaattcaagaccggtctggccaacatggtgaaactccgtctctactaaaaataaaaaaattagccaggcatggtggcaggcgcttccaagcccaactactcaggaggcagaggcaagagaattgcttgaagcagggaggtggaggttgcagtgagctgagttcacaccactgcactccagcctgggggatggaatgagactgtctcaaaaaaacaaacaaacaaaaaaactaacaacaacaaaaaaaaccttctaaaagaattattttttgtttttcagtatgatgacacaacacttaccttaaaaaatgttttatatcttttctttgagatggggtctcactctgttgcacaggctggagtgcaatgatctcacctcactgcaacctctgcctcccaggctcaagtgatcctcctatcttaccctcccaagtagctgggattgcaggtgtgagccaccacacccagccctttgtatcatttttaagatttgatgattgagaaccctagcctgctaatcttgacatcagaaaacaagagtatgttttaatataacaatttcttttttgagacagggtctagctcttttgcctaggatggagtgcacaggcatgatcatagctcactgcagccttgagctcctgggttcaagcaatcctcccacctctgcctcccgagtagctgggactacaggcgagcgccaatacgcccagctaatttttgtatttttggtagagatggggtttcactgtgttgcccttgaactcctgggctccagcaatctgcctgccttggcttcccaaagacacgcgttgagtccctgtgcctgactcatcccagtttcttttttttttcttgagacagagtcttgctctgtcaccaaggcttgaggtgcagtggagccatctaggctcactgcagcctccaccccctgggttcaagccattctcctgcacaggcgtgtgccactacacctggctaatttttgtatttttagtagagacagggtttcaccacggtggccagggtagtgtcaaactcttgacctcaagtgacccacctcaagtgatccgccctccttggccccccaaagtgctgggattataggcatgagccactgcaaccagtttcttaataagaactagtactaagctataactttggtgagccggctgggtgcggtggctcgcacctgtaatcccagcactttgagaggctgaagtgaggaacaacatgacgaaacctgcctctactaaaaatacaaaaattagccaggcgtggtggtgcatgcttgtaatcgggaggctgaggcaggaaaattgcttgaactggagaggcagaggttgcagtgagctgagaaagtgctaccactgcagcctgggcaccaagagtgaaactctgtctcaaaaaaaaaaaaatttggccggacacagtggctcatgcctgtaatcccagcactttgggaggccaaggcgggtggatcacctgaggtcaggagttcaagaccagcctggccaacatggcaaaaccccttctctattaaaaatacaaaaactattctctattaaaaatacaaaaactagctgggcgtggtggcgggtgcctgtaatcccagctacttgggaggctgaggcaggagaatcacttgaacccaggaggtggaggttgcagtgagcctagatggcgccagtgcactccagcctgggtgacaggaacaaaactccattaaaaaaaatttttttttctgtgagcctacctacctaggttgggaccactcaggtaggatgttctatgatgggcaccttggggcaccacggtgcaaaggacaaagcactggctgctgggagaataggagaagcagaggctttggaattcgacctacttggctccgtggctcatgcctataatcccagcactttgggaggccaaggtgggtagactgcttgagcctaggatttcgagattagcctgtgcaacattgtaaaaccccatctctattttatgaaggaaaaaaaaaaaaaaaaaaaaaagacctactcagctgaatctcagcttggctgcttactcaccataccgtgtcatcttagccgaatgatctggcccatctgccctctagtttcttcacatataaaaagtgcctacgaaatgcctaccacaaagcctgacatagacaaataatttgtcctggttttgccactgactatgattccaggtctcattttctccatctgtacaaaaaggttcacatagattactcatctcaagtctcagccaacggtgtaattctatgattgttaataaattgtattaccaaaagaagctaaaactatttggaagcaatccaattttccaatggtaatagttttatcatttttcattttgaagacataacctagcttctactggtctggtctgcaagggtatgctcattgtttctattgtgcaaataaaatgtaggttaayatgtaggaaatggggaaaatttctcaaagtgagagccacttagaccatttactataaagccctcattttagaaaaccagatgaaaactcaaatggtaccttcctagttaaaaaatwaaaaaaaaaacccaacacaaaacttgaacctaccagtttgatatgcagcttctgctgccatctctgaaagaccaactgcagtcatccaagtggtttccagcttcaagtactcttggtgttttgaagtcatctatataaatcaagcaaagtgcttcagacagcataagaggtctagcccatttaaatggacttaaagtagtakatttagagaacactgattatattgattagacttaattcaataatttagataccacatgaggtaggtgcactaacacagaaatgcctagaactttctgcttacctcagctctggctcctatgatcacctgccacacttcatcttcctcctctgaattcattttcccaagtaaacttgtatattgtcggtaaagagaagttaaggtataaacagcctacaaatagagaatgaacaagtctgagtaaagtaagtgagacatatcagaaggaatagagagatttccacctcaaggaaattaagtcccattacagcaaactggctcttccatcctgctgcctcaatgaaattgcactattatcctatgaagtaaaggtatcaggacattagtatctccatctgtaaacttctgtgtttttaaaagcttgtcagcaattcagacacagaaagagaaaacaatgcaagggaaaactttaaaggttgaggggaaaaaagctgctggaaaatatatgtaaaacaaatgcacaaatgagacttcaatacttttgattatccatatacgctaaaaaatttttattggccgggtgcagtggctcatgcctgtaatcctagcactttgggaggctaagacacgtggatcacctgaagtcaggagttcgagaccagcttggccaacatggcaaaaccccgtctctactaaaaatacaaaaaaattagccgggcatggtggcacacacctgtaatcccagctactcaggaggctgaggaaggaaaatcgcttgaacccaggaggcggagattgcagcgagctgacatcactccactgcactccagcctgcgtaagcaagactccatctcaaaaaaaaaaatttattattttttacaaacaggatgctatgtcacccagacggaagtgcactggcatgttcatagctcactgtaatctcaaactcctagactcaagtgatcctcccacctcagcccctggagtaactgggactacaggcacacaacacaccatgcctggctaagtttaaaattttttttctgctagagatggggcttgctacattgactgggttggtcttgaactcctggccccaagtgatcctcccgccttggcctcccaaactgctgggattacagatgtgagccaccacgcctggcccatatactctcttttctattaggttagatcagtggcttttaaataatcctcacagagcaacctctgttgatggaccacaggcccctgtgcccttaactgaaccatatcagcttcactcctgttttatatactaggctgccacatttaagatttttctgtaaaaaaaaaaaaaaggttcctgggaaaagtctaaaaacgagtgatttagatcagggctcagcaaactttttgaagggcctgacagtaaatattttgggctttgtgggccttacagcctctgttgaaactactcaaatcctcaaaaaccgttattgacaacacataaacaaataggcctggctatgtttcaatcaaataccaacatgggtatcagacacaatttggttgtgagccattatttgctaaaccatggtttagaagatcaagagttaagaggagacataccttagtatattcagtaatagcttcaatcaacgcatatgtggtctgagagagaaaggtagaggtgctatctgttaccaaagacactgctctcctcatcaatgcttcactactaagggaatgaggctctgatttctgaaagacacaaacattgtcactcaacctctaaagctcaaactgagaactttttcaccaataggcaagyaaaaaacgtaattgtcatgctgcttagtgttttaggctgaaactgcactatatttctttgggttatattttttaaggccttattttggcaatttaagacaatatagagaaataattccggagtatgctttctaccaactttcattctctgctccaaaaagcaaattatttctttacatataaaataaattgtggcggggtacggtggctcacacctgtaataccagcactttgggaggctgaggcaggcagatcacgaggtcaggagattgagacgatcctggccaacatggtgaaaccccgtctctactaaaaaaatacaaaaattagctgggccgtagtggtgtgcgtctttaatcccagctactcgggaggctgaggcaggagaatcgactgaacccaggaggcagaggttacagtgagccgagactgccactgcactccagcctgggtgacagagcaagactaaaaaaaaaaaaaaaaaagtgccgggcacggtggctcacgcctgtaatcccagcactttgggaggctgaggcaggcagatcacgaggtcaggagattgagacgatcctggccaacatggtgaaaccccgtctctactaaaaatacaaaaattagctgggcgtggtggcacacgcctgtagtcccagctacttgggaggctgaggcagaagaatcacttgaacccaggaggcagaggttgcagtgagccgagattgcaccactgcgctccagcctggtgacagagcgagactacatctcaaaaaaaaaacaaaaaaccaaaaaaacccccaaaactattgattataaccaacaaattgataagattacaattcattcattaacagtgttagatacttgagacgcaagtctcaacaagacattctctgccctcaaacacaggtgtaggggtagagagagcaggatgatgggctaacagaactagaaaaatgaacacaatcatgtatcatggaagctgtgggaggagtatgtatgagctacactgggggcatgcagaagggagcaatcagttctatgttgagtgctaatagcttagaaaaggcttcacaagtttgatgaggattaagctgagtctaataaagtgggccaggcatggtggctaacgcctgtaatcccaatagtttgggaggccgaggcgggtggatcacaaggtcaagagatcgagaccagcctggccaacatggcgaaaccccaactctactaaaaatacaaaaaaaaaaaaattagctgggcatggtggtgggcacctgtagtcccagctacttgagaggctgaggcaggagaatcgcttgaacccaggaggtggaggttgcagtgagagccaagatcgtgccacttcactccagcctgggcgacagagcaagactctctcgccaaaaaaaaaaaaagtggatgggggagggcaattctgagcagaatgaagcagtacagtgttgatggggggacctcggttattttattttttttttttgagacagagtctcactctatcacccaggctggagtgaagtggcacgatcttggcacatcgcatgctccggcatttggggggtagcttatacccgactacagcaggatgagggattgcgctgctcaccaaaagctaatgttgtctcaatattccgacaagtcttcatttttgggcccattttgtgactgggtgttcccctgttcctccacagagttcggtttttaacctttcttatttacaatcgtgttttggtagcacacgattgttgtgatacttttccaaatgggcgcttctggacctcagagtaattttagtttgcaggcgcgcaccccccgcgccatggttcttgtgactccgggcgcggtctggggtggttgcccccaaannnnnnnnnnnnnnnnnnnnnnnnnnnnnnnnnnnnnnnnnnnnnnnnnnnnnnnnnnnnnnnnnnnnnnnnnnnnnncagcactttgggaggctgaggcgggcagatcacctgagatcaggagtttgagacaagcctggccaacatggtgaaaccccgtctctactaaaaagacacaaattagctgggcgtggtggcgggtacctgtaatcccagctactcgggaggctgaggcaggagaattgcctgaacccaggaggtggaggttgcagtgagccgagatcttgccattgcactccagcctgggtggtaagagtgaaactcgtctcaaaacaaaacaaaacaaaacaaaaacaaaaacaaaaaatcaatcactctatgttgtcttgtttttgctattcagagtacaaacactcagaatcactgcatgttgaaagaggcagtcaagaaatatttttgatatgaacaaatcaagaactttatatttcaaataattaagtattcattaggcatcttatacaggactacaaaaggaagaaagacacctctgctcacaagaagctaattttgtctcaatattctgataagtcttcataatgtgctacattttataatgtgttttcacttgttcctcacaacagtccagttattatcctttcttatttacaagcaatgacatggaagctcagaatagttatgtaacttttccaaaaagtcacatctagacctcaaaccaaatctcacttcaaagtctgtacccttcccattatgctctgatgactcaggagggtgccaaaggattatcatcaaatatcaaaatatacaatattaagtggccaaaaaggaggagatagttgttggacaggaataaggaaaggctttaaatagaggtgagacttggtactaaagatacctagaatcagaatggccacgcatcctggagaataggtaacaatgaggaaaataatacttttgttgcaggggatgtccagggatctagcctggttggagctaagagaaatgagactcactagggccctggagtgcagggagacttagtttaattttagttctgaacgcctcatggaaagccactgtaggtttttcatttctcattctgttgcccaggatggagtatagtgttgtgatcccagctcactgcagccttgaactcctgaaatcaaatcatcctcctgcctcccaggtagctaggactaccgacacacgccaccacacctagctaattattttttgtagaggggtggtctcgctatgtttctcaggctggtctcgaactcttggcctacagtgatcctcccacctcagcctccaaaagtactgggattacaagagagagccatcgtgcctagctgaccactgaggggttttgaagaatggaagtggcattgctgtactaaatgactagagaccccagtcatgtggcccagaactgaggttaactgggcttagaaagtaatataataactgagaaaggacaaacctaaaaaaaaatcttttgaatgaaaaaaacaaaggttgtcccaattgtggtcgaaaatagcctggtattcaagtgaggggttttagggctatggattcatcagcatgcagagatgacaactgaagtgaggcacagtaaggtgagggctcatgaatgagcctcagaagatgctgaaaatacttgtaatacatggaattaatcttccttttgtgatgaacacacacgttaagtggcaggaatattttgctgaaatggagcttgctggtttcctctctagctcttccccataaagcatataagctatgatttttttaaatgaagtgccacttttatatcaactacttaattgacagctccacctagatgtttcctagacatcttagaaatgacatttccaaaaaatttttttcctttcaaaacccactcctctccatcctactaaatggcatcgccattcattcagttgctaakgcctttaaaaaatcttggaatctggccaggtgcagtggctgacgcctgtaatcccagcactttgggaggccgaggcaggtggatcacgaggtcaggagatcgagaccatcctggctaacacggtgaaaccctgtccctactacaaatacaaaaaaattagcagggtgtggtggcgggcgcctgtagtcccagctactcgggaggctgaggcaggagaatggtgtgaacccaggaggcagagcttcctgggcaacagagcgagactccgtctccaaaaaaaaaaaaaaaaaaaaatttttggaatctagagcagtggtccccaacgtttgtggcaccagggaccggctctgttgaagacaattttttcatggactgggtggggtgaggatggtttcaggatgaaactgttccacctcagatcatgargcattagattcttacaagaagcacacaacctagatccctcgcacgtgtagttcacaataggtttcgtgctcctatgagaatcccatgccactgctgatctgcccagaggcagagctcaggcagtaatgctcacctgcccaccactcacctcctgctgtgcagcttgcttcctaacaggccacagaccagtaccagcccaggggttggggacccctaatctagagaatacacccgacaaccaatccatcagcaactcctgctaactacgttgagctaaattctccccacctcttctgcttgcctggtccaagccagtatcatttcatgcctagatatagcaactagtcttcctagttccacacagcaaccttttaacttttaaaatttatgtcagatcataatagttctgtgttaaaaatcctctgtgacagccgggcacggtggctcaggcctgtaatcccagcaccttgggatgccgaggcgtgtggatcgcctgaggtcaggggttcgtgaccagcctcacaagcatggagaaaccccatctctactaaaaatacaaaaactagctgggtgcggtggcacacccctgtaatcccagctacccggaggctaaggcatgagaattgcttgaacctgggaggcggaggttgcagtgagccaagattgtgccattgcactgcagcctggcaacagagtgagactctgtctttaaaaaaaaaaaaaaaaaatatcttctgcggcttctttttcagaaaacccaaagccttacaacaatggcccacaaaatacaaaggacacaatctgattatcagttaactctctggcttcatctattacggtctcccccattcgcctccagacacattagctccatgctcctcagacataccaggcatacttctgcttctaggtctttgtccttctgagttccttctgcctggcaagctcctccccgcaccagatagtataatggctctttcagaacattcagatctctacttcgccttatcagagtagcttgaccacctttatctaaaacaaaactccctcccagaattgcctattcacttacctcatttgttttgttttgtttttgagaaaaggtcttgccctgtcacccaggctggagagcagtggtgagatcatagctcactgcagcctcaaactcctgggctcaagtgatcttcctgcctcagcctcctgagtagttgccactagaagtgtgagccaccacacccggctaaatttttctgttttgtagagacagagtctccctatgttgactaggctggtctcaaactcctgagctcaagccatcctcccacctcagcctcccaaagccctgggcatcagccactgtgcccggccctgttttcttcccaccatttatcaccagctgatattttatattttatcctctttcatctccacaaagcttttgtgagaacaagaattttttgttgttcattcttacattctcagtgtcttgcacataaaagttgctcaataaatttctgttgaatcaaagactactttgttgatagactgtaatatcctcttatttctctctactcgctttatacaatttgatgtgctgttcctaccaaatgagataatcaaaatgagaatattaatatatctgctcaactgtgaaaagatgccggtactgtgggggaagggatgggagcactgggaaaaactatggtagcttgtctaatgcttcaccgcccacttgagacttcaagaggacacggtacactagataagaatcactgcacacgacagtacctgtgcaataggaaccgcacacagggttactccaaagccaatcgtcacagttttgtgccatggtcttatcaattctgagaaacaccgcttcttaaagttagccacaacaggaacacacaaacactgtctgtacctggaagtagaagtcagatttcataaggcacgaccgccaatctgtaacaggctcttggatttacttgcaggggctgtaaactcaaactcgagccaagcaggaacctaaatgaggatgcaggacagctgaggggttttgaaattttcaacatacaccaagtttaaaatgttgcctcaggcagggtgttggtggctcacgcctgtaatcctagcacttggaaggccaagggcaaggcgggaggatcacttgagcccaggagttcacgaccagcctgggcaacatggctggcaacatgaccccgtgtctattaaaaaaaaataagtaaataaaggccgaggcgggtggatcacttgaggtcaggaattcgaaatctgcctgaccaacatggtgaaaycccatctctacttaaaacacaaaaattagcccggagtggtggcacgctcctgtaatcccagctactcgggaggctgaggcaggagaatcgcttgaacctgggaggcagaggttgcagtgagccgagagcgccccactgcacttcagcctgggcaacagagcgagactgagtctcaaacaaaacaaaaagaaaaaaaaaaattagccgggcgtggtggcgggcgcctgcaatcccagctactcgggaggctgaggctgagaatcgcttgaagccgggaggcacaggttgcagtgagctgagatctcgccactgcactccagcctgggcgacagaggcagatcttgtctcaaaaaaattaaaataaaataaaatgttgcctttaaactttttagaaacggatgccacaataaccgctcctgcaggcagaatttagctctggacccctggcctgggtgccagttgtgtgtgacggtcccgctacaatcgcccaggagcctgcagcgctaggtagagagccctgcgccagctcccccggccccttctgccctcgggaggacgtcttcagacgctcgtctcccttcccrgactccccccatgccgtgtccctcctcctctccacgtctcctcagggacttcgagtggctgacgagggctggtcaggaggcggagcagccccaagaaggcagcccggggtctcggggactcgtttctagaagatggacgaactgaaaaggaarccgggcttgacccagggggcggaggcggggctgtcctcagtcctcccgaccggagcgagacgccgcgacccagctgggcggacgagagatgagcgcgtaaggaaggcgggcgccgtgggccgggccacagcgctgtccgcgtcggtccctccctctggtcctgtcccctctacgcggccgcagcggtacctgaagaatgaagttacgctgcgcgacagccaactcttcagagccgccattgtgcagcgcgcggacgccaracgcacacgccggaagtgacgcagcttcgtgagcgcggagcggggcacggcctccacctgagagcgcctcgccccatagccacgcccccacccaaggaagcagtcgggattgggcaggcagggggaaagggggcgaggcttagggcaaaggctgtaacggccgcgcaaggcaaccaaccgccggaacttccgcgcggggcggggcatatgcagggcctgagggcgcggaggtgggtccggcgcggagctgagtcgggcgccgtgacgctggcgggtgggcggggactcagttcgggccagggcttgaagggaatttcctggtgagttagggaggcggggccgggcgggaggcggggccgggcgggaggcggggccgggcgcggcgacggcgctgtcacttcagcaccaggaagtaagtggtccagccggccagcagcagcgccccgatgagcaccgtgtagctgaggagcacgaaggcgagcagctcccgcagcagctgcagcacgtggacggtggacgaggccggcatcgcgctgcgcgggagccccaggacggtcggcggcctgccgggctggcgccgtcccagaggggcggacgggaacacacgaggtcctggccctcgaaacagcaaacgaaggccaggaagcccacagtgccgacctccccaacagcctcctggacgctcgcttctcggttacactggagaatccttctcaacccaaactgccctcgttcttcggctctgatccgggctgaggaggcagaagcccggctcttccccgcgccccgcagctgcatgagttttcctccctggcccgctcctcccaccacctcctgcatttttaatgctgtgagtgccgctaatgcgctggtggagtaaacctttcttttcccgtcactcaagctgcagccccagctgcggccctggctggaaggggaaggggagagagacccatttgggcaggaggaaggcacaggcccaaacctgctcttctgtgagtcccctggccccaaggcttgccagcagcagagctggaggatctttgctttgtggtccagcatgcttgccttctggccagctgggactgcagggtgccaggtggtgggtgggcatcaatccgatcctgggctcacccccgccaccgtgctctgtgcatctgccccagccctgctaacttccaccagagacgacatcagacagtaagaaccccacaccagctcatcagacagtaggaaccctacaacacctccaatgctgctttgcccagccactccccacagtgtcaggcactggcttccttctctccccacctcacttacttggcaaagtttccacgaatcttccaccctgaagctccgcggttctgtctgctctggtgcccaaaggtagcttgtgtgtattctgcgatctcggcagaactgagattttcaagcagcggcactcaacaactaggtgtggtctagagaccaattacaacctccgcgtggtccccgagctctcagggagctgcgcacaggcgttcctagcccaggcggggcgctggcaaccctgcccgccctctgcctgtgtcgccaccacagcccacagggctcagatgtggtttcacagacccagatgggctgagcaggcggcacactagtgggtatttcaagccccttcttgtttttttctgaacattgtaaggggttatggggttatagtgcgaacagtttcgtttctaacaaacacattgagagcagtcccatctcctccgagtctgggcaccagaagaaccactggacagtgttcacttgcgaccgcccaactactaaagcaaaagctgttgtcttaaaaaacatgcaagtgcaagcatgcacgggtgtgagaaccaagcttaagtgaccgagatctcctgagtgcttgattccgatttacaaagagttttgcagcttacagactcattatacagatactttcccaatgtgacacttccaatttcacctcctcacaatgtgaggcaaaaggagccagtgaggatttctgcaaagaacagacactttcccagatgcaacaacaaaggaaacgaaagcataaactatgctgcttctgattattttgctcgttgccgtagtttttagttcaagactgttttctgacctttgaaaagagcaggcagtgtggacatcaacccttttatcaacatcatcatccagaagcaaatggctccttaatttaatcaggatctcttattatcaaattattgccttggccacagtgaggctgaaaacaggagcagaacattatcaagctgctcaggaagccagtgagtagtaattactcccccagagaactggtcatcttccgtgtcctacctagtggcaacggagtacagctgagatttataccctcctccacaccaaaataatggatgaaacagacaggctattaaaaataggcctgattctgttcccttttaaccctcacatccttcaaatggatgtctccaggcagttaagtgttctagcctttgcggccccttgttaccgcctgattttgggtgttttacagcaacggaggaacttaagcaaagaaacactatgtggcttgaaattcacactaatccatttagaaataaaagaatctgagaaattttaaataattgcctttttcttctgttgtctgacaaaaaaggtatcctctattttctataggatgtcatcattaaaccacgactgaatatatcacagtctacaataaattcagtctaaagaagatcatctatgtgatgtctgcatttttttgcctcaccatctttatcatagtccctcttactgtctgctttagacatccagttcattttgatattttaaaaagagtatttcagctggtgtggtgactcacacccataatcccaacactttgtggggctgaggcaggagggctgcttaaagctaggagttcgagaccaccctagccaacagaaaattaaaaagataataaatttaatgaaaaagaaaaaaagaattatttctcttgaggccaggagtttgagcaacaaagaccctgtctctaaaaggaagaaaaaaaaattgctgggtgtggtggtgctttgctatagtcccagctactcgtgagactgaggcaggaggactgcttgagcccagaagttcaaggctgtggtgagctatgattgtgccactgcactccagcctgggcaacagaataagacctcatctcaaaaaaataatttcttcttgaattaaactctgctcaatacaaacacttcctcctggtgacaggctggtctttagtgtacaactgagaacaagaccgaccaacacatcatgcttaatcataatccatttgcagtgagggcagatctgaatcgaatagaactcacaatgagactgtcccagttttctctgagaattaaatgtgctgttttaaatcatccctctttcaaccattactcttttgctccacaattaacaaaatacttaattctctgttggttagaattcaacactctatagcaagacacaaaacagtgtctgtgtagacttctttattaagggggctgctggtgtagaactgtctacccaactagacaaaagtccagacatgatgtaaacaatccactctccccaacaataaatgtaccgttcacatatcctttctcagtaagggcatactcttttgagacaaagactgcttcaagtattaaatgaacttacacaaaggcgtataatatataattatctaccattttctatttgcatacaaatgaagcaattgaagtttttcagtcttctgctgaatgcatttttaggagctgccctaactatgctctgagcaagcaagtatatagagtcttgggtgagtgcagacacatgagactacaactgagtatctgttcccaggacagaatccccagccagggagacttgaccagacttgaattgagccccaggaaccaaaaaatggaggggcagggtggattccattctctaaagcagctgatgactgcctgaggtggaaggtataaactaatctccctgggatataacaagtatttaaaaaaggattttctacaatgaaaatggttttctttaagacatttccaaatactgaatatcaaggccaaattaattccatgagaaactaatctttcaattattatctctgccactcttcattctttcattaaagagatttttaaaaaagtatacagaatttctctttcattaataatatttaccgtgcccatcagaactccactaatgggccgggcacggtggttcacacctgtaatcccagcactttgggaggccgaggtgggccaatcgcctgaggtcaggagtttgagaccagcctggccaatatggtgaaaccccatctctactaaaaatacaaaaattagccaggtgtggtggtgcacatctgtaatcccagctactcaggaggctgaggcatgagaatcgtctgaacccgggaagtggaggttgcagtgagctgacatcgcaccactgcactccagtctgaaaagagcgtgagactctgtctcaaacaaacaaaaacaaaacaaaacaaaaacctccactaatgaaaaaggtggggaaaaacaatgtgtggttactaatcaacaaccaaaatcacacctggctgggacccagcaaagcaggggaccagctagttttgctggaggcttgggcaagggcagcaaaactgccaacctgacttggtgcccttggtgccttaactcctccagaagctaagatggaggagcagaggggcagagaacacacggattttcaacttctcctccaacacccctgccccccaccacagcctgacagtctcctgcaggagtagcagcagctgtggctgctggtctccaagatcatcaagagatacacctggagaaggctgaggtcaccagagagggggctgaaacagtgttttcagctgagtatggagtggccacagactgctagaaaagtacacgtggcagttaccatggaaacgaagtggccagatgctgaagaagcaagagttgcccctgctcactgtgggaccagttggatgttgggcccttgatggacagaagagaaaacggaaacctcaatggaggcacccaccactgctgtgtctggagttaacgtgtgtgctaagaaactgtctttgaattacttcaaaggctgaattctcagaaggttgctccccaattatcacattcttccatgtcaaaagcccctgataagtatggaacctaaggagatgtagctgatcacatagagcataaactttgtttctgggcaagaagctcccctaaacctcttgctttgtaagaagtagaaggaagcaaacttgccttagtgatcagttgcgacagtgactgatgaccctaaatataatctcccacactctgcaggaaaaagaaatctcaactcagtgataaaatgatctccagctcccaacacttaaccactgtcctaggcctgatgcgccttgaagaaatacagcactggggattagaggatgaactttctctttttattttcagtttcacctcctcagtctcagctttcttattttaagagctggccccgtttgtctggctgaatggattatctacccccaccatccttaatgtatttccagaggtctctaatgaagaccctgagcttagaaaactcaaaaccagtgctgcttttactcaggttgattttcttctattcttctttcttcagcagattaggggccaggcacggtggctcaggcctgtaatcccagcactgtgggaggccgaggcaggtggatcacctgaggtcaggagtttgagaccagcctggccaacatggtgaaacaccatggctactaaaaacacaaaaattagccgggtgtggtggtgcatgcctgtagtcccagctactcaggaggctgaggcaggagaattgcttgaacctaggaggtggaggttgcagtgaggtgagaccgtgccactgcactctagtctgggtgacagagcaagactccgtctcaaaggaaaaaaaaaaagggaatacaaaagagacggagaaagcagtaaacagtagtataatttaagaagctgaccccagaatatattctgtattcccatgtttcttctatggggttttacttcctttcagcaatttcttcaaagaggtagtttattctgcagtacacttgttaag

SEQ ID NO: 96577 - DNA, 14038 bp, Homo sapiens
tgtaccattttgcattctttttttttttttgagatggagtctcactctgttgcccaggctggagtgcagtggcgcaatctcagcccactgcaagctccgcctcccgggttcacgccattctcctgcctcagcctcccgagtagctgggactacaggcgcctaccaccacgcctggctaatttttttgtatttttagtagagacatggtttcaccgtgttagccaggatggtcttgatctcctgaccttgtgatccgcccgcctcggcctcccaacgtgctgggattacaggcatgagccactgccccattttgcattcttaacggcagtgtatgatgtttctgatgcctctataccctcaccaacacttgtgattatccttctttttttattagacctatcctagtgatgtgaagtggtatctcattgtggttttgattggcatttccgtgctagttaatgatgttgagcatcttttcatgtgtttattggccttctctatatcttctttggaaaaatgtctcttcagaccctttaccaatttttaattggattatttgtctttctattgttgagtaagaattcttttgttttttgttttttgagacaggttctcactctgtcacccagcctggagtgcagtgatgtgatcacagctcactgcagccttgaccctctgggcccaagtgatccacctgtctcagcctttcaagtagctgggactacaggtgcatgccaccaggcccagctaattttattttttgtagagacagggtctccctgtgttgcccaggcttgcctcaagtgatccgcctgccttcacttctcaaagtgctgggattataggcatgagtcaccacacctgaccaaatatagtcaagagtccttctttttttatttttgtagtgacggggtcttgctctgttgaccagactggagtgcagtggcacagtcacagcttgctgtggcctcaaattcctgggctcaagtgatccctctgtctcagactcctaagtagctggaactacaggcatgcaccacaatgcctggctaattttttcttattttttgtagagatggggctctcacttcgttccccaggctggtcccaaactcctagcctcaagtgatccacccgcctcagcctcccaaagtactgggattacaggcgtgagccactgcgcccggccttttctttcattctataggttgtcttttcacttttttgatggcgtcgtttgaagcacaaaatattttaattttgataaagtctaatttatctttttttgtcacttgtacttttggtgtagtgattatgaagatttactcctacactttctattaagtattttatggttttctctcttacactgaagtctttactccatttgaagttaatttttgtgtatagtgtgaggaaagtggtccagcgttactcttttacatgtggattttcagtcgtcctagcaccatttgttgaaaaggctagtttttttcctgtttaattgtcttggtatccttggtgaatatagttgaccataaatgtaagggtttcttctggattctaaattatattttgttgatctgtatgtctgttattaggccattactactgtgtcttaaattccatagctttgtagtaaatttttaattctggaaatgcgagtcctccaactttgtttttcctttcaagattgttttggttatcctgagtctcttacatttcttaagaattttgggataagcttatcaactcgtatgaaaaaagccagctaggattttaatacagattgcactgaatgtgaagaatttaggagtatcatcatcttaacaatattaagtcttctgatccatgaacacaggatatcttttcatttgtttaggtcttcttcagtgtttttcagtaatgttctttggttttcttttttttttttttttaattgggatggggtcttgctatgttatctaggctggtctcgaactccagggctcaagcaatcctgccaccttgtcctcccaaaatgctgggattatagatgtaagccaccatgcctagcgagtcagaattctttaaatattttagatacaggtctcttatcagatgtataatttgcaaatagtttctctcattcttttttttttttttttagacagggtctcactgtattgcccaggctggagtgcagtggtgcaatcacagctcaccacagtcttggaactcctgtacccaagtggtccttatgtttcagctttacaactagttggaactataggcacacaccaccacacctggctaattttaaaaaatatttttgtagacagctgtgactgcaccattgcactccagcctggacaacagagcaagactcttctaaaaaaaatacacacacatatatatatagcaattatatttcttttcttatttttgagacagagtcttgctatgtcgcccaggctggagtgcagtggcagcatctcagctcactgcaagctccacctcccgggtccacgccattctcctgcctcagcctcctgagtagctgggactacaggcgcccgccaccacgccgagctaattttttgtatttttagtagagatagggtttcaccatgttagccaggatggtctcgatctcctgaccttgtgatctgcccgcctcggcctcccaaagtgttgggattacgggtgtgagccaccgtgcctggccgtagatatagcaattatatttctatacatcagcaatgaacaacctgaaaacagaataaaaagaaaaacaattatacttacaatagcataaaaaagaataaaatatttaggaataagtttaaaagatgtatacagcttatactttgaaaaccacaaaacaggccaggcatggtggttcacactcataatcccagcacgttgggagactgaagtgggaaaatcacttgagtccaggagtctgagaccagcccgagtcaacataatgagacctcatctctacaaaaatatatataatcaattgtatattgattttgtattctgcaacattgctaaacttgtttaatagttcttttttttttctttttttgagatggagtctcactctgtcgcccaggctggagtgcggtggcacgatctcagctcactgcaacctccacctcccaggttcacgccattttcctgcctcagcctcctgagtagctgggactacaggcgcccgccaccacgcctggctaattttttgtatttttagtagagatggggtttcaccgtgttagccaggatggtctcaatttcctgaccttgtgatccgcgcaccttggcctcccaaagtgctggggttacaggcgtgagccaccatgcccggcctgtttattagttctaatagttttttttgtggattttttaggattttctatatgcaagagtgtgtcatctgcaaatagaaatagctttacattttccttgccgattggatgcctttcatttcatttttttcacctaattaccctggctagaaccttcagtacaatgttgaatagaagtgtcaagggcagatatcctcgtcttgttcctgaccttagggggaaagcatcttgtctttcacatgtagttttctgttgataccttttatcagattgagaaagttcccccttccactcctagtttattgagttttcattatgaaaaggtgttggattttgtctactgctttttctgtatctgagatgattatgtggtttttgttctttatactattgataattgtctattacattgattgatttttagatgttaaaccaactttgcattcctgagatgaatccacatcttttttgggtggctgtatttcactagattgtgagctccaccactgttagggccagtgtccccagggggcaggtaggggtggatgtccctaaagtctgtctttattctgctccttcactcccctgagtgtcccctcttctattctgtctgcaaaggcaaggatgggaagccaaggcagaaggtgatcattggcaactgtggggagtatgtgtgaggcggcactctctctgctctccactctgctcttgcccctgcacatccaggaaggagctgccagcctcagaggaggcagcaccgagggtgccctatttgaagcaagcaggatttgtggcatgaggcccaccttagggtcagcttggagcacctctgtaggcacagcctggactgttcccaagtgcagctgtgggcccacgaaccagcacaggtgctccttctccaaccaccacttttctcggcatttgctgctgggtctgctgtgggcccaccaatgtggctcctggatgttttgttctctttggtttgctaaaataaattctagttcttatactgctgcctgccagccaggtcccaggtgttttcagaggttgctgctgggacaggccatagcatctcggctgctgctcttctctcttaggccaagtcccttaggagatgccctcggcagcccattgtggggcagtagaagtcaaagccatgtaaaagtgcctgtgtcttttctttctggtcagttaccattcctgctctcacaccagctggtcttgtgcctgatggacatttgtaatcagtctcactgacctggcactcattatgcacttcctgaaccaacagaactgtattaccgaggagcacacagggcgcttctttagtcagcggatgtgcttggtgctggggagaaacaagccaggggtggctcctacttcctcctccccaaccccaggcctacctggaaactgcagtgtggtgtcatggtgcgcagcctgtgctaggatggcctctcaccctgcaccaattttgggccagccaggccacctcatggcctctttcaggtgttgaaactgagccctatcagtctccagaaacctcccccagggctgcccactggctcccatgacatgtcctaggagctctgtctgaatcaagccttttttttttttttttttttttgagatggagttttgcttttgtcactcaggctggagcatgatctcagctcactacaacctctgcctcccaggttcaagcaattctgcctcagcctcccaagtagctgggattataggcacccgccaccatgcccagctaatttttgtattttcagtagagatgggggtttcgccatgttggccaggctggtcttaaactcctgacctcaggtgatccacctgccttggcctcccagaatgctggctgaatcaagtcttgatgttgagtatccaccagggtgagggtggtggggaaaggagaagcctattgccctggccccagtgaccccaagccagctccacctctggcaccctgggtggggcttctccccgcttgatcagcttgggcctgcagctttcccagcaggcactctcactcctcaatgtcggtgtcattactggtggtcagtcatggccgtcaggacaggcagcattgaggccaggataaggcagctactcagggctgccatgaagcccaggagagaagaggatgtgtgtgaattgctcaacactgtgggttctgggggtgacaggcaggctggcccgaggccccgggagggagaactggtcccacaaccctgtgaaacaagggaggaccttattgctgtgcttgcctgattaccctgggaaggagggaccaagggaccagccagaggccagtgggagaggaaccatcagggtttccccggaagttatcccagtgggtccatctgtgacccttgtactctgaggtcacctaagcctcagaggtgaggcacctgcccctgcttgtgccaattgctgcacagagaaggagaggaggttcttggcccagggattccagacccatggccagcctcgtggccatgcgatctcagcactaggctgcctgccaccctggtcacaggagccccatcccggcctctgaggaagggaacgcaagaccagacatacaagggagaagctaaagcagaactgaagggatggaaggctgctaaaagttatgttttcaaagaacatttaatcacagaaactttcaaaatattttgtacattgaatagatccgatcaccaagcagtgcatagagtaggatcctaactttgtaaaatatccatatgtcatatataaagaaagacaaatgtatatgtgccaagtaagaagactggaaggaattatgaacagtggttatctctgtgattgattatgggtgtttgtattctggtttttgttattttcaaaattttccccagcacacagataacattttcttacgtgagaaaaaattttttttaaaaagcagggggtggagagcggcaactgtttgctcaagacttttcagtaaggaaaggaacctggggtagaaagctcccccttcagctgcccatgagggcacaggtgggccccacactcactacggggccagggcagggccrcacacctgccacttcctcagcagagaccctagcgcrtgggtcactgctggcccagactccttccacgagcaggcgagkgtgcagggccacacctcatccaagagatgatcacgtttaggtttttgatgaaaagcatagctctcaggtaaatacagcagcacctctaagcatattctgggaggagtgggttttatgaggaaggcacacaaggaacgcccaaatttgcaagtccctttaaaatgagcctgctcagaattgctgtttattccacaggtctgcgcaggcatggcactaagtgtcccatggcacatttggccctcatggaggcctcaaaagggcaggaccagcaccctcttctacggaggaaggaacgggcacagcaggtacatgatgtggtcaaattaacaagaggcagaggccgggtaagtggctcacgcctgtaatcctagcactttgggaggctgaggcaggaggattgcttgagctcaggagttcaagactggcctgggcaaagtttaagaccggcctgggcaacatagtgagacctggtttctataaaaaatwwaaaaattagctgggtatggtggcgtgtgcctgtcatcccagcaactcgggctgargtgggaggattgcttgagcccagcaggttgaggctgcagtgagccatgacactgccactgcactccagcctgggcgacaaagcaagaccatgtatgtctttaaaaaaaaaaaaaaaaaggcagccaggacctgatgccaggtcgacttggctccaaaacctgccctctccttttcacagcctcctttcctgtgaaataatagggaatttctctaaagcgcatcgcccggtccctatgtaaagacaaagaaacaggactttgcacgctcacctggcattagggccagcactgtgctgcagttgtgaagatggccactgggttgggggttgttctgcaccaaatggccccagactccctgtcagtggctacttgttgcagccagtgggcctgagctgaccacccttatttatgctcctgatgtgcagccttgaatgcatcctgggctgtgggaggcaaccaggccagaagatgaccttgatagctgagcactgacccttcatcagctgtgtgtccttacgacctcctccctttctgaggccttctgtatgtgatgtcatttggtgggtggctaaagttgctagaagtctggccaccaggaaggccacgactgtcacactttgtgctttgctgcataaaaagggagtctcatcatgatcctcaggcctgctgtgcacacctgatgggcayagcagcgtttgcgtcttgaaaacattcatttcacaaactcctagcacacccaaaccatgccaggttacacactgggcactgaagagaccacacatttgtcagtttccgaaactctactgcccagtattggaagaagagagctgttaaatcaggtcctgcaatggcagataggccccaagtcctatggcagcagggggctcaggccatgtctcaagctctgggagaaggtcatgggggcagatgggttctctgggttggaagagcctttggaattaaagagtcctatgtcctcatgttgcagatgagaaactgaagcgtgaataagaaaggggacttgtcctgacaccaagtcagtggctgagttggaaccggaatacctgtctcctaacactcaggccattgcctcttccaatctctgctagctgagcttgaagccttagactagtggggaactcaccatcttccagacagcctgggcccaccctttatgtacatgagagggtctcttcctctgcgcttgcacatggaggccctccctggtccaggtggaggggctgctgtcccgcagtgtggccccagcctccacccctgctgctggaccagctctccccaggcccctccctgggggtgcagcacgtgaactccagagaggcgcatccttgggcccatggggaggtggaaccactctgccaggctgtgcctgtggatggggcgggcccaggatctgcttttaatgacacggtttgggcagctggactctgtctgttccagcaggtaaattacaggcttagcaagtcagaaatcaaataaacactccaactcccagtggctgttccaaggagaacagcggtttccgggaacagtggaggccgagacaaacctccccacccaactcagcctaattactgcctgtcactccctgggccagggaccttttctttgactcacagacccaagacacaggacagcgctggtgggcacccagggtgacgccgattttggtggccagcttgttcataactcctagacacaagcaaacactggcagtccccacccttgccccatgcctggccggagactgccagtcaccctgctttggatggaatggattgctctgcagtggggcaggagggggaactgaggtcttattgacaatgcctggtggtggctgtctgcagttctgtgctgaggcctggaggccctgtcctggttcagtgggaaaggtacgtaggttgattactgacatgagccatgggcaaggggagtaggctgcgggggcatttgctctgtgccagcctacactacatgttggagctgctggtcttgcctctgtctcagtgctgagccccaaatgggtcagcatggtagagatggtggagggaactggaagcccccaggattctttgctcctgtgggagtcatacctctttcccaggcaggagaaggggcaggcccagggcaagggaatacacatgacataaaatatccccagtggccaggcacggtggctcatgcctgtcatcccaacactttgggaggccgggcgggtggatcacctgaggtcaggagttcaagaccagcctggccgatatggtgaaaccccgtctctactaaaaatacaagaatgagctgggcgtggtggtgggcccctgtaatcccagctactcaggaggctgaggcacgagaattgcttgaacctgggaggcagaggttgcagtgagccaggattgcaccactgcactccagcctgggtgacagagtgagactctatctggaaaaaaaaaaaaaaaatccccagtggcttcgtggggatgtccagcttattctttttctaatatgctaactgcaccctggaccaaatgagaagaatcccagaacacactgtgctgagaacataagcgtgtccaattttgcccagaaatggccagtgttgtacctgggaagaggcagagcccttctcctcacacctaaaccctctggtgaatggagaaaagctcgggtcagccaacctcagaccatccggggccagccacagtctgacaggtcctaagataggacttctgtgctgactcactccagacagtgcagtcagcacaggctctgaggctgctgtgtgccttaggccaccaaagtgtcgggcagagtgacagccacaaaccccaggggaggggcacagaggtaccgagaaaggaccagaagcctgacaggaagtaggcaccgagagtgagggcccctgacactcctgcttgagctgtgacagcatttaagggttttctgcctctgcagggcccgatccagatgagaagggtggctgcagtagggctgggcgggctgactcagtggcagccgcaggccttgaccaccatgttgcggtgcttgcgcaggatgacgttgttgctgctgtcatagtagagcacagaggtggcgctcagcttggtgggtgcacagcacgccttggggactgcgtttggcttcatcaggtgcacctggccaggaagggagcacaggcaggggcatgaggccagtggcctcctctgaggacccacctagccccgccccagctccacctgctccctgccctggccatctccaagccacatgggagcagcacaataataagaattattaacaggaataagagcagccctgagagctctgggagcgggagctgtggtagcccacagtgcccagggagggatacatggcagccccagggtgtggggcaggtgggcagggcactaatgaggggcctcgagtcccaggccaagggctcagacttcctcctggggataatgggaaggagaacctcatggccaggtttgtgcccttagtgaggtccccaagggggaacctggaaggaccactgtcttcttatagcccttcagacccccccagaggctctgcctccccacaccctggcctccctccccaggctctgggaggccaggcctcgccccctctcctgtgctgctccttctcccagaggactgcatccgccctcagcacttcaaggccctgcatgtgcccgcacctctccactcccctggctcagcttggacctctcttctgaactccagacttgcggatcctgctccccttcccacttctgcacttgggggtctaatgaggcctcagtggaacatagaattcctcccgccctgacatcatagctcccgcctgggaggcctcctggatgactcctttcgcctcctcccttccctgagagcagcccctggctcaacctccacctccgtgctgcctcggaccacctgcccagtcgagctgccatcacctgccaggtgaccacagcagccctcactcatcccctgctcctctgccttccactcccgcgaccatcagcctccccaagccagaaaggtccttctggagggtgacgcagaccaggacactgctttgctgaagacctctgacagcctctggggttgcttggaataaaatccaccctccttcccagggaaccccaggccctacgggagctggcctggctcaccccggcatcacctccctccactctcctccccttcactgcacccagcccctctcctccctgctggccctgaacttagggccagcctgctcctgtcttagggccttgcacttgctccttctggaacattcctcctccagctgctgacgtgcccctccttgtgtggagaggctgggcccagtctcactccactgacggcacggctgctctgctcttcctcacaggaggtgtcaactccacggttggtttgcttctgtgcccaccgacagcctcccctagagcacagtgcctgtttgctgccctgtaggctgtgagcactcactctagttgagcccctgaggggcaggggcaagggcagaggagatggagtccgggagctgcaggtgcagtcaccttcccatgtacctcccacacatgcagctgtgagaaccacacggcataaagggtggctgggccaggccaccccacgcgtcctcatcacccctgggcctttccaaggagatggctccaggtgtccagcaaacaccatttgactgcccagaaaggaagtattatcataggctcagagcagcttttggtaatttctttcctctcacaccaaggcattgtgtgcgcacgtgtgtgtgtgtgtgtgtgtgtgtgtgtgttttaatttttattttagagacagggttttgctgtgttgctcaggcttgtcttgaacttctgggctcgtgtgctgcgattacagggtgagccactgcgcctgatcaaggcatcaccgttgaacctcctaagaggaaaacataaggctgtgcaataccaggaactgggattctaggtaaaaacttctagaaggaagcctcggtgccagaatccgcaaacacacagagcactcagtggtgagcagcaccagtgatcccatcagaagcctgcttttgtcctttaaggttgccccagacaccaaggcatcaaaagccaggggatccagaaaaaacacagacagccaagagagaaactgcgggaaaaagccaaaaggttgagagccacaccatctagaagcttcctgcctgtggtgcggcacaggtgggtgagtgcacacgcacaccccacacactgtgcgcacatatcacgggcggtcagacttgccagcgtactcgggggcccgtgtgttaagatcacacagcccccacacagtgtacacatctgtttcatgtgctgtgcctctgagcgccgcacgcaggtgtgtaagtgtcccacaggagtttgttcagtgcatagaacaggcatgcatacgcgactgttcacgtgtgtccgtgtttgggtgtgggtctatgtgtagtagtgtggctgtatgaggaccagttcctgcagagctgtgggaagttagcgacgttactgactctgtgcagacaaagcccccgagacatggagcaggtggcctcactgccctcccggctggctggaccagacccctctctgcagggcctcccaccccagggggctgggcaggatgggcacggtactgaccagggactgcaggatggcgtggttggtggcgttcatgcaggagtccagcgggaaggagcactccccctcacagtaataggctgagtagccttggggggcgatgacccagtcctggggggcaagggagaaggtgagtcccatccatgtgctcctccctgagcctcagggcccaaacccatcctccagccctgcagggccgtctcccccaagaggcttgaatccacccaggaacccccggcggaaaaggctgggcaggagctcaggcccaacaacccccatcttcactttgtgtcccctccccagccggccctccccagctggccctcccctgcccacacctcccagagctgcagtcgtagccaatgcagggaggtctcagttaccctgcggcaatgctgacagcttagttggttgattcagtcttcattttcatggttttaaaaaaaacaaaaaacacaacaacaacaacaaaaccctttctcaccatattctcactttagaaaacttggaaaacacagaagaaaaaaatacataagaaaattgaagtcaccatgattctatgtcctccctgcagattcacttctgatctacaggtggtgattgtcatttcagaaacaaggagagtcagcaattaccagccagccaaggtcctggaagctgacgtagagctcgtgccgacggcagacctgccggccgtgggagccgtggacgtcatctgcagggacagaaggggcaaggtcttttctggggttcctactgtgtgcagctactatggggtaccagggtgggggatgccctgatgagcacatttgtcaaataaatgaatgacaggaaaccatttggtctcataaagcccatccctggaactctgcttgtaccatgacccagctcagaagcctgccatggctcccaatggctagagtgacactgtgcccagtcctcccctgtccttcagcctatgagcgtctttatgctccagtaaacagcccagcaggaccctcggccatcctgtgcctcctcctctctggagacccctgtgactccagcccaccctctcctgccacacccattcccgaggttcaagtggctcacgaccaggccagtcaagggccgactccctgggaaggagggcacggggttgggtcaggcctgtccctgatcctgaagggcttggcccagttggggagaaaactcgcataagcaaccgaggatcccacagggtgcccaggcacaaccgcaggtcatgaggggctgcggctcccagggaaggggcagctgattctg

SEQ ID NO: 96578 - DNA, 27069 bp, Homo sapiens
tggtggagggaggagttggggctctgagggatggaccacaagctaagcagggctctggtactcactcacataggctggagggcagcatgcggaccctggtcgggctcctgaccagcaaccaggccctgctgcagcttgaggcggctcggtgcctgcatgagctctctcactccgagcagtccactgttgctgaggcctgcctgccagccacttcttacctcctcacctacctctccagtcacagctcagacttcatagtaagccctgtcccttcctatcttgttcttggtttagattttaaaattgtgcttttgggaccagtttgagctggcaggtaggaggaagaaaacatgtttgcccttatgcctacagccatggctacacccatcatctccccaccctcttgtgagccgcaaggatagctgctccagcgtccccatcacctcccctccccatctccccacacgcagcctggcatgaaacaggccaagcccagtgcttttgttgcctgttctcaggagctgtgtctgtatacactgggtaacctgatcgtggagagtgaggctgtgagaaggcagctcctgccacagggcattgttccagccttggctgcctgcatccaggtgactcctttcttcctccctgggcaacccttcctttgctcctccccacatgctccatctactttggttaggtagctccagcctctgccctgtgccaaggggctgaaagtctctgaagacctgatgacccagcttccagtcagatccttaccctgtctacttccagtccccccatgtggctgtgctggaagctctcggatatgccttgtcccagcttctacaggctgaggaagctccagagaagatcattccgtgagtaaaattgtctttagatgtgcagccagaggtgacccactcagtagtatagctcccggatgcctgaatgatttccaaagctgttgcacattttaaattcatgtgtctggctaggaagggctttgggtttggacactttcccatctgggcagggctttgggtttggacactctcccacctgctatcagggtttggtaagaaccactggcatcttcgtggttcctacttacagccctgcttctgccagcagctccatcttggcctccactctccctcagcacatgctacaaatgttgcaacctggcccaaagctcaaccctggggtcgctgtggagtttgcctggtgccttcattacatcatctgcaggtaacagggcaattgggaaagtaccacagatcttccctggggctcccttccatgacattcaactctttgaacttgtgtctggaattgctatagtgagttttcctccctccactgtcttctctttttggagcccaggagacccacagaccttagctgtttctctttttttttgagacagtctcactctgtcacccaggctggatggagtacagtggtgcgatctcagctcactgcaacctctgcctcccgggttcaagcgattctcctgcctcagcctcctgagtagctgagactacagatgcgtgccactatgcccggctaatttttgtatttctaatagagacggagtttcgccatgttggccaggctggtctcaaactcctgacctcaggtgatccacccacctcagcctcccaaagtgctgggattacaggcataagccaccacgcctaggcaactgcttctcttcttaaaggtggaattgactatatacctagggactgcttgcttcctgttgcccagccaggtcagcaatcctctgctcattggccatggggctctgtctactctggggttgctgctgttggacttggctggggctgtccagaaaaccgaggatgcaggactggagctggtaggtgaagatgtcaggtgaaattctgggagatgtttcttgatactctggaatgcaggtaacctcttccttcttacacctgaccccccaatttgtctttgcagctggcatgccccgtgcttcgatgtctaagcaacctgctaactgaggcagcagtggagactgtgggagggcaaatgcagctcagagatgagcgtgttgtggcagccttatttatccttctgcagttctttttccagaaacagcccagtctgctccctgagggcctttggctcctcaacaacctcactggtacgcaccataatctgcccaggcctggacatttggataatggggatatttcctcatggcctaggctgaggtgggtagtattgacaggggtggtgggggaaagcagtttttcaccctggtacttctcttccagcaaacagtcctagtttctgtacctccttgctctccctggatctgattgagcctctcttacagctgttgccagtatctaacgtggtgagcgtaatggtatgtattggggttacttgaatccaagatctggtagtcggattgtatgggacagcagtcctgagccctcagatgtacccttagttgagagccagcaggtggtggtgtgtggcctcagggcccaaccaatctaggtgtgtgtcccttaaactggattatttatccttggacaaatcaactaaccaccttaagcttcagtctcctcacttataactgaggataatcttgcatcatagggtagttgtaggagtatgagaacatgtatgtagaagagcttggcatggtgcctgggcatgtggtcaccatgtcatatattttagctattgttatgatctttgtgtttcattctttgtagactatatatgtgtctatctgcaggtgctcacagttctgtgcaatgttgcagaaaagggtcctgcttactgccagcggctgtggccagggcccctgcttcccgccttgctgcacacactagccttttctgacactgaagtagtaggccagagtttggagctgctgcatctgctgttcctgtatcagccagaggtataggtttctggcccacatcctcagtcacccctgttctgaagccacacagtggctcccttcccatccagtcctaactatagttgtttctctgggcctggctaacctatataggttccatgtcagaaacttcatcctcttgttggggaatgcaccctctggagtaggctgacccatgaggctgtgggaattgagtcttaggacacagagaccaggtgtgttgaattttcttccctgcccctaggctgttcaggtcttcctgcagcagtcagggctgcaagccctggaaaggcatcaggaagaggcccagctccaggatcgtgtgtatgctctccagcagacagctcttcaagggtgatcttgtttctcaatgtcactcattcccctctctcttaacatcaagcttgtttgtccagtagagcctttggagatttaggaccataatgaggtctcatgttctctgctcccacacctaagccaagacctttgggtcccagctcctccccttccactcagcactatccaggcaggaggaccaaaagggactcagtgtggtctacttactctggggccctagaatccctgcccccccgccacccttcatgtttgcttcagcagctggtagcttttgatgagacagaataaagttttatttttatattaagctactttgcctcagtggttgcacagtaaggggtagagggtagatgaggacaagaacaccctgagaaagtattttacagcacaagctttatgaggaataggagaacacatttttttcacattatactaagtccagcagagcccaggctctggggctgttgctcttaatcctcagtggaggcttcaggctttaccacttagaacgttctccagggctctggttacctgatcagcactgaagttgttcaaagggacattcgtctcttggccaaatgctgaagagagagagggaggtgtctttaactattctgcaccctggaggctaccaaagtaaaataaaagatctttgtctttatcttagtcttgttaagacaggaagagtattaaagagatatgatcaaaatacatttggtatgcctagaattaatacaataggtctcaaacacatctaggaagcccaagtccaaatagaattttggctgattctggatggccgcaatgggttgtttcagggaagctttcgggggcactgtaggcatttattattaactacggtgagcaatgtattgcatgggtccagcctcagctgggagcccattctctctctttttttttttttttttttgagacggagtctcgctctgtcacccaggctggagtgtggtggcacgatctccactcactgcaacctccacctcctgggttcaagcaattctcctgcctcagcctcctgagtagctgggattacaggtgcccgccaccacacccggctaatttttgtatgtttagtagagacggggttttaccatgttggccaggctggtcttgaactcctgacctcaggtgatccacctgcttcagcctcccaaagtgctgggattacaggcgtgaaccaccgcacccagctgggtacccattctctaggctcccataggctatctaacataatacccagcacaatacactaaagttactcgtgtctatctcctcctgtagtctactggcttttggaaggagaagcttttttccttctccaattattagtgcatgtctaatgtctactgtgtctcacagatatctactctgagaaccaatctgcttaaggtggtcactctcctccacctcctcccgtcattcccagggcaccatatagttaaaagctgtgattaaaatcctgttattcagtatgtataaacatttattgcatacctacaatgtgttaggcaacatgataggaaaatttcattttgcaatacattgccatgccagtcttagaggggtaagtgcattctaggaaggggaataaatgtaaaggctcaatcctgttaaactctagctgcatctaaagttgcagctagagtttaacaatagtgcaaaacaaagttttgattccgttttctaatctctacagtgagaaaagaagaacacgcttcctcctaactaatgaagattaaatgagttaggcagggaagcactcagcacagggcccagctctatgtgcaaaattactgagattctcacacactacctggactgacactggctacacgttatttggagaaactatattgactaacttctctcctgtctgaagcccattcttaactacaaaaacgtcagctcctggtccctacgcaggattcggtcagcctgcatacttatgttgcccggaatacaacgcatcatataaccctgcgaatataaatttcttcatggaaacaagatcaacagcaaggctaaagtccgagttctagtttctccacgggtttctgcacgaccttgggcggtcccttctcttctcaaacccttgttcccctaccggagccccagacccctggcgtcccgcactcaccgtagcgggcccagagcttgggctgcacatcggagcattcgcggattaggatgggtaggtcgggattcgccttcttcagctccacgtagcgtttctcaatgaagtccctgcggggccggagagagcgccgcgcgtgctgtgggcgggggcttccctcaacttcagggaggtcgaggtcgtgaccctggcgtcccgaagcccgcccgcctcaccacgccgcgcctcacctgacgccctggctgccgggcgagcgctgacataagtggatgcgaatctcacgcaggcccagctttgccccgactcctcgacttgctgcggccgccgccatccttgttaatatcgaagtcgccaattccaggtcttcaggccaagtgctccggtctgaccaaccgcggaccctaaagcctagcccataggctgcatgaggcaggggcggggtaaagcttggccaatgatataaaagtattgtaggaccgctgcgaggtcaatttctttgcgctcggggttggtcggagggaaaaacaggaagcggaaaggctgcgaacgcaaagcagtgtgggttgattctgaggtgcactgtgggaaagagcttgtcgctgcggtgttgytgttggagactcgattgttggtgacagcgaaagaacgataacaaaatgccggagcgagatagtaaggctcaggccatccgttatttcttccccatggcacttggggcacttggcgcattattgtagcttctgagcttaagccgggtgtgtgtgtgtgtgtgtgtgtgtgtgtgtgtgtgtgtgtatgtrtgtatgtgtgacgcttgagcccggagaagccacagggtcctaagtgaggccgacagctccaaactccgtccccagtcctcactcctactccaagtgatgatgggcggcttttgtgcgtggatcgctttcccccagtcctgtccccatacttaatcctgggttgcgcgtatttatcttttacgtagtattttagacgtgatcttccggaagtcttctctgatcctccagcgcaggattagggtcctctgctttgtgctcccacagcttcttgtagtttcctatttcagcacttattacatygtgttgacactgtcgctgttctaacttttgttctgtattgttcactactatatctcaaatttttgcataggatctgacacgtaagagactgattaaattaacgtcaattttttttgtcaggtgagccgttctccaaccctttggcccccgatggccacgatgtggatgatcctcactccttccaccagtgagtattttgtgctaggaccatggaaatgagttgggcaatgaatagaaaagtggtggtgatggtgaaagaattctgaatgtcttgtcatcaaggatggtaaaaaattatacccgctggccctttatctctgtgagccttaactggatcaggccaagtgcataagggtattagaagggaaattcctgcaggaaaggtgttaagtttttttttttttttatacgtgttgtgtaattacacattatataggaattacttcttccaatagcaaattaaaacataggaaataagggtaaaatcatctttttattttttttgagactgagtttcgctcttgttgctcaggctggaatgcagtggtgcgatctcggctcaccacaacctccgcctcccgggttcaagcaattctcctgcctcagccttccgagtagctgggattacaggcatgttccactacgcccggctaattttgtatttttagtagagatggggtttctccatgttgatcaggctggtcttgaaatcccgacttcaggtgatccacccgcctctgcctcccaaagtggtgggagtacaggcgtgagccaccgtgcctggcccccgataaaatcatctttgataacatccccaattccagtccatttcttttttyttttcttttcttttcttttctttctttttttttttttttgagacggagtctcactgttacccaggctggagtgcagtgatgcaatcttggctcactgcaacctctgcctcctgagttcaagcggttctcctgcctcagcctcccaagtagctgggactacaggcatgtgccaccatgcacgactgatttttttttttgtatttttagtagagacagggtttcactgtgttcgtcaggctggtcttgaactcctggcctgaagtgatccacccgcctcagcctcctaaagtgctggcattacaggcgtgagccaccgtgcccagcctcagtccttttcttagaagtaaccacagttaccttttttggcatatcttttcctcccgttgcccaggctggagttcaatggcattatttctgctcacagcaacctttgcctcctgggctcaagcaattcttctgcctcagtttccccagtagctgggattacaggcatgccccaccatgcttggctaatttttgtattagtagagacagggtttcgctatgttggccaggctggtcttgaactcctgacctcaaatgatctgcccgtctcggcggcccaaagtgctgggattacaggcgtgagccactgcgcctggccctcctactcttttttaaatgcatttatacacatacatgcatatctgaggaaaacacaacattgctttgtgatttaaaatatttgagttaaatgatattatgctgtatatatcatttttgcaacttgcttctttttaaaccctgctcagtgtttctgagattatctttcagagcagtgacaagcattccctccttggctaaactttagtcaggttccccaaagagtcccatttttcagcaggactcatccgtggcctgctgagcacagttttaacaaagaaatcaaccaccgctccacccccatacctaaccaagttgcttttagtaattttctataaattctcacttgtccctgttgtattcrgaattaagttcagtctctctactctattacaatggtcttgactcttgttacagtagtcttcaataaagtcttccttggggagaagaggaacttgattagatatcaagttggattggatatcaagagtgggaaaactttctgtgaactgacttaggattcctttttaaaactgaggtcrgcaggccaaggaagagccctagtcagaagagagctttaaaggagtctgactttaatttgatcaagagaggagtctttgttagtgtaccaattaaaataatctcttgtaccattagtgctgtctttccctctttgggaaacaccatcatagtttagtcagtctccagctaataaacgcttagtctgtttcagactgattcttttcttttttttatttttttgagacagagtcttgctctttttgcccaggctggagtgtaatacctagatctcggctcactgcaawctccgcctcccaggttcaagcgattttcctgcctcagcctcctgagtagctaggattacaggygcccaccacaacgcccagctaatttttttgtatttttagtagagatgggatatcaccatgttggccatgctggtcttgaactcctgacctcgggtgatccgcctgcgtcagcctcccaaagtgcggcgattataggtgtgagccactgcacccggccagactgattattttcaaggctataactgaattaaatttacaggccttcttatatacatatgtcagtaatggaccaggctaaatataaataaatggagttgctggctcataggatatatatacttaaattttaacaaatactgcaaaattgcccttcaaattggttatactggtttacattctcatcagcattatatgagagagtccccttcccaaattctcactcacacttgatttatcaaactttytggtagttaacactctgatgcattaaaagtggcatggcatatctggtcgggcgtggtggcttacacctataatcccagcactttgggaggctgaggtgggcagatcacctgaggtcagaagtttgggaccagcctggccaacacctctaataaaaatacaaaaattagctgggtgtgttggcgggcacctgtattcccagctacttgtgaggctgaggcaggagaattacttgaacccaggaggcagaggttgcagtgggctgagatcatgccactgcactccagccggggcaacagagggagactctgtcttaaaaaaaaaaaaaaaaagctgggtgcggtggctcatccctataatcccagcactttgggaggccgaggtgggtggatcacaaggtcaggagttcaagaccagcctggccaatatgggtgacagtgagactccgtctcaaaaaaaaaaaaacagtgtcatatctttgttttaatttgtatttccctgatttctgttaatttaatcatgatttttacttgttcctttttcatttcttattgagtcctaatatttaaaatctttgccttttcttctagatcaaaactcaccaatgaagacttcaggaaacttctcatgacccccagggctgcacctacctctgcaccaccttctaagtcacgtcaccatgagtaagtctttgggtgatccaacctgtctcccaacttgtttcttgctccttcctatttctttctactaagtagaatgacttttaatagtccctcaggtatttatgatactctctaaagtttgagaactgcccacctacaaatattgrtgtggatttctgcttgattgaaagtgttactttgatcagtattctaggtctttctaaaaatcctcaaggagacttcttggggtttctggggctgtggcaatattttgctatcagtgaatttctcgtctcttctaggatgccaagggagtacaatgaggatgaagacccagctgcacgaaggaggaaaaagaaaaggtgaaggaagggtgaagggttttagattttaaggtggatagtgtttaggggaaagaagtaggggctaattatgaagctagaaactaagattttgtcttgaggctctctactttcttaatgaaacagagtgatacttagagtggcagtagagggctttggaataggcctatctatattttaatctcatcttcgctagtttcttggtggataacctagacatttgcttagcctctctaatccacagatagaatggagatmcagtagcaataataacttttatcaggatgtcatgaggatcagctgtgaaagtacatgtaggcatttagcaccaatgcctggcatatggtaaccacccaataaatcttgacggccatcatcattattatatcatcatcgttatttatatgatacgaaagtttcaggacctggtacttggcttttcctttattctgagagtggaccagcaaataatacgttcttttcagctgaaatttagaaggtggtaaaaattcagaagattttctgatttttgtgtggaaaagtcttatatctatagagaattggtagagttgggtggtattaaaaagttctgaagtgacagatggagtgtcccaagttggcactggaaaagtatatctataagctggaagaagttgtagttctgattttgagtaactacgaagaggtggccagcagttctatcaggacagacatgagcttttccccatagagagtasgttggagatgtagggaagcaagcaggaacagttctgttgaccttgaggtagcagctgatgagccttatacatttgcctttctctggtcacagttattatgccaagctacgccaacaagaaattgagagagagagagagctagcagagaagtaccgggatcgtgccaaggaacggagagatggagtgaacaaagattatgaagaaaccgagcttatcagcaccacagctaactatagggctgttggccccactgctgaggcgtgagtactgagggaacagggcatggttccctcagcatccgagagtcatgcaaatacaatgtgaactcttcctcttactttcctgccctggagcctacaataagcgatttcagaggcatttgccacccacaaagggctgttcttttttttttttttttttgagatggagtctcgctctgtcacccaggctggactgcagtggcacgatcttggctcayggcaagctccgcctcccaggttcatgccattctcctgcctcagcctcccgagtagctgggactacaggcgcccgccaccacgcccggctaattttttgtatttttagtagagacagggtttcaccgtgttagccaggctggtctcgatctgacctcatgatccacccgcctcggcctgctgaagtgctgggattacaggcgtgagccaccgcacctggccccccaaccccctttcccccaccccctttttttttttttggagacagagtcttgctcttgttgcccaggctggagtgcagtagcgcgatctcagctcactgcagcctccgcctcccatgttcaggcgattctcttgcctcagcctcccgagtagctgggactacaggcgcccaccaccatgcccagctaatttttgtatttttagtagagatggggtttcaccatatccaccaggctggtctcaaactcctgaccttgtgatctgtccgccttgacctcccagagtactgggattacaggcgtgatccaccacgcctggacagtactgttcttatgtggcctctttcattatacagggacaaatcagctgcagagaagagaagacagttgatccaggagtccaaattcttgggtggtgacatggaacacacccatttggtgaaaggcttggattttgctctgcttcaaaaggtgagtcctggtggtcaggtggggagtaatactgtcgtgctgaatgctcttgtatgggtctggcaagatgaggagggagattcctgagagttcagactgagtagaagaagggctaaagatggcccctctgaaaagctgattgctactcatccttcaagtatcaggccaaattttatttccttggagaaaccttccctgatcacccaggtgtggttaagcacttcccttcacctcctgcttcctgtacctttgcatagcccttctgtttcatttaccacagcagttattgtactttgttgaaattgtttaatttgtctgtctcatctgctataagctccattagagtaagaacaatatctgtcatgtttaatattatattcttagttcctggtacagtgtggtgtagtggatgttcaataaatatataaaatgagtgtcctaaccctgcttgctttcctgttaggtacgagctgagattgccagcaaagagaaagaggaagaggaactgatggaaaagccccagaaagaaaccaagtaagtaaatattatggaaaggttgagaatttagaaaggtgggacctaaagttagagcacatttagcaaaaataaaacttttttgtcttttcaggaaagatgaggatcctgaaaataaaattgaatttaaaacacgtctgggtgagtacagtttctatactagtgactatgcattctggawgaattgtacggaatttaatgctctgggaaggatatgcttctcctttcccccaacctcctttcttctttctttctttttgagacagtgtctcacttaatcgcccaggctggagtgcagtggtgtgatcatggctcagtgcagccttgacctcctggactcagcctcttgtgtagctggcaccacaggcatgtgccaccatacctagctaatttttttttttattttttgcagagatggggttctctgtgtattgcccaggccggtctcaaactcctgggctcaagtgatcctcctgccttgacctcccaaagagctgggattctttcttgcccccaaaacaactaactcccataaaatactctaataagactcagacatagatttaattatttcatatgtcatttatgtctcctcaggtagattgaaagatttttcagtttggggcttatgagttaaaagaagtaacatggttagtgattaaaagttcaaaayttggagtcagagagacctgagtttaaaccttgatgatgaaacagcactaagtgtatgattttaggcaactgactttgctgtttgttcatctgtaaaaattgggttactatttaccacatgactttattgtagggatgaagaaaaatgaaatctataacatgcctatcatattgagcaggtagtagagctgttttttccatcatcatcaatattaccttaaacttcatccttcttcctcacaggacttaatacaatacaggtgcatagtgcccttgaagaggcaatgtagaagagtggacaggagcccaggctttggagttacatggcctggttccattctttgctccattacttagtagatacatgactttaggtaaattacttaaatctcagccatagtattcttatcagtaaaaaggataataatatccacttcatagggctgttgcaaagattaaatgaygcaaagcttgcatagcacttggcatggtggctagcrcagagtaagcacataagtgacagctrttcttgtagatcctggctacttgctgctcttctccttattgtaggccgcaatgtttaccgaatgctttttaagagcaaagcatatgagcggaatgagttgttcctgccgggccgcatggcctatgtggtagacctggatgatgagtatgctgacacagatatccccaccactcttatccgcagcaaggctgattgccccaccatggaggtgagtgaatggaatcctgagagcctatcatgtgagcctcaagcctgggaatcagcctggcctctgccccgtgtcccttgtccaccatgtcaccaagtgctgttcacttttacctcctaaatctcaactgaatccattcacttttccactttttcaccaataacattccagtctaagctataatcatttgctggaactattaacttactatttttttagagaccaagtctcactctgtcacccaggatggagtgcagtggtgctatcttggctcactgcaaactccgcctcccaggttcaaacgattctcctgccgcagccttccaagtagctgggactacaggcattcatcaccacacctggttaatttttttatttttagtagagattgggttttaccacgttggctaggctattcctgacctcaagtgatccatccgccttggcctcccaaagtactgggattacaggcatgagccactgcgccagtcctctggagctattaaaaaggcttctaattggtttccgcacttccactctggtttccgcacttccactctgatttgttattatatcttgttattgaggtgttattcacatgccatataattcatcctttaaagagaatttttttaaaaatttttgtggatatatagtaggtatatatatttatgaggtacatgagatgttttgatacaggcatataatgcataataatcacatcatggaaaatggggtatccatcccgttaaacatttatcttttgtgttacaaacaatccatttatactcttttagttgttttagaatgtataaattattactgcctatagtcaccctgttgtgctatcatgtagtaggccttattcattctttctatttttttggtacctattaaccacccctacctcccctacccttctaaaatatacagtttggctgggtgcagtggctcacacctgtaatcccagcactttgggaggctgaggtgtgaggatcacttgaggttaggagttcaataccaggtgggccaacattgtaaaacctgatctctactaaaaattagccaggcgtggcggcatgtgcccgtaatcccagttactcrgaaggctgaggcatgagaattgcttgaacccagaaggtggaggttgcagtgagccaagatcgtgccactgcattctagcctgggcgacagaatgagactctgtctccaaataaataaataaaatgtaaatttttgtctcactacagtttagaagcttttagtagtatctcattcttaggataaagagcaaaatctttaccatgactttgagcctctgcaacatctggcctttctagaatgttctagactcctgactttcttgaatggtcttgattcattttgatgcagggcttttgtgcaggctgttttatctctggaatatcctttcacrgcacttcstttccctcccttcacctactgtattgtaattcagtctttagtttgttaagtgaatgaatgaataaatgaagagatttctgctgagtggtttaacattcttgtttcttggtattttcaggcccagaccacactgaccacaaatgacattgtcattagcaagctgacccagatcctttcatacctgaggcagggaacccgtaacaagaagcttaagaagaaggataaaggtacctggagggttagagagagaarccttacccacagaggacgtttggggataaaaccaaggtctcctggagctttctgtctccagaatattgagaggctcctgggaagcagagaaaaatgggagtactggagcattggcaaggagacagttacagccagattctgtctccttaacctacctaagaagcagtggtcaggtctgaagcatgagggatggagagtgggtagcttatgtcctatttatttattttttttaaaagagattttttggtgaaaaccagaaaacctagacagattctaaaaaggctctaatacttgaccgacattttattttattttatttatttattttttgagacggagtctcgctctgtcacccaggctggagtacagtggtgcgatgtctgctcactgcaacctctgcctcccggggtcaagcgattcttctgcctcagcctcccaagtaggcactataggcactataggcacgcatcaccacgcctggctaatttttgtattttcagtagagatggggtttcactgtattggcctggctggcctcgaactcctgaccttatgatgtgcccacctcggcctcccaaagtgctgggattacaggcatgagccactcttcctggccttattttattatttttatttatttatttattttgagacgagtctcgttttgtcgcccaggctggagtgcagtgatgccatctcggctcactgcaacctctgcctcctgggtttaagcaattctcttgcctcagcctcctgagtagctgggattacaggcacctgccatcacacccggctaatttttttgtacttttagtagagatggggtttcaccatgttagccaggctggtctcaaactcctgacctcaagtgatccgcccgccttggcctcccgaagtgctgggattacaggcgtgagccaccgcacccagccttgacccacgttttaaacagaagatgtttaaaagggcattaagagctggagaggatggtgaagttcagtggaaattaactgaggagtatgttcctgactcctctctttaaatttcagggaagctggaagagaagaracctcctgaggctgacatgaagtatgtatcctagcccctggcatctgatcagagggagggggtctgtacatttcttgtgtctggcattttggggaggtgctgacatgagaatctggagaaatggtcagggggagtgaaggtgtatgtgtgaatttggccagctagtgakctccattttcccagtatttttgaagacaytggggattacgtaccctccacaaccaagacacctcgggacaaggagcgggagagatatcgggaacgggagcgtgatcgggaaagagacagagaccgtgaccgagagcgagagcgagaacgagatcgggaacgagagcgagagcgggaccgagagagagaagaggaaaagaagagacacagctactttgagaagccaaaagtagatgatgaggtgagatgtgggcccttagtaccaggtgatggagttgcccctctctggaaatgtgagcaaggttgggtaaggaattgtttcaaacttgggggagggatgagtaggaatctctcatggtaacactaacttcacattttgtgttctttccagcccatggacgttgacaaaggtgagttgtacacacagcatctcacagttgctctagcagtcctgctttcccctggtagggctcagagctggcaacggtgggattgggggacctcctggttctgggttcttgtaagaactgtgtcttgctttattgaataggtggagttccctccaccttcctgggccatggcagggcatatttgctcttagatataattcctgtggccctggggttctgaggaggtgaggtagaggtcaagtatggaatgttctggataccctaccctcatctcaaccagagtgactcattaattggagtttgtttaaaactttgttagacaaaagggttctatgccttaaaaatgttttttaagtgtgttgtggggaggaggttgtgagagcctcagttcaagrtctgggctgagttctcttttctcctaggacctgggtctaccaaggagttgatcaagtccatcaatgaaaagtttgctgggtctgctggctgggaaggcacagaatcatatcctttattttaatacgttcctgggttccagagaactggtctctttactccaacccccmmtgcctccctgctccctcctaccctgcccctctccttcccttttaygctgaattttgacagaatgaaaccatcccttgttccttcccagagcacccataacagctcacagcccactcagaattttcatgttggggcttctagcccttggccccctcctggctgaagctttacagcaataggtagaatcctgtgtagtgttttctttaacatagcatatgctgaagaagccagaagacaaaaagcagctgggagatttctttggcatgtccaacagttatgcagagtgctacccagccacgtatgtgaaacctggttaaggaagggaggctgggatgattgggaaacaagttgggggtgaaatggaaatttgattcgctaagtcccagggctacttcttttttttttttttttttttttggagacagagtctcactctgtcacccaggctggaatgcaatggtataatctctgctcgctgcaatctccatctcccgggttcaagcgattctcctgcctcaccctcccaagtagctgggattataggcatgcatcaccacacctggctagtttttgtatttttagtagagatgaggtttcaccatgttggtgaggctggtcttgaactcctgacctcaggtaatctgccctcctcagcctccaaaagtgcggggattacaggagtgagccactgcgcctggcccaaggctacttcttacttggatgaactattttattaggctctaagtgggaggtctagggggtggtcattcctatgcagataacctcttagtcgggtaggtttccagatgaagcatagsgtcagggtatgcaacatctgtttaactcttgcttctccttaggatggatgacatggctgtggatagtgatgaggaggtggattatagcaaaatggaccaggtatgtagttagaaggatggtgggcgcctttgggcagttattatttgttttacatgtatctccttccccactcctaaaaaatctatctcatttactggrccccaccctcctttrgctgcagcagtagaaacagcagcattgagggtcatgagcagcttaactatttcagagtctttgcacaagatcaaatgacatagggtcaaaaatctattttttacttcctatagcaaagtgccaggctttgattcccatggtaggcagtaarcaagcatcaatgcataagtagaaagggcagaaaaaattgcagtctttggaaaataactaaattttattctagccaggattgaagttttcctctaagtcttaagcaaaattaaaaagaaaaaaaccactaatgccactaatagtgaagaagtctgtgttcttcccctgagttcactgtattgaaatagcatggtttaatcttggagccttgtttaatcctgcctctactgtttattagttttgtgaacttgccaagytctttcactgtttatgcctcagtttcctcatcaggaaaatggagagaaatatagttccctcttcatagattttatgagaattaagtgagatatgcatttagtgtacagaataatgcctgtcacatagtaagtatgtaataagcatttattattacttatcagggtatgatttatgaattgtggaacctgggattatgggagagtctggcttcaatcaagggctgaaattccatttccactgacatctcttccttccccatcccccrattctgtcctgcaacagggtaacaagaaggggcccttaggccgttgggactttgatacccaggaagaatacagcgagtatatgaacaacaaagaagctttgcccaagtgagtcggtactgaatatgggcagggtgtgaggaggggtgtggggatttggtggaatagtgcatataaggttagagggtgtggtctrgctgagatgttccccactaagttctttgcccacaggactctgggaaaacctcgccactgctatgcaatctctgatgcattctttcccaactgcttttttcagggctgcattccagtatggtatcaaaatgtctgaagggcggaaaaccaggcgcttcaaggaaaccaatgacaaagcagagcttgatcgccagtggaagaagattagygcagtaagtaggatggccccttgggtgggagggtttcagctgggagaagacattagcctgcagattcaggaacaggcaaggggctggagagccatggaaatgagaggtcagccttgggcctcaggtgagcttagatgggcagcttggtgatagactatcctgttgtttttgcagatcattgagaagaggaagaagatggaagctgatgggtgagcggcattattcttcctctgtgggactggtgggaattgcttagtgtattgatcttatactgacccatttctccttccattgcagggttgaagtcaaaagaccaaaatactaatcactagttacaaccagagatgctccacaaggatatgctccccackgwtttctttctacaatttccaaaggttgcaagatgtttttttgtggatgaatataaaattttattgtgtaattacttggttccattaaaattggttaacttgctattttcttkgttgagcatgtcccctccagtgcccttgaagcaccaagaacactaattccactggttgtgtaaaatcacatgcagaaagtcatcagtcctttcctgagctgtggttctagattcctagacagtaaggatgctctctagccagtgtgcccagtagagaagagaataatgatcctcactgatgggcaagaggtggatagaggaatgtaagtatgattggtctcaaatgtcagactcattccggcccatcttcaggcctagtccctggggaaagatttcctggggattgctgtcagcctgatgggctgctaatctgatctccaggctatgaaggactgggctctggatgaaggcatctaatgaaaatcacttatgggtgggaaccaaaaccttttatgagtttatgtactatgagctttattaatgttgagtacaaatcactgtctccttggctaaaggtgtaaccttagggaagtgctttgggtttagagctgatatagtgtggccctgcaggtacaggaattcctatcctagaccagaagggtttggtgcccttcatcaccctgaaacatttgccaaggcccagaataggtctgttgacctttgaatcacaccattcccttcccttttcttcccttctgctcattaccagcactttggcctggtgctcatcattaggtgtcactactgcttcctggctggatgccacgctgccactgtctaccctgagcccaagatttgtggcctcaccagatccaagaaagctagaaagtcaccttagccattaccttgtctttgattatattcaccttggtaggacaggtttttgtgaggaagccagtattgtgcatggcatgtaagaggctgaaattgggccttgctgcaatagcacctagaatggctaatttcagacaaatgacaccatggttctatggatgtaggtaggcagtcccaattattaaaaatggtcacagagacatggcacaggtgaagacatctggagagtcactaaaagcaagacctggagattgtgggtttgaaattcagtttctgaggccaggctcgatggctcatgcccacagtctcagtgctttgggaggccaaagcaggagagtctcttgaggccaggagttcatgagtctatagctatgcaggaggatcgaaccgaagagttcaaggctgtagtgagctatgatcacaccactgcattctgagcctgggtgacagagcaagaccttgatttaaaaaaagaaattcaggggctgggcgccgtggctcacgcctataatcctagcactttgggaggctgaggtgggaagacacgtcaagagttcaaggccagcctgggcaacatactgagtcctcgtttctacaaaatatacaaaaattggccaggtgcggtggctcacgcctgtagtcccagcactttgggaggccaaggcgggcggatcacgaggtcaggagtttgagaccagcctggccaacatggtgaaaccctgtttctactaaagatacaaaaaattagctgggcgtggtggcatgcgcctctagtcccatctactcggtaggctgaggcaggaaaatctcttgaacccgggagacggaggttgcagtgagccgagatcgcaccattgcactccagccagggcgagactccgtctcaataaataaataaaaattagccaggcgtggtgccgcgtgcctgtagttccagctactcggaggatcgcttgagccgagcggtgatcgtgccactgcactccagcctgcgcgacagcgcaagaccctgtctcaaaacaaagcaaaacaaaaaagaaaaaaaaattcttggtaactgagcactgcttgtccagcccattgagtttctgtagacaaattgtaggaactggcacagcaaactggccacaaagacgttaggggcgtggacaccagctgcttgagctgcctgctgtcccagactcccgtatgtcatcgcgcagcgtgggattttgcggcttcctgacagcccaggctgtcgcttgacttgatcttgggtttcaccaagccacgaaggactagcgtccctctctcctatcccaagggcattaagcctgtctggatgaagtaggagaggaaagatttacacgcagttctcaactttacgtgacgtgactagggagggaattgacggtcgcaccgtctacctagcccaaacggggtcacagcaggacaaggaagtagccgatctcccagatgcggtctcttcgctccgctccacccgcaccagcagcggcccacccacctctcctgtaagaggaagaacgtcccggagacacttccggccccgccccccgaggcggaagcggagtgccaggctactcctcccgcagtgtgggtggttccgaggctgactaccctgcggcggcgcggctcgcagtccttctcagcatggaccgcacttgtgaggagaggcccgctgaggatgggagcgacgaggaggacccagactccatggaagccccaacccggatccgggacactccggaagacatcgtgctggaagctccggctagtgggctggcgttccatccggcccgtgacctactggctgcaggggacgtggacggggacgtgttcgtgtgagagcggggcagggccggggcgccgggtctggaagcttcccgggggtggacctgggaacaggagagatgagagaaagttgcagggagacaaattttgcaagattctttgggtccaatttattcagtaacattcggctcttctatcacaccaatctgttgaaagaactggaatgtcgtgacagagcccagataccgtagtaggccaaaaagccctttaaggccttgttatttcccaccgattattatttatttacttacctatttatttttgagacggagtctcgctctgtcgccgaggctggagtgcagtggcgcgatctgggctcactgcaacctcccccttccgggttcaagcagttctcttcctcagcctcccgagtagctgggattataagcgcccgccaccacgcccggctaattttttttgtatttgtagtagagacggggtttcaccatcttggccaggctggtcttgaactcctgacctcgtgatccacctgccttcctcccagagtgctgggattacaggcgtaaaccaccgtgcccggactcctaccggattattatattgtgcccgagacaggctcagcaggcccctttaagtgatttttcaaaccacaaatcttggctcacgcctgtaatacccgcactttgggaggccgaggtgggcgggtcacctgaggttggagctcgagaccagcctgttcaacatggtgaaaccccgtctctactaaaaatacaaaaattagcccggtgtggtggcgcgggcctgtaatcccagctacacgggaggctgaggcagaagaatcacttggattcgggcggtggaggttgcagtgagccaagatcgtgccactgcactccagcttggacaatagagtgagacactcccttgattaaaacccttcaatggtctgcttttaggatttagtacaaatttctcaatcctgccttcaacgccctgaccatctgtgctcattcatccataccttttaaaaatacgtcttgggccgggcgtggtggctcatgcctgtaatcccagcactttgggagaccaaggtggggtatcacctgaggtcaggagttggagaccagcctggccaacatggtgaaatcctgtctctactaaaaatagaaaaattagctgggtgtggtggcgggcacctgtaatcccagcttctcgggaggctgaggcaggagaatcgcttgaacctgggaggtggaggtggcagtgagccgagatcgtgccattgcactccagcctgggcaacaagagcaaaactccatctcaaaaaaaaatctcgaaacctcagcccatttgcatgtgctattctgtccggaaaactcctttcccctcacttttacctactatctctgagtttccaggatctcttccctcttcctctctccccagactaaaattggttacctgttagatgctgccatggcaccaggtgccatggtacctttcccttaataatgaatggttggtaaccatatgtccatttgtgtaattatttgaatgctgtctccttcactaatgtttttcaaacgtctttgaccttgcctcacagagaaataccttttacattatatatgatgctctgtgatacaattgctgattttattctattattgtgtacatgtacacaaaatgctgatcgtagcttactagtccgttatatgactagaatgtgaaaaaacactgttctggagtgtaatctgtcatcggttttgttctctattttatctccaacctctagtctagggtagatgctcaacacatgtttgattttgaacaaaagatacaggttagaggcagtggaaaagttgaagatgttatgcttatcagatttacttaatgaatttaaacctcaacccctcattagctgtaatggccttgagcgtgttaacttctgtattttcatctttgaaagggggaattatacctacccttgcagaggggacaagtttgcagtacagcacctaagcagctcttcaacaaatgtaggttcccttctactactatccatatttatggtgccaggcacttgggagttgccctagacatccacctttcttcacattccacacaactttgttgcttcccttgtcttaaaaaaggttctggaggaaaattcttggttctccccttccccaccctcagccatgactattgtgaaaaggttccttttccgaggattaaattcaaacttctgcttggctcatgtggtctcatgcccaccccagcccatctttctagattcagtcatgctactctcctgctacaaggaaccctcctcattccttatctctgctgcctccagtatctggcccttgctctctgccaggcaaattctactcttgtatgatccaacccacatgtcaccaccttagctttccagggctctcttctcccttcccaagtattcattcaatttgtgaatgtttattaagctactttttcacgttcagcactgggatagagaaaatgagcaggctcagttctgcctacctggaactcactggcaattaagcatgtattcattctgccctttttgaggatctgctctgaggcaggcacttgggggtattccataaacagtactcacctcaaagttgtttacaggctggtgcctctcccccacctccattttgatcttgcctctttttcagcacgtactctcaatgtactgtaattaattgtggctttctctagctcctgcagacctgaagtgcaagagcctgctctaccttactgatttttagatttctaacttctggggctggtcttttgtcattgatgtaacaaatatctcctccacagtggtccagacccaatctttgtccaggctggggctttcaaagatgataaagaggggttgggtgggatcacaaagaaatcttgcgcaaatataccttgaactaacatatattgaaaaaagcaggacctaacatttcaaactcactgaaaatggagaaatgagatggtaaactttttgggcttagaggtgtagaagcaggaactcttaggtaggtgggaaggctgctctgtctagttggtctctgcactcaatgcaacccaggctgggtctggagtcatttaccctccttgccctctccccagcttttcctactcttgccaagagggagaaaccaaggagctctggtcatcaggtcaccatctcaaggcctgccgagctgtggccttctctgaagatgggcagagtgagtactggggaagacaaccagcaatgtggtggaagggagcagtgagcagcaccatgacctgggcaccttttccccagagctcattactgtctccaaggacaaagccatccatgttctagatgtggagcagggccaactggaaagacgtgtttccaaggctcatgggtaaggagagcagccaattctgtgtatgtgcatggaggtgaagggtaaggaccaggaggtccccactgggacagagatgctccaagaagttctacatctgtgtctctagtgcccccatcaatagtcttctgctggtggatgagaatgttctggccactggggatgacacaggtggtatccgtctctgggaccagcggaaggagggccccttaatggatatgaggcaacatgaagagtacatcgcagacatggctctggatccagccaaaaagctgctgctgacagccaggtacaacttcaaagctgccttgcctcccctcccctccctgtgtgaaatgtcttcctcaaatagaccttgcgt

SEQ ID NO: 96579 - DNA, 13372 bp, Homo sapiens
caggggttttcaccatgttggccaggctggtctcgaactcctgacttcaggtgatccgcctgcttccacctcccaaagtgctgggattacaggcgtgagccaccacgcccggccaagctagagtcacttctaatggtgcctgggtagcgtttttagacaataaagtgactaacattaatttggagtcagagtatacacataccaacagtaattcaaataccattccaaaagtcactatctgattttctaaaggtcagataggaattaaaggaaaaatgccatttgaatatattcaattgccaataaaatatacactccaaggagactgactacccttagaatctgttaagtaaggactcaaggtccccagatggttaaaagaaaaaaaaaatagaaaaagagaggtagctctggtagaaaaaaaaacagttcttagatcaccacaaccacagcaatgaaaggaacccaagattatatccaagtactgactggcccaaacacagcagagaagaataggcattctgattatcagtgtttgaaaaatccaggtttagtttaggtttgagatgtgtggaagaagtgatgagacagaaaagaggaaaaattagaaaaccagaggagaggaaagaaagtcatgaagtggtaaagagagcaggtgggccgggcgcggtggctcacgcctgtaatcccagcactttcggaggccaacgcggggggatcacctgaggttggtagtttgagaccagcctgaccaatattgagaaaccctgtctctactaaaaatataaaattagctgggcatggtggcacatgcctgtaatcccagctactggggaggctgagtcaggagaatcacttgaacccgggagacagaggttgcgatgagccaagatcacgtcattgcactccagcctgggcaacaacagcaaaactccatctccaaaaaagaaaaaaaaaaaaacagaaggtgataaggcaagaaggtgcggatctcagagccttggcaggaaagcccccaccttctgcagaggaaagctccggtcaagacatacacattagaccagatggtaaaggacatttgtaggtttctgtctgcgtgcaggcagaggtttctacagaatatattgggtctatacttttgctctccctgttccagaacttgatcttatgcattcgatcaggagtaaccaatgccaacttagaaatttatactgcgaagccctaattctcaaggggactcagctcattcttaacccaaaaggcctagtatctggggaaatcacttcagaattcaaaaattctgaataaagggatttaatcaccctaaccattataatgaaaggaggataggcttgaagcatgcatcagtaattccactgctatttcagagtcttctctaaaaattaattatatattttttaataatttcctatttagcattcctttctattaaccaaaaacttctattgacataacagtgtttcctcttgcttccaagattctgaacggtcatgtggctaaaacatggactggatctcagactaaggcagaaatgcatgctgaggaacacatgcctagtcaaacacaatgaagtagaaaaatctgtaaggtggtagagaaagtaggtaagctgaacttgcagcctatcagccaaatgcagtctggtggttttaaaatgtttttctcttcatagcttttttactaaaagtctgtaaggaatgtttaagcatcagtaagatacacagaaagaagaatggttacaatattgaaaatagtaacactgataagcacttctctcgacagcttctctctaaagtcactcctctctaaagtcaaaagttactgagcacctaccaaggatcaatattgcaataagacactctaactttaagtcatcgatatcttaataaatatttaatattcatgtataaaacaaaacagtgactaaatacagccttacaaattataaaatctggcagtatgtaaactgggcaatccttggaagagaagttttggcaacgaagaacataaaaatgtatatgttattttatttcatgcattaaacctactcctgggaattcaacccaaaggaataactggaaagaaaaaaagacactatatgtacaaagacgttaatggtattttatttatagtagccaaacaaacacctggaaataacccaaatagtcaacaaatggaaattgttaattataacatactactcaatgagctatacatccattaacattctaagtatattaagaatatgtggcaacagagaaaagtgtgactaaaaagataaatgggaagaaaagcagaaaaagtattctcacaatatattgctctatgtgactattattctaaatatataacatgattacagttatataattaatagaaagtttagaaataatatataaaaacacagtggatatacttgagtggtagggtaattggttttaatattcttgagatactttaagaactgaggtatgggggctgggcgcagtggctcacgcctctaatgccagcactttgagaggccgaggtgggcggatcactggaggtcaggagttcaagaccagtttggccaatatggtgaaactccatctctactaaaaatacaaaaattagccaggcatggtggtatatgcctataatcccagctactcaggagactgaggcacaagaatcacttaaatctgggaggtggaggttgcagtgagccgagatcatgccactgcactccagcctgggtgacagagcaagactccatctcaaaaaaaaaaaaaagaattgaggtatggttgttttaaaaaatgggctttagcttgatgatacccacagcctatgtaagtcaagaagatggggccgggtatggtggctcacacctgtagctctaagactttgggaggccaaggtgggaaaattacttgaagccaggagtttgagaccagcctggggatatagcaagatcttcatctctaccaaaaaataaaaattaaaattaaaaaatttagctgtgtgtggtggcgcatgtctgtagccccagatacacaggaagctgaggtgggaggatcacttaagcccaggagtttgaggctgcagtgaactgtgatcacaccactatactctagcctgggcatgacagagtgagacactgtctctctgccaaaaaaagtcaagaagatgggtcctaatctctatggtcatagatacctgaccaaaagtatgtgtttcagagaccaaggtcttcaaagcagcagagtgaaggagaaaagacgattggtcacacacaagttggctatctatttgacaactgagtacactagcaaaatagagcgtgctgcacaggttttccttctacagagacatgggagaaattaacagttttggctaccatcctccttataaacaacctctaacaacttgtggacatcaacaaacatgtgctggggacggtggctcatgcctgtagtcccagcactttgggagactgaggcaggcagatcacttgacgccaggagtttgagaccagcctggccaacatggcaaaaccccatctctactaagaatataaaaattagccgggcatggtggcacatgcctgtagtctcaactacttggaaggctgaagcatgagaatcgcttgaacctgggaggtggaggttgcagtgagccgaagtggcaccactgcactctagcctgggcgaaagagtgtgtctcaaaaaaatatatatatatattaaccactatatgacaatggattctaaagaaccacaaatttgccatatgttttaaaaagctattccttgcattgaacattcactgttggtaatggataaacctctacttaagaaaaacagagctgactacagatacctcatagatgcaggtatgttaaaacagactaatagtctcaggccttcttaggtcaacaactacaacatattgtctgttaattacccatcaggttaggccataagcagatttcactagtaggccaacattcaggctaggagggaagaaaaaaggaatggaaggaaaatgcaaggagaaagtattagggagtgaacatggtaacagtaactctttgagggcaacacagtgtggggtcccataagtgatcaacccctaaccaaaaagctctaaaaatctataatactttcttttttcttttcttttctttttttttttttttttttgagacagggtctccttcggtcacccaggctggtgtgcatcagtggtaggatctcagcttatagcaacctctgcctccaaggctcaagcaatcctcccacctcagtctccaaagaagctgggactacaggggtgcaccaccatgcctggctactttttgtattttttgtagagacggggtttcaccatgttgcccaggctggtctcgaactcctgggctcaagcaatccacccacactgacctccctaagtgctggaatcacaggcgtgcaccatgatgcctggctctataatatattttacacccttagcctcaactcttccaaaataaataattcagtgaaggagaatatattccaaagataagcactccttttgttgtcaaaactattagcagtttacgaaaatatttacgacgagtacgataaccttttaagagttcagtagtaaccttctttttataaattcagccaagatatctaacaattcaatataaacaagcaccctattttactgcactaatttttaaaagcttttctctgtaattacttaacttctatattaatataaaacatcctcattcccatttactctgaacctcagtaccaactttgcctcaaatatttacctcctaaaaaatcaaaacttcataaacaaacgggtccttacctttcaaaagaaatttgcaatgaattccagggagactcatataaagtgaactgaaattgaaataaaatccattacaggaaaaaaaatccgaagactttcatagcaaatctattcaagttcacatttcttcaacactaatccaagtcttaatagtcacatcattaatactcttaatactcacatttttaacattctgccaccagcaactactactgttcaaataaactctggttcacacactgatgtctgcttcacacatcaacttgcttctcccacacttgcacttgcttcccacagagctgtcataatttcttacaagttttaccaggctgtgtcccaaaataaagagaatggattcttccgttctgaggatttttgacgtttctccgccaaatgagggaggaggcatttgcactccaatagtagtttcaagacccaactatcatttccaaaacccatctctacaacccagcctaacacacacacacacacacacacacacacacacacacacacacattctctgcctattctgccaatggactctgaattaagtggcctgaagatttctcgtatctgccctgcaagtcttcttgcccctgctgtgaagtctcagagccttaaatgaggaactataacccaggatatttatgggtctgtctagacaccattatttctgagcagacgccaaagacaagtgtaacagcaggcaacatgacacttgtaagttaaaccaaatgagaggatacagtcagtaataaaaagttttcatttacagtttgtggggggaaagccgtaggaaagacccgttcttatgtttcaggtggtattttgtatgtaaaccatatggcaataggcaattctgaaaaccatggaattaaagccatccaatattaggcaacagggcaataaataaattccctcctaagactttaaaatatgaaacaaaactcagcaatctgagcaggtttgaccacttgttcaattctgtagtgataattactatgatttgattgagataaaagttataaaaccttgtatcaagtatgttttgtttttactttttcactgtcttattttaatgtcagaataaatatgtattgaagtagtagtatactgaggtcgttggcaaagcctgggtcctgtcctctygttctcctccccagacagcatgagtttcaccacttgctccaacttctccaccaattactggtccctgggctctgtccagccgcccagctggtcaacagcgtggccagagcctatgcacgtgccaggggctctggtttccagatctccgtgtcctgctmcaccagcttctgggatggcttggggtcccggggcctggccgcagggatggctgggggcctggcaggaataggaggcatccagaacgagaaggagaccatgcaaagcctgaaagaccacctggcctcctacctggacagactgaggagcctggagatcgagaactggaggctggagagcaaaatctgggagcacctggagaagaagggaccccaggtcagagactgggggccattacttcaagatcatcgaggacctgagggctcagatcttagcaaatactgtggacaatgcctgcatcgttctgcagactgacaatgcccatcttgctgctgatgactttagagtcaagtatgagacagactctcaggcgccagtctgtggagagcagcattacgggctctgcaaggtcactgatgacaccaatgtcacttggccacagctggagacagagatcgaggctctcaaggaggagctgctcttcatgaagaaccacaaagatgaactaaaaggcctacaagcccagattgccagctctgggttgaccatggaggttgatgcccccaaatctcaggacctcgccacgatcatggcagacatctgggcccaatatgacaagctggctcggaagaaccgagaggagctggacaagtgctggtctgagcggactgaggagagcaccacagtggtcaccacccagtccgcccaggttggagctgctgagatgacactcacggagctgggacgtacggtccagtccttggagatcgacctggactccatgaaaaatctgmaggccagcttggagaacagcctgagggaggtggaggtccgctacaccctgcagatggagcagctcaacgagatcctgctgcacctggcgtcagggctggcccagacccaggaagaggcgcaacaccaagcccaggagtgcgaggccctgctgaacatcaaggccaagctggaggctagggtcaccacctaccgctgcctgctggaagacggtgaggacttcaatcttcaatcttggtgatggacagcagcaactccacgcaaaccattcaaaagaccaccacctgccgcaaagtgagtggcaaagtggtgtctcagtccaacgacactaaagttctgagacattaagccagcagaagcagggtaccctttggggagcaggaggccaataaaaagttcagcggtttaaataaaaaaaaaaaaaaaggctgggtgcggtggctcacgcctgtaatcccagcactttgggaggccgaggcgggcagatcacgaggtcaggaaatcaagaccatcctggctaacacggtgaaaccccatctctactaaaaatacaaaaacaaaaaattagccgggcgtggtggcgggcgcctgtagtcccaaataatctggagactgaggcgggagaatggcgtgaacccgggaggcggagcttgcagtgagccgagattgtcccactgcactccagcctgggcgacagagtgagactccgtctcaaaaaacaaaaaaaaaaaaaagagagagaaaaagaaaaaaaaaagtagtatactgagaaaaatatggggccaagaaaacaaggaggatgaaaatgagttgtgtttttgtattttttaatgactttcaaaacaaggtaagaaaattataagtggctcttgttttactcaatgtaatagatcaataacaatagaattagttctaaatattttttaaataccatcattcgtaattacaaaaattaaatggtaagcaattatgaaatcaacaaaatgaaaatttcaaaacccagcactagcaggatgtgaggaaagttgtaaacttaaagattgatgatgctgctataagctgatagtttttccagggagcaatctggccatatgtaacaagatctacaagcaattcttgcctctaacccacagaacctaccttggaaactaaaccctaatgaagaactctccaagtaaaataaatgtaatttgttcatctatgtttatagtgatactttttgtaatagttaaaattggggaaaatctgagtatcaagccacaagagaatggttaaataaccaatcgtggtataataaaagacgttattggccgggcgcggtggctcaagcctgtaatcccagcactttgggaggccgaggcgggcggatcacgaggtcaggagatcgagaccatcctggctaacacggtgaaaccccgtctctactaaaaatacaaaaaactagccgggcatggtggtgggtgcctgtggtcccagctacttgggtggctgaggcaggagaatggcgtgaatgtgggaggcggagcttgcagtgagccaagaccgcgccactgcactccagcctgggcaacaaagcaagactccttctcaataaataaataaataaataaataaataaataaataaataaaagacggaattattgatcccgaatctttgctcccttcctataagatatcccatccagttccctgtgacttgcctgggaatcatgtgggatgagtggaagtcctcaacccagtgagtcttggcttggtcatgtgatatactttggccaatgggatgtgaagagacaacctattcaccatcccctcgcacaacagctttcaatgacgttacatgcttctcattacactaccactctttgatgacaataacttctcatcaaaacatgacaagttatatagtagcggatatagcaaacatatatttgaaaaaaggtcatgaaaaagtaaataaaaaataggtagacacaaaagatatcgatataaggcaagccaatgagtaccagaaattaattgaaaatgatataatcatttataattatttttgtcaatgaagtatctgtttatacttcatctgcacctacatctatatcgccacatcttttcattctcatttagatgctacctctttataaatatatttttcaacaattctgtacataccatattcataacagaaatatttctatccaacacgctttgtctgcttcaatgacataaagattagtgaacacttatggcaaaagtaaatctagtgcaaaggttattattcaacctttcacatgtacgatttagggttcaacaattcttttgtcagattataaagaaggcaactgtaaaaaacagacaaaagcaagagttagaagaaagtgtttgctgggctgggcatggtggctcacacctgtaatcccagaactttgggaggctgaggagggcagatcacctgatgtcagaaattggagaccagcctggccaatatagtgaaaccccatctctactaaaaaatacaaaaattagccgggcctggtggcgcatgccggtaatcccagctacttaggaggttgaggcaggagaattgcttgaacctgggaagcggaggttgcagtgagccaagatcatgccattgcactccagtctgggcaacagagcaagactccatctcaaaaaaaaaaaaaaggatttgctgagataatccacttccttgtcatcaaacattgtgtgaaagcaagatctcaaagaccctcacctatatgagggtaaagctgtgttaccactgaatttatctttatgacctacattagaaattccattgcatctgtatgattcaagaatcacaaaaatgttcactatatcaatctcactcataattaatcctaaaataaattcaacagcaaaaaaagtattaatgtgaatcattttcactatcatcttctatgcgatagcaagaaatgtaaaatgtgcatgctttcaataataacaacaacaaaaaaaggccaggtacagtagctcacacctataatcccagaattttggaaggccaaggccggggtggggtgggggtgggggagataacttggggccaggagttcgagaccagcctgggcaacatgatgaaacccataactatgaaaaataaaaaaatttggcacaggatgttggcatacacctatggtcttagctacttaggaggctgaggtggaaggattgcttgagcccaggaattcaaggttgcagtgagctataatcacaccactgcactccagcctgggcaacagagcaagaccttgtctttaaaaaattaattagttttttaaaaaatattaagaggatttatagtatatcaattgtaaagatactacaaatattagttattaagactacaagttagctgggcatggtggctcacacctataatcccagcactttgggaagctgaggcgggaggatcacttgagcccaagagttcgagaccagcttgcgtaacctagtgataccctgtctctacaaaaaaataaaaaattagctgggcatggtaccacatgcctgtattcctagctactcaggaggctgaggtaggaagatctcaagatcttgtctcaaaaaaataaaaaaatacagaaattatgtatagattatgaaggagtatataaaattacaagtatgaaattatgtctacacatgaacattaactattaggttgatgtcaaagtaattgtgggttttgccattacttttaatagcaaaaactgtgattacttttgcgccaacctataaaaaacatcaaaaaatttttaaatagctggtcataggtttgtggctaagtttataccaattttttaaacatgttggtacactgagagaaaaaatgtctaatatttgtatttacaaaatctgtacttgctatgaaatatacccacgtctctcagttacaaaagaatctggtatgcttcaagtttctaaaaacaatttattttaaatatctttctaattaggacaaccttgagttagtaaacgaagcacatccagtttgatttttatcatttcctgataacttgagctcattcctggaacatcaatggtttttactatattccctagtttaaagatgatacctttcactgctagggaaaataatgggtacccccggtagatactaatgagcagaagggctgctgcagatcaggtctaggtaacgttttcctttttgcctttgagaagtggtgatgaagagtggatacaagcacaagctctggattcatgcccagatttgacactaggctccatcattcactagtatttgcatgccatgatgttacatagtaaaccagtatttatttaccagctgtaggatcttgtgcaagttacttagcctttctaagcccgagttgtctcatctacaataggccaaagatagtgcttacttcacagggttgccgtaaggatcaagaaagataatccactggacaaagcacttgcacacggtaagtactatactaactaaaggccaattaatatcagtctctctctgctggtcatctaaggtgtcatcaggcttacattttaccatcacctataactacttttactttctgtctctaactacttttccttcagtcctcttaggcatcactgaagaactagggctcctaagagtagtttgataaccatctatgacggtgctgtccaaaagaaatataatgtgatccataaatgcaagccacctatgtaattgttgattcccttgtagtcacatacaaaagtaaatcaagacaggtgaaattaattttgacaacagatttatctcaatatacacaaaatattatgtcaacatataataaataaaaaattatgagatattttacttttttttgataacaagtcttcaaggtcccatgtgtatttgacactgacagcaatatcccaactcagactagccacatttcaaatgctaaacagccacatggggctaaaggctacgttattagttgctgattcttttcaagattatgaccacagaaaaacatctccactttcgaaaacatcaaaatgcatttattaaacaagctggtggatagacaaaaggaaagaatgaatggaaggaggaaggaacacatgtacttgacctacacagacttctgagcctaacgtggtggttaagaacttgggctgtggaatcagagagaacgggttcacatgccacttactccacttactagctgtgagagctgagcaaataacttctttaattctcacatttctcaaggataaactatagataaaaataacatctccttcataatgttgttacaagtttaaaggttatagcagaaagggggtttctatacataaagctctgctgtataaaaggccaaagataggagtggggaaaaccgatgaagagaatactgagcaaattagcttgacataagtaaagaggccatggtggagaaaagctgttcatattatttatattcacaatgcctgttacgtgcccaattacacaaaacaatttgaacagaggcagctattaataaaataattgcaatggcatttctaaagctctcagtggcttacaactccccagcctgcttgcttgcttgcttcttggcagtattctaactaagtaagtgggggagacagagggcagaaggccagaatttgcagaacaaagatttttccgtactgtatatattaatattaaccacattttctagcctccataagccaaatggatatatctgaatttttctttgaaggatgagattctcagtgtctcaaatttaaactgaacgttactcttcaatgtactataaagacattaaactaaatgcctactgctctttaaacttttcttgaaaattgattttgtgaataattcctgatattttgctttgaatttgctcttgttatgtgctacaaaacacaaaagtctagctatttaaaaaattaaagttagttctggtctgctaatgatgactttaaatgtttaatcattttaacgatccaagccactacatggtctaaattagatgttgagtttcttaaagaccacaaacatgtcttctctatccaggtaacttctaaaccaagatttctctggtaggtattccatttactattagtgcccttccatattacaggtgttccataacatagattttttttaaaagattcttactaaaatgaatttagctttgaaacattttcatttactgcaagacttctcagagcctttaatgtcaacacacacagatttcaaagtactgagctcagtcactattatagttttatcatctacaaatgagaaaaaaatgtaaaccaagaaccaaacaataaggagatagcctaattgccccatggaaataggtggtctttgcacttctggcctgatgtgc

SEQ ID NO: 96580 - DNA, 12744 bp, Homo sapiens
tttgagacagagtctcgctctgttgccaggctggaatgcggtagcgcgatctcagctcactgcaacctccgcctcctgggttcaagtgattctcctgcctcagcctccagagtagctgggattacaggcacgtgccaccacgcccagctaatttttgtatttttagtagagacggggtttcaccatgttggccaggatggccttgatctcttgacctcatgatccacttgcctcagcctcccaaagtttacaggctgtaatcccaaagggattacaggtgtgagccactgcacctggccaaaactattttatttataatagtatcgaagagaataaaatgcttagaataagcttaatcaaggagacgaaagacttgtacaataaaaactataaaacattggtgaataaaattagggcacaaataaatagaaaaaggtctcatgtccatagaatgtatgacttactattgttaagatgtttatactatgcaaagcaatccacaggttcaaatcctatccaaatcccaatgatattttttgcagaaatagaaaaatccatactaaaattataattaatatgaaatctcaagggaccccaaatagccaaaacagtcttttcctttttttgagatgaagtctcactctgtcacccaggctggagtgcagtggcaccatctgggctcawtgcaacctccgcctcccagtttcaagcaattgccctgcctcggcctcctgagtagctgagattacaggtgtacaccaccatgcccggctaatttttgtatttttagtagagatggggtttcaccatgttgggcaggctggtctcaaactcctgacctcgtgatccgcctgcctcggccttccaaagtgctgggattacaggtgtgagccaccgcacctggctgaaaacaatcttaaaaaagaacaaagctggaggactcgccccctcctgatttcaacaaagctacaataatcaaaacagtgtggtactggcattaaaaaaaagacatatagaccaatggaatggggtagacagccccaaaataaaccattgcatatatggtcaaatgattttcaacaagggtgacaagaccattcaatggagaaaggacagtcttttcaaaaattgatgttgggaaaactggatatccacatacaaaaaaaatgaagtaggactcatatacaaaattaactcaaaatagatcaaaaacataaatataagacctaaaactataaaactcttagaagaaaacatacaagaaaatcttcatgacataagatctggcagtgactttttggatataacaccaacacacagacaacaataaaaaagacataaattggattacatcaaaattaaaaacttatttgaatcaaaggacactatcaacagagtgaaaagccaaaaacccatggaatgggataaagcatttgcaaatcatatatctaataaggagttaatagctagaatatataaagaactctcacaactcaacaacaaaacaacccaatttaaaaattggcaaagaacttcaaagaagatacacaaatggccaataagcacatgaaaagatgctcagtattgctaatcattagggaaatccaaagcgaaaccacctcatgagataccacctcatacatattagaatggctgctctcaaaaacaaacaaacaaacaaacaaaaatcacaaacacaaaaagcaaaaaataacaagtgttggcaagaaatggtgaatgtggaaccctcctacactgctggtaaaaatgtaaagtggtgcggccactgtggaaaatcgcatgacggctcctcaaaaaattgaaaatagaactaccacattatctggcagttttctttctgagtatacacccaaaataatcaaaagtagggccttggagagatatttgtatacctatattcatagcaccattattcacaataaccaaaaggtagaagcaacccaaatgtccattgatggatgagtagataaacaaattgtgatatatacctaccatggaatattattcagccttaaaaaggaagtacattctgacacatactacaatgtggatgaaatttgaggacattatcctatgtgaaataagctacaggactaagtgaaataagctagtcacaaaatactgtatgattccacatatatgaggtccctggagtagacaaagtcatagagacagaaagcagaatggtgatttccagagcctgggaaactgagggaatcgagctgttgtttaatgggtacagagttttagtttgggaagatgaaaatgtctggtgatggacggcaatgatggttgtacaacaatgtgaatgtaccttaatgccgcttaaaatggctaaaatagtaagttttatgttcattatattttaccataattaaaaaaaaatactgtattgggaaaaataatagaatagcaagttttctattaaaattgcctttaattaccaaaaaattagtargatttaatgtagggttttttgcagatacccattaccaaattaaagtttgtttttaaatttaattttattattatttcactctgttgatagtgtcctttgattcaaagatgtttttaatttttaattttattattaataaatttattattattattttttgagaccagtcacccaagctggagtgtagtggtgcaatctcggctcactgcaacttccacctgcttggttcaagccattctcccacctcagactcctgagtatctgggattataggtgtgcaccaccacactcagctaattttttgtatttttggtagagatggggttttgccctgttggccaggctggtctcgaactcctgacctcaggtgatccacctgccttggtctcccaaagtgctgggattataggcatgagccactgcccccagccagaagtttccgtctattcacagtttgcaatgagtttttactttgaatgagtattgaattttggtggagactttcctgtatctaatgagtaaattatacaattttcctcctttattctcttagtacataagttacattgtttgtttctcaaatatttaaccaacttcgcaattttggaataaacataaattggttggaaaaaataaaaattccaccaacttatcataggattattatataatatgcaacataataactggcagtacaataagtgctcaataaatgtttccagccatttttaaaatcacaaacttgagagaaaaggctgaaatgttactctaaattctcctgcaagagtttactgagcaaatatatacaactcttatatagcaatgaaagtaaataatttaaaaaatgcttgctgaggattctgtcctttcaattcttggggaacagtatctgagtgatctgtggccagtgaactctccaaaaaaattatttctaagaatagattgctgcaaatatggggagctcctaaatatgaaacaagcattgtcaccagggaatgctgagaatcctgcaagataaatagaaatttaacattcagtgtgcttaagtagtagtcacaataattaatactcttaagcagaattatatgccaaattctggccaggacatagcattagacagtttttctgcccaaagagcactttgctgctcacttatttacattttccattatttggaacccaaatagatttttcttactttgttacattaaaagtcactgtggaatacagttacagagaacccaaaaagtattttaagatttgaaagtgattgtctgggtagtttttagaccaaaagttgccatctagtggcactaattattagtgcagacacagtgaaacaaaagaaaaaaaagggaactaatatttttctagaaactgttctgtgccaagcactgcaataggtactttatttctttacatcttttagtcttctcccatcttctttgttatgaatgtgtcacttctgtcatgcctcctcacaagctgatgatgagaagcaaaagagttgtttctgttaacatttcatggagatgcaataggagaaaagccagagaggagtagtctagaaatggaagcttcattaaaagagagagagcaatacagaatgaggagttctaggactcacatatcaggcaccttcttccatgatcatgtgagttacatgaatcagtggatccccacattgcttcggatgtaagaactccgtagaaagcagtgagaacagtgaccgtgatgctgataactgtatcataagctttttgggacagagaccacatcatatagtgtttgcattctctgtggtccacgaagcctcttctgtaagagcactcatcctgttcatgaggactccacctttatgacctaatcacctttgggaggtgcaagataaatagaaatttatcacctccacacctacaatacaatcacattagggattaggtgtcaacatgtgaattttatttattttttttttttagacacagtcttgctctgttgtccaggctagagtgcagtggcactatctctgctcactgcaaccttcatctcccggagtcaagtgattctcctgcctcagcctcccgagtagctgggattacaggcgtgcaccaccacgctgggcgaatttttgtattttcagtagagccagggtttcaccatgttggccaggctggttttgaactcctgacctcagatgatctgcctgccttggcctcccaaagtgctgggattacaggtgtgagccactgtgcccagcttcgacatgtgaattttgaggggacttaaacattcaatctacagaagaaactaaatatccccactcctctgagggcaagaggaagaaaggctttggtctgcctcctgctctgtccacaagcctgggtccaggcggctgggaaaggaaccctgaggactttcctaactagtcacttgaagtccacttcatcaataacgatgccccagctaccttgggagaaatggcctctcgcccagcagggatgcagaatgagaactttcacaagaatgttgactgaaggaggtaatcaatactcttgcagttatttcaaacacaaaagcctatgaaggcaactcaattactctcacgcctccttttctgacttactttcagaaccttgtcaaaggctagtagtgttgggtgcctttttttttttttattcatttacttacactattcaagcatgctcttttcctggtagaattttttctgctttctggataaagacacccagtgtccaaaaagtgaacagcatgggaatatggagacttatcagatggaactttgacctccaaagaggctttgctgcatcttttcttccttccttgtctgttttgtcatttcctattttttttttttttttttttagacagagtcttgctctgtcacccaggctggagtgcagtggcaagatcttggctcacggcaacctccacctcctgggttcaagtgattctcctccctctgtctacagagtagctgggattacaggtgcccaccaccacgcccagctaatttttttttttttttttaaagtagagacggggtttcaccatgttggccaggctggtctacaactcctggcttccagtgatccacccacctcggcatcccaaagtgctgagattacaggcatgagccaccatgcctggcctattttgtcatttcttattttcatttatttggttctttttatctggcagtgttgtaggagttattaagaaattattgactgggtgcggtggctcacagcctataatccctgctctttgggaggccgaggcaggtggatcactggaggtcaggagttccagaccagcctgaccaacaaggtgaaaccccatctctactgaaaaatacaaaattagctgagcatggtggcaggcacctttagtcacagctattcgggaggctgagacagcagaattgcttgaacccgagaggtggaggttgcagtgagccgagattgtgccactgcactccagccttggtgatggagccagacagacgctgctgccgaggaaaaccttgtattattaggcatggtcaaccccaccgtgttcttcgacattgccatcgacggcgagcccttgggccgcgtctccttttagctgtttgcagacaagttcccaaagacagcagaaaattttcgtgctctgagcactggagagaaaggatttagttataagggttcctgctttcacagaattattctagggtttatgtatcagggtcgtgacttcacacgccataatggcactggtggcaagtccatctatggggagaaatttgaagatgagaacttcatcctaaagcatacaggtcctggcatcttgtccatggcaaatgctggacccaacacaaatggttcccagtttttcatctgcactgccaagactgagtggttggatggcaagcatgtggtctttggcaaagtgaaagaaggcatgaatattatggaggccatggagcgctttgggtccaggaatggcaagaccagcaagaagatcaccattgctgactgtggacaactcgaataagtttgacttgtgttttatcttaaccaccagaccattccttctgtagttcaggagaacacccttccaccccatttgctcgcagtatcctagaatctttgtgctcttgctgcagttccatgttttccttgttccctcccatgcctagctggattgcagagttaagtttatgattatgaaataaaaaccaaataacaaaaaaacaagaaaagaaattattttagtcagatagagacaaaaggggtcctttggaagttttcgttttttaaagcatctctggaaaagtttcttgtaaagccccagctcttagagccaggctggcaacctttgataagcaaatgatggccattagaaactgggtccacccaaacatggccattcctgcagccttcttgcccttgccccacatgttcctggcaatatggccgcccccgcatatccccacatgtgtagaacatcatggcaccctgtatttgcatattaaaaagctagggtgggagagccagctttttcacgggctacgtgaatgacatgcctggccaaaccaatcccctgagccctatgtaaatcagacaccacctcctccagcctctgtatatatacctggctggtatccgtggcaggtggggtttcctcttttggctttagaggcccccctccctctgtctctgtatgggggtcttccttctgtcttctcccttccttcttgcctattaaactctccagtcattaaaactactccacgtgtgtccctgccgttttttctaattcaacttgagacgaagaacctggtgttccttcactcattggagctgtatcagcagctccacttaacttaaatctcagagctaaaaatgttgccttaaagaaatttttttaaagaacaggtttagagaaattagtggtctcaaaactggagtagggacttaatttttgtcaagttagggttgtaggagaaaccaggaaaagtattactgttctctctacagctaagacagagatttagggggrtatgctgaggcacaccacttccctaaatttagtaacttgctagagagctccaagactcaataggaaattatactcatggctcagatttattacagccaatgatacagaataaaagcaagcaggaaatagacatgcaatggaggagtccagagaggtctcacacaggcttcggatgtccttccctgtccgagaccacaggagtgctttctttttctggcagcaaaactacactacaggaacgtgtgtggaatatctctatccagggaaacccactggagtatcagggtgcaaggtttactgggagaggatggtcacatacgcatattctcttagcaaccagccatggcaaccaaaattgagaacccaacacagaatctaggtgcccatcctcaatcttgattttttttttttttttttttgagacagagtctcactccgtcacccaggctaaagtgcagtggtgtgatctcggctcactgcaacctctgcctcctgggttcaagtgcttctcctgcctcagcctcccgagtagctgagattacaggcgcatgacacaccaggctaatttttgtatttttcttagtagagatggggtttcaccatgttggccatgctggtctctatccctgacctcaagtgatcctccagcctcagcctctgcctcccaaagtgctgggatcacaggtgtgaatcgccacgcccggccactcatttctgatgtttgtgtgaagaaatttcaccatctgatctggcacagtccattgctcctggtgtgtatgagaaaatcaccaatcactaactatcacaaagaacattccaagggccacattcccagagttggccaatggtcaatcatggtaccctgatatatgcaaggagtaggctaccagatctgcttgttaactctttcctcccaggagggcactagtaactccaactggtggcaccaggaagtcaggagctgaaaatatacaactatgacccaggttggtcaattaggttctcctataaaattgactgtccatcaactatcaacagaaatactaattcatcactaatttaaattcattaacagatatgacattccaaacaaaattaaaagaaggaaatatatttacgcacaataaagtatcgtcctcatcctagaggaaatataaatgaaaggcatttgaaaatgataagcattaggtaagtgtgacccctgttaatgccccgcaggactggcaaacaggctcaggccttccctactaagaacccagcctgcttaatggatgatctcagaggcagataagtgcacttcatggtcagaagcttcagacccctgtcccctcttccctgttccctgagcctgaacaagacagctgtggagttttgtcttgatgactttttttttcgagatggaatctcgctctgtcacccatgctggagtgcagtggtgtgatcttggctcactgcaacctccacctccgaagttcaagcgattcttgtgcctcagcctcccgagtagctggaattacaggcacccgccaccacgcccggctaattttttgtatttttagtggagatggggtttcaccatgttggccaggctggtctcaaactcctgatctcaagtggtctgtctgttttagcctcccaaagtgctgggattacaggcatgagccaccacgcctggcttcttgataactctctttagctgaaagtcactcattccttgacccactcgcatttccagcggatactcaaactaggtgccttttctcaaagagaactgcatttacttttccaaagagattttttttttgaaaatttcccccctaaattcattcttactgtaggcttctttgtccaaatcagaaacagaaattgcattaccctcggccacccaatactatgtttagccaccttagatgtttagatatttgagatgatctaatccagttttctcatttccaggtacaaacttttatttttattttagacctggggtcttggtctgtagccagattggagtgcaggagtgcaattctagctcactgcagcctcaagctcctgggttcaggtgatcctcccctgtcagcctcctgtacctaggactacaggagcgcaccaccatcccagctatttttatttcattttattttttctttttttatagtctctaattgaagttatttatttagttagttagtttttgacagctctgttactcaggctggagtgcaatggtgcgatctcagctcactgcaacctctgactcctggattcaagcaattcttctgccttagcctcccaagtagctggaattacaggtacacaccaccacatccagctaatttttgtatttttagtagaggcagggtttctccatgttagccatgctgatctcgaactcctgacctcaggtgatctgcccacctcagcctcccaaagcgttgggattagtggatcaccacgcccgacctctaattgaagttaaaatgtattttttttctttattttttgtagaggcaaggtctctctatgttgtccaggctgctctcaaactcctggcctcaagcaatcctcccaccttggcctcccaaagttgggattacaggcatgagccagtgcacccagccttcagatacagattgaaacctgaggccacctaacctatccaaggtcccacaacttacgggtgacacctgcctcttgtcctgcaacctcatgtactacctcccaccgcacacagcatgctggggcctctcatggaacagctgacctaggcccaccaacctggtgtcataacagggttctacaatgtcttcgttatctattgatggatttgaaatgcttaggggggatattgtaatggacccggcaaatggtggcttggcagccacgatcataaattcacttgactaaaattttggagcataattttttttttctttaaagaaaaggggccaggcgtggtggctcacgcctgtaatcccagcactttgggaggccaaggtgggcagatcactttaggtcaggagtttgagaccagtctggccaacatggtgaaaccccgtctctactaaaaatacataaatcagccaggggttgtggtgggtgcctgtaattccagctccttgggaggctgaggcaggagaatcacttgaacctaggaggcagaggttgtggtgagccaagatcacaccattgcactccagcctgggcaacaagagcaaaactacatctcaaaaaaaaaaaaaaaaaaaaggaaaccccatccctactaaaaatacaaaaattagctgggtgcagtggtgcacgcctgtactcccagctactcgggaggctgaggcaggaggagaattgcttgaacctgggaggtggaggttgcagtgagccaagatcgtaccattgcactccaacctgggtgatagagtgagacttcatctcaaaataaataaataaataaataaataaataaataaataaaaagtatttgagaaggacaaatgaaggagagaagaagggagaaaaacccaggaattaaagtcaattaatttaacatcagtaactgaaaaaaaaaagagctatccatcccataatcactttcatggaacatcaggaaatgaacaaggcagcacgttccctcttagataataaataatgttaaattcaccagagttgttctgacaagattacaaatttactgcatggaataatgtgctggacattctatttctgtacatggtgagtctaatgagaaacaaatgcagttctcatattcttcttttttttttgagtcggagtctcgctctgtcaccaggttggagtgcactggcacgatctcggctcaatgcaatctctgccctccgggttcaagtgattctcctgcctcagcctcccaagtagctgggattacaggcatgcgccaccaagcccagctaaattttttttgtatttttagtagagacagggtttcaccatgttggtcagtatggtctcaatctcttgaccttgtgatcagcccgcttcggcctcccaaagtgctgagattacaggcatgagccaccacgcctagcctcttcttttttttttgagatatgatctctgtcacccaggaaggagggcagtggtatcatcatggcttactgcagcctcgacctcccaggctcaagcgattctctcttcttacccacctgtgaagctgggactacaggtacatgccaccacacccggctaattttttagtagaattagggtcccaatatgttgcccaggctggtcttgaactcctgggttcaagcgatcctcccacgttgacacctcacagtgttggggttacaggcatgagccaccggccccggcccaattctttccttatctggatttcagccaggtacttccacccaatcctacacacagattgtattcagaatcccaacagaaccagatggccgttcagcccagtattgcattagtaagtagcaagaatgaggacagctcagttctgagttgggtcccacaaacaccctgtccacagcctcagaggtgtggtgggagaagcaatttatttcgtgtcttgtccccagtcctgtggggctgtcgggcagttgctgtgtctgcggagatgaagtttcccgctggcayctccccacccacccggggcagcagctggggtcttcctcctgcagaagcccgacaggcagctgcgagtcaccccacactctgatggtctcactcgtgatcagaggggagcgccacttgaacactgagagccacataatgctgagcttaacatgctgtttagaaccagggcattacatttgttctgttttccaagtctcgtgggtaaaaagaaaataagcaagaaatacacttttaggtttcttttttccagaaactatataattgtggatcctaactttttccagggttttcctcttgtcatttcaaaataaaaagtctccccttggttgggcgtggtgactcacgcctgtaatcctagcactttgggaggttgaggtgagtggatcacttgaggtcaggagttggagacccgcctggtcaacttggtgaaaccccgtctctactagaaatacaaaaattagccgggtgtggcagtgcacacctgtaatcccagctacttgggaggctgaggcaggagaatcacttgaacccaggaggtggaggctgcagtgagctgggatagcgccactgca

SEQ ID NO: 96581 - DNA, 21313 bp, Homo sapiens
  misc_feature (1)...(21313): n = A,T,C or G
tttttttttttgagacagtcttgctctgtcacccaggctggagtgcaatggcgtgatctcggttcactgcaacctccacctcccaggttcaagcgattctcctgcctcagcctcctgagtagctagaattacaggtgcgtgccaccacgcctggctaatttctgtatttttagtagaggcggggtttcaccatgttggccaggctggtcttgaactcctgacctaaggtgatccgcccacctcggcctcccaaagtgtgagccaccgcatccgggctttaatcaagttttaatctccttagaccataatttcctcacaactggggtaatactctcatagagctgttgtaaagattaaacaaaataatgcatacgaaaatgtttggcaaatggtaagcactcagctattgttactgtaagtttgtggaaagtaactggaagtgtctttgaaggttttggagcaagagtatgaataacatggtaaaataatgtttggggaagatgaaggtgatgacactgtataggatagatggaaaggggacaacatcagcggcaaaaactcagtgaatagactcctaaaataatcagggtctaatacaagataaatctgaataagaatgatggcaataaaaattaaaagggagagatgaccagatatgagacattacgaaagtatctacatggtttggtaacttactggacatagacatggagggcaagataaaacagccaaagatgactaaaaagtttcaatcctgagggattaggagaatgagggtgccactgatcaaaatcaaaagtcaaaaggaagagctagttttgataggaaaaaaaatggtttgtattcatgtaggtttcatttggttaccaacgggaaaaccaccaccttgtctggagagggagataatgtagtgaacctgaaatatattgaacatgggaaaagctggcattaatatttaaattggtagggacttttgggtatttactgggacccattctttattttcttctgcaacatccttcctttccttctctacttcacaaatacctgttgttatcactattatgtctgttgaatttcgtggtgaaagaagcaaacaggataggggctaaaatttgcctaagacagagagctcaagagcacttagaaatcagctggaggccaggcatggtggctcaagcctgtatctcagcactttcggaggctgagttgggaggattacctgaggccaggagtttgaaaccagcctggtcaacatagcaagactctgtctctacaaaaggaaaattttcaaaattagccagttgtggtggcacaggcctgttgttgcggctttctggggaggctgagacagaaggttgccttgagcccagaagttcaaggctacagtgagccactttcgcaccactgcactccagccagggagacagagggaaaccctgtctcaaaaaaagaaaaggaaatcagctgggggcagggatgggtgtgggttgggacagcaactctggtcactcaccattccaaggtggaggcttccagtgggctgtttctttgcttgggtacataacagctcccccaaactgctgtgcccattccacatctggctgccactgccgaacacctctggggagtcaaagacagatcctagacaaagggcctgaacagtgtttggttcctgtgttcccattcactctcaaggggacccaggaaggatgacctgtttttttgttttgttttgttttttgttttttttgagactgggtttcactcttgttgcccatactggagggcaatggtgtgatttcgactcactgaaacctccgcctcccgggttcaagtgattctcctgcttcagcctcccaagtagctgagattacaggcatgcgccaccaaacccggctaattttgtatttttttaaagacgggggtttctccattttggtcaggatggtctcgaactcccgacctcagatgatctgcccgcctaggcctcccaaagtgctgggattacaggtgtgagccaccgcgcccagccaatgtcctggattttttaatgccaagtcactgatctgaagttaatgtagcttcggcaaaacaagctggaactctagaggttccattcctactaacaaattattcctggaataactccacccatcacccctgggcatgcaaggttgggatcctagcttcttcatattttcatcatattgatattatcaaccaggtgaatatgaacgtgagaaaagtgtttgttcaaggtcaacgacagagagacagcgagcattctggctctttggctgagctctactcaggtatgacaggagaggtgcattcaaattactgaagctaaaaagcagagtctcccactccgctgatttcacctcggcacgaacgaactctagaccctctcccctccctcgccagagtgggcgccactgcatcccgtagcccaagaaatcagggatggacaatggggtcacaggcttgggttattattttctgggggagtaaagcgtccccaacctgagaaaccctagccttggagaaagtgtgtcgagagctgccctcgatctcacctgctgggctgaatcggcaatcggactccagccccaggccgcagcacctgggccgcgacgccccggaagccgcacaaagccctcagcgccgccatcttactccggctgcagactgcgggaaggagaaccgggcggaagtaactccagcgcgcctccttcttggcttctcacctattcgcacagtgaagccgccctcttggaagctggcagggtcgtttaccgtcgaactgacaacatccgggtcctgtgactcggcttcacttgcgtttagataacagtgaccgcggtcatctttactgagggcgtttcctcccacagctcctggctggcttttctaggagcgagcaagggaaaattgccgttcctgcgtggggcagatacttcgtgctctctcgccgagcccgcctgcgtatcttggaaacgcgcggcgcttccttccctactcccttccgccttggccgccctcatgctttagtcctgctctcggattgtatctgagccctgcccttatagggtagccccaggctttgccaattactttcccatcactgaatccaaaagacaggagttgggaaagccagctaatttccagatgtcataaattgagattggagaaaggagcctaagtggggctgggcgggtctgagagctcccgccaaaccaaaacaaaaaagaataggatgccaaggccgccggcattggtggtgcggaggggagtgtcggggtgtgtaggagccacctcatcccagatgggggagtggaggtcctctgtgggtgaccctgacatcctccaggcttcccgaacctacagaatcacagacccaggaagcgcccttagagatgcctcacaccccacttccgtcttgcgtcagcctcttttccctaacgtctttctgaccctgctatagccctcctgggtaatggccaacagcacggaaatgtagtagcaccaggagtctgatcacaattctgtatggacaaagattcttccagccttagaggctagttcctgttttctccctctgcctctaagcccaactccagctgggccacccacccgtagagtttgtacaactctccaactctgagcctggaaagaggccttccccagatatcccctagacaggatcccagggacacagcccaccagcagcgcagcagggtgaggcagacagaccaggaagcagagatggtggaattcttcactgcagagaaagaggggaaagccagacttctggcctgggaattgacctaatgggaactgtaccaaagggtggggccagatccttagctgtgggaactgaccaggacctgggctagacaaggcagctgccacagagccagggcagaggtttggtccctctgttgtcctcattccttgctctttccctgggccttctttctattgttgaaacacagcaaatgtggccatggtggtgggggatgggaaggactgcatttatttgccttgatccagcctgggagaagtcaggatagactttgggctgcttggccctggaggcagcttgagctgggactggggtggggggctcctgaggggctgcctaggacactgcagcttttgtgccttctccctgctgccaacacccccacacacactgctgcagccactctaaagccctttgtctttcattgcttagtcaccccctttgtcctcatctcaaataggggagtggaaaggggcagtagagttctctggtgatagctcctcttgcccctgccccttctggtctcccaccctttgtccgactcctctagtcccagccccgttggcttagaaccagggtcaggcaagtggtgggtcaagaggtgggtctggcagtcacaagggggtgggtgatccaggaagtgataggcaccagggcaggtattaccgacctgagcaggaagggagggggaaaggaagtattctgacggatatgatatgcgggggacaggaggtgacaaagcagagtgaataggggaatagaggcaagaggaggtggtccacttctgggaaaggaaagagactgctgactgcactctccttcctggggatttcctggggaaacaagcagccagaggatggggtgagcagaaattgcccctacttctgaacccttccttgccttgagagttcatacccaagacctcttttccgagttccctcctatccaaagccaaaggaataatttgcttcctttccctaacaccacctcttcctccccagccactttccccaccccaggcaatggatttctcccagtaccctaatttccctatatgcacaatgctgtctccaccctctccctgccccagggagaattaaaaagaaaagatgactagatattccaggaaccactgggttctcagagcaaggtggggtggatggtgggagccaggtggggattctcccagattgatactgggtgaatctgggttcctgagagcaagtcttgcctatgctgggggctggctgacttgaggctgggggagggtttagggcagttgggagtgggtaggagcagggccaaaagcctgggggaagctactgggagctgggccagggaaatggggagtcaggaagtggggagggggaaccctggggggaaatggaggcggaatggctgttctgggctttggagggggtgggtagtggtaactcaggaagggggatcctgagggagagaagggacgttagaaaagaggaggtgccaccctggatccgccttctataaaaggaaaagtcgttaacccctcctgccttgtcatctgccgcctctgttatgttcattccaagcaggatcatcctacctttgggcagtcaactccctgatcactgtctccttgcctcccccaatgttctgccttttttactcttcccagctgctcagttctatcctgagccatgtcaagctacctcttttatttgttcttccctcttgatgcctccttacctgttccctaccctcttttctcaggcagctcactcagtcccctcagccctggaaaccagccactagggccaaagggcagcatgagggagccttgagaaaagagaagccatggtaggttagactataagagcaggaattctcccaggaccgtgatcctatctgtgcatgccggccaggccctttccctcactctctgcctctcctggggctctgtcccaccaaaaagggaaagagacagctgagggctgattgtggggtttgggaaaaggctatgtcatcagctggcccagtgcctattatccattcggctgctagagattcccctcccctgggcaagtcccatttttttgggaagcgatgatacacccatctgagtcccaccgacagagctcagctgagtggcttagagatcagccaatcaatcgcagaggctcaccatgcttaaaagagctggcgcggagagaggctggggagaacccacagggagacccacagacacatatgcacgagagagacagaggaggaaagagacagagacaaaggcacagcggaagaaggcagagacagggcaggcacagaagcggcccagacagagtcctacagagggagaggccagagaagctgcagaagacacaggcagggagagacaaagatccaggaaaggagggctcaggaggagagtttggagaagccagacccctgggcacctctcccaagcccaaggactaagttttctccatttcctttaacggtcctcagcccttctgaaaactttgcctctgaccttggcaggagtccaagcccccaggctacagagaggagctttccaaagctagggtgtggaggacttggtgccctagacggcctcagtccctcccagctgcagtaccagtgccatgtcccagacaggctcgcatcccgggaggggcttggcagggcgctggctgtggggagcccaaccctgcctcctgctccccattgtgccgctctcctggctggtgtggctgcttctgctactgctggcctctctcctgccctcagcccggctggccagccccctcccccgggaggaggagatcgtgtttccagagaagctcaacggcagcgtcctgcctggctcgggcrcccctgccaggctgttgtgccgcttgcaggcctttggggagacgctgytactagagctggagcaggactccggtgtgcaggtcgaggggctgacagtgcagtacctgggccaggcgcctgagctgctgggtggagcagagcctggcacctacctgactggcaccatcaatggagatccggagtcrgtggcatctctgcactgggatgggggagccctgttaggcgtgttacaatatcggggggctgaactccacctccagcccctggagggaggcacccctaactctgctgggggacctggggctcacatcctacgccggaagagtcctgccagcggtcaaggtcccatgtgcaacgtcaaggctcctcttggaagccccagccccagaccccgaagagccaaggtaggcatctctggagtctgtgtcctgcggtgtcctcccgccatgtctgtcctactgacccctattcaccctctctccacccacttmcacttctggccgttctgcttccctcccttctgcctgcctttcctttctccatgagcctcctttcttggtaaggctcaggcctctccccttcacccttctcctagccagacccaccgagggttctcagaggtgrgtcacagactctgggctgggaataactgctccctctccccaccccaccccttcctggccatggcatctcctactgacacagtccccagcagtaaaggtctcctaacagccccttggccttggctcttttctctgctccaaatttgattttcatcccccactcccagctataggagtcaggtttgaggccctagggcttggtgtctggcttctgmtgctgcctttaaaatcactgtggcaaactgcaaactagggcaggagtggcaagagagggagggtatcccatacctccttctggtcaatccccttcacacactgtggccggactgcgaggctgcctgaggctccatcctttcctccctcccactcctggtctcccccttcttcccttccctcctccctcctccctctctagctttaatccagaccagacgctccctccacaaccgccacgctgagctctggccctggccctagctgctgactgaatcgttcctccaaccacacagggcagacacgttgcagcccagccctctagccctggtcccataggccccagccacactcaggcctggagaaccccaaagtccctcctgacggcagtccaggctgctttcacctctggggctcccgcagccctgggatgtggcgtccccttctcctccccttcttagaaccagctgctgactcctcagagttaccacaaaagccctgagatttggcgttgggggaagggcccaaccaagacccgccaggagtcaggaatcccgtggggtgtgtggggcccagctgactatgctgagttccagacccaggaagtgagggattggagaatcgaccgamccatgggtctgagaggctatttcaggatcttcctctccctttttctctacagcgctttgcttcactgagtagatttgtggagacactggtggtggcagatgacaagatggccgcattccacggtgcggggctaaagcgctacctgctaacagtgatggcagcagcagccaaggccttcaagcacccaagcatccgcaatcctgtcagcttggtggtgactcggctagtgatcctggggtcaggcgaggaggggccccaagtggggcccagtgctgcccagaccctgcgcagcttctgtgcctggcagcggggcctcaacacccctgaggactcggaccctgaccactttgacacagccattctgtttacccgtcaggtgaggccscagtcagcaccgcaggccatgcactgcacaattctaagaagcgccactacatagactatgatgcaaatgatgttcctggagttgtgtgacatggtgccttgccccagccacactgccatgtgtggctacctaggccctgacagtgctgggtcctcagtgcccaggtccccgggaatctggatctcaacccaatggacccaggtgtcttggctgtctatgcaccttctatgatccctctccacaggacctgtgtggagtctccacttgcgacacgctgggtatggctgatgtgggcaccgtctgtgacccggctcggagctgtgccattgtggaggatgatgggctccagtcagccttcactgctgctcatgaactgggtaaagtaggggtggatgagaaaggtattagggaggagaaggtgggggagggggtagcaagttcaccacagtgttaatgggggtcccaaggtattcttcccccaggcctaggtatagggctattactcctctctgctccaggtgtagacatacatttacatttttctattaaataaattagttggtcgaaactactgtgaactcctckgtgtgtgtgtgtgtgtgtgtgtgtstgtctgtgtgtgtgtatttggagggggagtcagagacaatgggtggggtcacagttgggaatgttggctataaggaaaagtgggtagggagggaccctgagtatattttggggaagaggagacagagaaagagacggggctacatactgggagccctgagagtaccataaaggaaaggactgggggcagggtgaggtgggtaatggatctgatcatccacagctgcagccagatttattatggagtccctcagggcatggggaagggaccctcagatcctatcagggcctttgctcccacaggycatgtcttcaacatgctccatgacaactccaagccatgcatcagtttgaatgggcctttgagcacctctcgccatgtcatggcccctgtgatggctcatgtggatcctgaggagccctggtccccctgcagtgcccgcttcatcactgacttcctggacaatggctatggtaagcagatggcacttacctttccctgggtagcactcaattcctgtcctccagggcactctcacttccgctgcattctgcatggaccaaattgcctcccccaagtgtgcttcctctgcagtgtgggaaggggtgagaaatgctgctgtctttgtgtagttctcacttcctcccagaataaatagcatagctagaggaggcgaattttggctyagtagaattagaactgactttctgagggccagaactgtccaccactggaatgggctggctatgaaggaggtgattaccttgtcacgcagtgaggtatgcaagaatagcaggatgactgccactaggcagagatgttgatgagaagcaaactcaaatattctatagttggttagaataggcagaattgagttcctatccttactctgttttgttttgttttgttttgttttaaatacagatgtggtctcactgtgttgcctaggctggtctcgaactcctaggctcaagcaatcctcccacctcagccttccaaagtgctgggattacagacattaagccaccatgcctggcctcttattctgttctttaagcaggtgtagatgtgtgactgtaagttacttcacctctctgtgtttgtagttgatatgtcagataagtataatagcggtacctatctcatagktatttgccatgattaaatagtgctggtcaagcatttagccaatgctcatctcataataagcatccaataaactatagctgcccattaaagcctcttacagggctaggcacagtggcttacacctgtaatcccaatgctttgggaggctaaggtgggaggattgcttgagaccaggagtttgagattagcctggacaacatagcaagaccttatcactacaaaaaattccaaaaaattagctggacatggcacatgcctgtaatcccagctactcaggagcccaaggcaggaagtttgcttgagcccagaagtttgaggctgtagtgagccatgatcatgccactgtactgcagcctgagcgacagagcaagactctgtctcaggaaaaaaaaaaaaaagtaagtaattaaaayaaaaattataaataacaaaaatttaaatcctcttatagtcctaggattgtttttctaggctccatcaggccccagggagcctaagctttctgctggcaatcctgaatgctcccctcagcccgttgctgactttgtgccccaacccccttcccagggcactgtctcttagacaaaccagaggctccattgcatctgcctgtgactttccctggcaaggactatgatgctgaccgccagtgccagctgaccttcgggcccgactcacgccattgtccacagctgccgccgccctgtgctgccctctggtgctctggccacctcaatggccatgccatgtgccagaccaaacactcgccctgggccgatggcacaccctgcgggcccgcacaggcctgcatgggtggtcgctgcctccacatggaccagctccaggacttcaatgtgagatcctagggcaggggtggggtaaagggcccgggggtgtggggactggccttaagcccaggagagagttcacttatgccccacttccnttctgtgcctttgcagattccacaggctggtggctggggtccttggggaccatggggtgactgctctcggacctgtgggggtggtgtccagttctcctcccgagactgcacgaggcctgtcccccggaatggtggcaagtactgtgagggcygccgtacccgcttccgctcctgcaacactgaggactgcccaactggctcaggtgaggagtaggggggatgggagcccttgggaggggacagtagagcaggaaggactgtcccttgagtgcaagaccaagggggtgttkattcccctgctgctgtggggagtgcctttaacctctgggaattgtccttggccgtctgcagggaagagcagagctgtgctgtctagagttctcaggggttgggtggagggatgtggggtgatgtgaggaaggaaggaggggctctgactgttttacccctccagccctgaccttccgcgaggagcagtgtgctgcctacaaccaccgcaccgacctcttcaagagcttcccagggcccatggactgggttcctcgctacacaggcgtggccccccaggaccagtgcaaactcacctgccaggcccnggcactgggctactactatgtgctggagccacgggtgagggtcaggacacccccaggccctgtctatggtcacacacacccgcagtgctccctctgctttctgataacaaagatcacccaaagtaaccctgttcctacagccacgccagcccagtccaggattccactcagacttatctgtacatgggtatcaggaaaacgagccccagactccagatatgtggccaataggtccctctagcctatcctatttcccgtggtttcttttcctctgactccccatcttctaatgctgcatttggtgagaatcgaatgtgtggcctttgggacaagtccttcacccctcttccatgggctcctctgtcaamttatagtggtggtttcattcagctcctggacagccagtccctcaatggacaggcctcctggagatgactgaagtccctacactccctctctgtgatagggtggtgggttgaaggctgcacaaagaaaaacaagccccagcagcattttgctcccttcgccccaacctgagaatttctacaggctggctgccctctagcgtccatttagggacagtgccatcaaggtttagggcttggtgctgggaccagacagactgcacttcccatcttggctcctctgcttgccatttgtgtggcttttggacaggttctttagcttttctaaacctcaacgttccatccctaaaaacctcaaatagtggtggtgagatttacatttgtgtttataaaacacttagcatgctgcctgattcatactcagtgctctgaaaatgctggctagatgttatatgtgataataattattattgttatgattatcacccacatggtggcyggcactcacccatctacatcccctacttcatccaacttttccgacaacattgcttccctgatgggacatgggtctcgtttgatttaccaaccccttttgacttaggaggaaccttcagcattgttctttctcttttcctcaggtggtagatgggaccccctgttccccggacagctcctcggtctgtgtccagggccgatgcatccatgctggctgtgatcgcatcattggctccaagaagaagtttgacaagtgcatggtgtgcggaggggacsgttctggttgcagcaagcagtcaggctccttcaggaaattcaggttctttcaccatcattcctccctctaccttcctggacattctgggtcctagtgatgcagaggggaactcagcactgtttccactctcaaagagctcacagtctagcgggagatagacgagtaggcagctacagtgcggtttcccatgtattcatccgaagttggaacagggtgttgtgagtgcccttgtgggcatcagggaaggcttccttggaggtgacctctgagctgagtctcagaaggagggtaggaattagacaggtaccaaggaagtggggcttggaagggcaactcaataagggggcagtgggtgtaaaggtccagagataagaggcagtagggcacatgtgcatgtagctctgatccagaccgaacagctcacataggattgggtgacagccatctacacacatgtacacacatacagtcacataagcacagctcagaaggctgaggggattcaggtgatcctgagctccccatctactccttccacacaggtacggatacaacaatgtggtcactatccccgcgggggccacccacattcttgtccggcagcagggaaacsctggccaccggagcatctacttggccctgaagctgccagatggctcctatgccctcaatggtgaatacacgctgatgccctcccccacagatgtggtactgcctggggcagtcagcttgcgctacagcggggccactgcagcctcagagacactgtcaggccatgggccactggcccagcctttgacactgcaagtcctagtggctggcaacccccaggacacacgcctccgatacagcttcttcgtgccccggccgaccccttcaacgccacgccccactccccaggactggctgcaccgaagagcacagattctggagatccttcggcggcgcccctgggcgggcargaaataacctcactatcccggctgccctttctgggcaccggggcctcggacttagctgggagraagagagagcttctgttgctgcctcatgctaagactcagtggggaggggctgtgggcgtgagacctgcccctcctctctgccctaatgcgcaggctggccctgccctggtttcctgccctgggaggcagtgatgggttagtggatggaaggggctgacagacagccctccatctaaactgccccctctgccctgcgggtcacaggagggagggggaaggcagggagggcctgggccccagttgtatttatttagtatttattcacttttatttagcaccagggaaggggacaaggactagggtcctggggaacctgacccctgacccctcatagccctcaccctggggctaggaaatccagggtggtggtgataggtataagtggtgtgtgtatgcgtgtgtgtgtgtgtgaaaatgtgtgtgtgcttatgtatgaggtacaacctgttctgctttcctcttcctgaattttattttttgggaaaagaaaagtcaagggtagggtgggccttcagggagtgagggattatctttttttttttttctttctttctttcttttttttttttgagacagaatctcgctctgtcgcccaggctggagtgcaatggcacaatctcggctcactgcatcctccgcctcccgggttcaagtgattctcatgcctcagcctcctgagtagctgggattacaggctcctgccaccacgcccggctaatttttgttttgttttgtttggagacagagtctcgctattgtcaccagggctggaatgatttcagctcactgcaaccttcgccacctgggttccagcaattctcctgcctcagcctcccgagtagctgagattataggcacctaccaccacgcccggctaatttttgtatttttagtagagacggggtttcaccatgttggccaggctggtctcgaactcctgaccttaggtgatccactcgccttcatctcccaaagtgctgggattacaggcgtgagccaccgtgcctggccacgcccaactaatttttgtatttttagtagagacagggtttcaccatgttggccaggctgctcttgaactcctgacctcaggtaatcgacctgcctcggcctcccaaagtgctgggattacaggtgtgagccaccacgcccggtacatattttttaaattgaattctactatttatgtgatccttttggagtcagacagatgtggttgcatcctaactccatgtctctgagcattagatttctcatttgccaataataatacctcccttagaagtttgttgtgaggattaaataatgtaaataaagaactagcataacactcagcatctagtaagtgctcaacaaatagcagctgctgttacttactgttatcaaatttctgtccacatccactctccatatgcacttgaaggtggcaaagatccacaaccatggtgcctgcctttatcctcagggtccgttcctttggttggcagacccctatcctgggttctgagggaccaacagagaaaggaaaattccatccctcacctctggaagttcccaatcacaggaaggaaacatagtaagcacgtggctacaaatacaattgacaagaacatgaaggtgcaggataacaagaacaaataacaagaacaactgcatcaacacaaatgagtgcttagtaataagggtgatagttgaggggtctgggtttcacaacagtagaaagagcactggagtgggagccagcgggtctggattcaatttggggctcggcgtcttattagctgggtggtgttgggtaagtcactgatgctgagccttagattgctcatatgggactaacagtatctactcccacagagttgttctgggaacaaatgctagaatattttcaaaatagtaaaggttatagtcatggccatgtgagaggttacccctatgactacctgaagatggaacggagtctccagaatctgccagtgtaaacccagcagaatgcctagaagatgtgagattagaataaaatttcataaaacaaaaacaatcgggcacggtggctcatgcctgtaatcccagcactttgggaggccgaaatgggcggatcacgaggtcaggagattgagaccgaccatcctggctaccacagtgaaaccccgtgtctactaaaaatacaaaatatatatatatatatatatatatattagccgggcatggtgacaggtgcctatagtcccagctacttgggagactgaggcaggagaatgacttgcacccgggaggcagagcttacagtgagtcgagattgcgccactgcactccagcctgggagacagagtgagactcgtctcgatacaaaaacaaaaacaaaaacaggatatggtttggcaggaaataggcaagaaggcaaaaagaataacctggaaaaggatctgaggtaagggagccaggtgcctcaaaatggcagaatacctgatgcctgaggagagggagggaataaaacatctgcattttcccctctgggcaaggcgcctttgcttgagaaagaattttgggctggatgagatggttcacacctgtaatcccagtactttggcaggaggattgcttgaggccaggaggttgggaccaacctgggcaacatagaaagattccatctctaccaaaaaaaaaaaagattgaaaaattagccgggcgtggtggcacctgtagtcccagctacttgggaggctaaaataggaggactgcttgagcccacgatttcgaggctatggtgagctacaatcatgccactatactccagcctgggtgagagaccaaaacaccaactcaaaaaaaaaaaaaaaaaaaaaaaaagggccaggcatggtggctcacacctgtaatctcagcactttgggaggctgaggttcaaaaccagccaggccaacatggtgaaaccccatctctactaaaaaaaaaatacaaaaaattagccaggtgtggtggcaagcgcctatagtcccagctactcatgaggctgaggcaggaggatcgcttgaacctgggaggtggaggttgcagtgagccgaaattgcgccattgcactccagtctgggcgatagagtgagactccatctcaaaaaaaaaaaaaaaaaaaaaaagaacttgggcagtcctctatgtgtcatggatggaacagggatgggcaagggtggtaggtagaccctgcaagaatttggagttttgagaggcagacgcaggactgctagggattggggaaggtactggatgtggggttgtgggagaaactataggtaaagaagaccctgaggttgaggtggaagagtgaagaatgggggaaccaaaggcacttcactctgccatagcagcccctagctgggatgccaaatactgcttggaatgtgaagctgggactatggggttgaggcaggccatggaggttgtagtggttatatgtgctatgcttactggatctgggctttgctaatcaagttctgtaccaggcagtgccttatacagcaccctgtactctacaccagccagcacagcgcctgcttcctctgcagcaatgagaaaagactgcccacactctcttctctccagtaaacacggttctccctgctaggcttggccccctggcccttcctgtggtcctcctactaaccaggctgaagaagatggagacaagacaatagtgatctttactcgtttcatctagtttgcaaaatgagaccacagatagtatgtttatggaccttgatactatgagttgatggtacaatgagcagagttctgtgataagtagatgtaaggtacaaatacaaacaatatatacgactgtcctaaaggggttcacactgcattctgggcaggggaggttgtatactgctcccactccaccttccccgcaaacagaagcaatgggacagtaaaagggactagaagataagagcctaatgagccctgaactgaatggactatgagggttatggagggctaccttgggctgggccctggagaacaggtcatcatgatagcccttctcactttcctttaatgttcatggagatacacttttttttttgagatagggtctccctttgttgaccaggcaggagtacagtggtgtgatcttggctcactgcagccttgaactctcaggctcaagcaaccctcccacctcaacctcctgagtacctaggactacaggcacgagctaccacacccagctaatttacttttttttttggttgagacgaggtcttatcatattgcccaggctggtcttgaactcctggcctcaagggatcttcccacctcgatctcccaaagtgttgggatgaccagtgtgaaccaccatgcctggccttttcttttgagacagtctcgctctgtggctcaggttggagtgcagtggcaccatcataacttactacagccttgaactcctgggctcgagtaatcctcccacctcagcctcctaagtagcttggactacaggtgtagattcacttttaaatcacttttctgcctgttattttaagagaaagcccttcgctcaccaagtagggttctcactggcataagtaagtttttctgaaaatgagactgagcttaggggccacctctgtgattgggtaagtaagcaggagctagagtgaaagaggggcagagagagctagctcatcgaagagaagtgatgggcatctcagccctcaatcccaggcaaggcctgacccttttctggaatggtctctgccttaccacacctccaagacccagattgtaggtaggctttacctaataggagtccaacaagttcttgctagggatgggattgtgggggggcacatatctccctgtaagagccacagtgagctctgtttcccatctgcctacttattgccctcgtgggcctgagctggggtgtagatatataaggaggaacagaaacagtaataacaggaagtaaggaggcactgaaacaattcaagtatctggtcctggagatgaaaagaggaaatggaaaaagaaaaggcattgaatgacaagggattagaaccctgtccctagagaagttcaagaagagtttggacaaccattttatgagatggcaagtgttgtgcatgagtatgtgtttgaggtgggggaggaagttgaagcaataagttgggccaatttcctaaagtcccttctgcccctgagattctctgcttctgtggttcaaacagaggaaatctggacatttgtccagccactatttttgtaatggaggtgggacagccagggttcctggagtgtgctgtggaatcggcatttacacttctcttccatctctagtctcatttctgtaatcttcatacagtattacagtattttgttttctaaaataccagattggcagtaagtgacaaaactagcatctcattggtcagggcttgtgggggaggaagggagaagaaagtggatttcaatgtattaacattttattggctgagaggatgtttctgaaccaattgagtaccttccccattgactgttgctggggccaagccaaaatcattggcaccacgagaaaccagatgacagctggaggaaaccacgagtgctaaaaatgctcagaaagaggggggtcagggaaggcgggggagcaacaacactgaacaacttccccaggcaggatcttacatggggacagacccagggtacttaagtagcattaggaaggaaagggaggggaggaagtagattaagtatccctcacagtcttggcacaacaaacaggcaccatacacccacaccaacagtgacacattgacataacacacatccaacttcacagagacacactagcacattctctcttttttttaaaatttattttattattattatactttaagttttagggtacatgtgcacaatgtgcaggttagttacatatgtatacatgtgccatgctggtgtgctgcacccattaactcatcatttagcattaggtatatctcctaatgctatccctcccccctccccccctgcctttctttttcttcttttttttcttaagacagattctcattctgtcacccaggctagagtgcaatggcgtgatctcggctcactgcaacctccacctcccaggttcaagtgattctcctgcctcagcctgccaagtagctgggattacaggtatgcaccaccatgcccagctaattttttgtatttttagtatagagacggggttttccatgttgcccaggctggtcttgaactcccgggctcaagtgatctgcctgcctcggcctcccaaagtgctgggattacaggtgtgagccagggtgcctggccaacacattctgttgataatatagatgcaaataagtagtagggagcggaaaatgtaagaattttcacctgaaaatggatctgaagagtaaaagatattaattgacctaatcgtgcattgagaattgactgtttatcccatttatttgttcaataaataagccaatgggttgtaaacattgtaaacattccacagcatgtggaaaggacatggatttttggagtcaaattgaatctaagccttgctacttacttacctgtaatgatgcaaccttaattacttgatctctgtaaacctcagtttccttacctacaaaacgtttgtactattacctgccttatagagaggtccagacttaagaatatgatgatgtaaatgtttggcactgtgtctggcttttagtaagtggtcaataaaggccagttctcctttccttatatctcttcctttgtctgctccctgacttctaacccctgcattcacgtgagaaaacagttatatcaaggaactgtctaggtcagatctaagggccattttgtaaatttgtgcaaaaagttctggcttacattgaagggatgataaaaggaaagacatggtcctaatcctcagagttcacaatctggtggctgagacagtcaagtaggacaaaaatttcagacttctgtgataggtgccatgatcaaggaggggcacctagcacagaatatgaggccacagaagtgtttctggaggaggtgcctgtctctccttctagaagtgagcagtaaggctgggcacagtgacccatacctgtagtcccagcactttgggaggccaaggtgggaggatcacttgaggccagaagttcaagaccagcctgggggacatgatgaaacctggtctctacaaaaaatacaaaaaaaggcagggtgcagtggctcatgcctgtaatcccagcactttgggaggccaaggcaggtggatcatgaggtcagagttcaagatcagcctgg

SEQ ID NO: 96582 - DNA, 14130 bp, Homo sapiens
tcactagagccaggtggtcagacctgcagtgaactgtgatcctgccactgtgctccagcctgagtgacagaggaagaccctgtctcaaaaaaaaaattatgtaagtttattgagatgtagttcacatactatacattttacctatttatacaattcagtgatctttgttcacagagttgtgcaaccataagcgcaatcaattttagaacactgtcaccctaaaaagaaacaccgtctcaaatagcagtcagtactcatttcccaccaattccctaagccccagcaaccattaatctcctttctttctctataaatttgcctattttggacatttcacataaatggagtcatataatatgtgattttttgtgtctggctcccttagcataatatttaaaatttttctctatataatataaaattaaaatattttaattaaaaattgtatactaaaaatgctaaaaattaaaaagttttagtatacaatttttaattgaaatattttaattttatatatagtatagcatttatcagcacttcattcctttttatggctgaataatattctattttctggatatgctgtattgtatttatccattcatcaattgatggacttctgagttgtgttcaccttttgaccattatgaataatgctgctatgaatattcatgtacaggtatttgtgtggacatgtattttcatttctcttagacatatacctaggagtagaattgctggtcatatgataactctatttttttaactttttgaagaactaccagactattctataaagcacctgcaccatttaacattcctagaagtagtgtatgaaatttccagtttctccacaacactagttattgtctgactttttaattatagctgtcctagtgagcgtgtggttccgatttgcattttgctgatggctgctgatgttgagaatcttttaatgtgcttatttgccatttgatatctcctcaggaaaatgtttattcacatcctttgcccatttataatatttagtattttttattgagacatagtagatgtacatatgtttggggtacatgtgataatttactacatttacataatttgtaaagatcaaatcagtgtaattgggatattcatctcatcttaaatatttgtctttatgctagaaatatttgatttattctcttctagctattttgaaatatacaacatattattgtaaactatagtcaccctgctgatctaccaaacactaggtcttgtttcttctatcaaactctatatttgtaccccttaatcaacctctcttcatccctgcacccccacccttctcagcttctggtaactaccagtctactctatatcttcatgagatccacttttttagctcccacatatgaatgagaacatgtaataatgtctttctgtacttggcttttttcacttaacatataatgacttccagtttcacttacgttgctgcaaatgacaggatttcattttttttatatggctgaataacattccattgtgtatatataccatattttctttatccattcatccactgatgggcacttacattgattctaataatttttgttattgtgaatatagtgcttcaataaacatgggagtacagagatatcttcagtatattgattttcttttgggtttatattcaaaagtggaattgttggattgaggaacctccacacagttttccatagtaactgtactaatttacattcccagcagtggtgtacgaggattctcctttatccgcatcctcaccagcatccattattcattgtctttttgataaaagccattctaactggggtgagatgatatcgcattatgattttgatttgtatttctctgatggttagtgatgttgagcatcttttcatgtgtctggccatttttatgtcttcttttgagaaatatctattcagaccttttgcctatttaaaaatcagattatttgttttgttgttattgagttgtttgagctccttatatattttggttgttaatcccatgttagatgagtagcgtgtgaatattttttccattttatgaattgtctttatcacttcattgattgtttcctttgctcaacagaagcttgatgtaatccttttgtctatttttggcttggttgcctgtgcttttgaggtcttacccaaaaaaatctttgcacagaccaatgtcctggagcatttccccaatgttttcttctagtagtttcatagtttcaggtgttagatttaagtcttcaatccattttgacttttgtatatggtgagagataaggaggttctgtttttagtttcattgttctgcatgtggttattcagttttcccagcaccatttgttgaagagactgtttttttccccattgtatgtttttgatgcctttgttgaaaatgagttagctgttaatgtctggatttatatgtaggttctctgttctgtttcattggtctgtatgtctgtttttatgccaatagcatgctgatttggtttctatagctttgtagtatattctgaagtcaggtagtgtgatgcctccagctttctttttgctcaagattgatttggctattcagggtcttttatggttccatacatattttaggattgttttttctatttctgtgaagaacgtcatttatacgttgatagggattccattgactttgtaaattgctttgggtagaattgttttgttgttttgttttgagacaggatcttgctgtgtcttacaggctggagtacagtggtgcaattacatacagttcactgcagccttgacttctggtctcaggcaatcctcccacctttcagcctccccagtagctgggactataggcgtgtgctaccacgtccagctaatttttgtattttttgtagagacagggtttcaccatgttgcccaggcttaccttgaactcctgggctcaggcagtccttcagtctcggcctcccaaagtgctgggatacaggcgtgagttaccacattagccagaattgttactttaacaatattggttcttctaatccatgagcatggagtatcttttcatttttctgtgtcctctttaatttctttcatcagtgttttatactttttctagtagagatattttacttctttggttggattgattcttagatattttctattctttgtagttattgtaagtggggttgctttcttgatttttttttcagattgtttgctgttggtgtatataaatgctactgatttttgtatgttgattttgtatcctacaactttactggattcattgatttttttttttttttttgagacggagtctcgccctgtcgcccaggctagagtgcagtggcacaatcttggctcactgcaagctccgcttcccgggttcacgccattctcctgcctcagcctcctgagtagctgggactacaggcgcccgccagcatgcccagctaatttttttttttgtatttttattagagacgtggtttcaccatgttagccaggatggtctcgatctcctgacctggtgatgcgcccacttcggcctcccaaagtgctgggattacaggcatgagccaccacgcccggaccattaatcatttttaacagtttttttggttgagttcctcaggcttttctgagtataagaccatgtcatctgcaagcaaggctaatttgacttcttcctttccaatttggatactctttatttctctctcttgcctcattgctctggacaggacttccagtattacattgaataaaagtggtgaaagtgggcatcctggtcttgctccagatcttagaggaaaggcttttaatatttccacattgagtacagtgttaggtgtgggtttgtaatatatattctttattattttgagggatgttcctttgttgagggtttttatcatgaagtgatgttgaattttatttaatgcttttccagcatctgttgaaacaataataggcttttttgttcatgattatgttaatttgatgtatcatgttcactgatttgcttatgttgaacaatctgcatccctgggatgaattccacttgatcgtggtgaatgatctttctaatgtgatgttgaatttggtttgctagaattttgttgaggatttttgcatctgtgttcatcagggatgttggcctgtagtcttctttttttggttgtgtccttgtctggttttggtatcagggtaatgctggtctcatagaatgagtttgaaagtattccttctgcttcaattttgtttgaagagtttgagtagaattggtattagttctttatatgtttgatggaatttaggaatgaagccattaggtcctgggctcttctttgatgggagactgttatggcttcagtctccttactcattattggtgtattaaggtttctctttctccttgattcaaccttggtaggctgtgtccaggaaattatccatttcttctaggttttccaatttgttggtgtatagttcttcataacagtctctcatatattagcctcttcataatagtctctttgtatttctgtggtctcagttgttttatctcctcttttgtttctggttttatttgtttggatcttctctcttttttccagcctagctaaaggtttgttagttaattttgtttgtctttttaaaaaaaacaacctttcattttgttgatcttctgtattggtttttagtctcaatttcatttatttctgatttgatcgctactatttatttccttccactaattttgggtttgttttgttctttttctagttccttcaggtataccattaggttgtttatttgaagtctttctactttttgacataggtgtttattgttataaacttccttcttagtaccacttttgctgtatcccataggtttgggtatgttgtgttttcatttcctttggtttcaagaaatttttaaatttccttcttaatttctttattgacccattggtcattcaggagaatgttgtttaattttcatgtgtttgtgtatttttaagcttccttttgttattaatttctagttttattccattgtggccagagaagatacttggtatgatttctacttacttaaatttggtgagacttgttttttgtctcagatatgatttgtttcggagaatgttccatatgctgatgaaaagaatgtgttttctgcagccatgggtaaaatgttccataaatgttgattaggcctgtttgtgtactgtgtagcttaactccagtgttctttcttgattttctgtctggatgttctgtccattactgaaaatggggtgttgaagtcccctactattactgtattgcagtctgtctctccttttaaatgtattatttgctttatgcactcagatgctctggtgttgcatgcatagatatttataattgttatatcctcttgctgaattgacccttttatcaatacatagtgaccctctttgtttctttttacagtcttgatagtctgttttatctgatacaaatatagctactcctgcttttgtttccagttgcatggaatatcttttttcagcctttcactttcagtctgtgtgtggctttataggcgaagtaagtttcttataggcagcatatagtttaactcttgcttctttatctgtttagacagaattcattctgccttgtaattagagaattgagtccatttgcattcagtgttactgttgccaagtaaacttactactgtcatttcattgcttgttttctgttgttttagaactccttccttttttctttttcttactgtcttcctttgtgattaagagattttctctggtagtatgttttaattcattgctttttagttatagtgaatctgttataggtttttgcattgtggtaaccatgagactacaaaaacatcttaattacaaaacaaagaatagaaattttttttaaaaaccctctttttttttcctcaggtcccgctttattacctaatacaagtccaacctctggaacattcaaattcactgttgcaaagtttaattaaaaacacaatttacaaatatttaatatattctaaaaagcgtttctaagttaagaatgaaaaagtatgtacataatatataatcaaatacaggtggcctcaacttccaccaggtccacattcagcaacattcgtctttttaggttcttcagtatcttctgtcaaatccacagagttgttttccatgacgggggaaggaatggaaatccccattgcttttcaaactccgtatgtgcttatgatatcacctgtagttacttgctgtgcaagttctttaagattattggtcacttgttcagtgagatgcatttctctgtatgagggacccaagagacagatcatgttgggagggggtctggtgttgaaacattcattctgggcttcctggagctagctccctgagcaatctggtggtctcatcaagtttcttctggaatatttcagcttcctcagaatcaaaaactttaaccggaacgccaaagtttgttactgctttcagcgctatgagcctgtcttgaagtattggagtccagacatcctggtggctctacttctgtaatctccatttcttttgctgtgtcaggtgtcctagtatggccttccatcttcaggcagtgacatctaaatctcttgtagggtcctggaatgccctccttttgttaaaacatccagtaaactatctgccatcacagatggataatcttggcacgtggccaaaaactcatggctgctgagatcgcttggaagatctgtgtcttccccataggttgaatagattaaatcagaatcattcttgttgatatttgcatatgtggagtcataatgcggtgcataagaactgtagggcccataattcaaatataacactggagtgactttgttcttttgtcctctttgaacccctgcaaagtattcacaccagactgaagtcttccagttgtcattcccagtctcacagggcagtagcctggctctcctacaatgagatccacaggatggagaagtcccaacattgttgttccgtctggttttcttctttccaatttgcactgactgttcacaagccgcctggtcagctttcctccagattccttcacgatgcggtcaagctgctcctgcgctctctctaaattattgcttttaaacttatcttcaagcatgtctttgtctttctttttattttctttgctgggactcttgaaggcgtgtgctttrgcatctccagagtcctctctcttctcggccagcagcctctgtcctccccactctgcgaggtgtctgttctgtcttcctgcttttgagttttctgcaagtcagccatgaagtctatgctctgcttcaggctctgaattctttcatgtctaagaattttcatccccgagtgcaaccgcttctttgcagctttataataaatggtctctggtttattgtaaatcatggcattagtacacattagtttgaaaatatcctttagtttttctatggactggtagtcattgttcttgatcttttctttcatttaaaatccattgggtgtttaatgatcatggagtagccaggagcagtaaaatcagtcacaggaaatgaaagaaagcacttggatcttttctctgcaattgtctcgccagttgattcaaagcttcttgaaggggtggggtatctgttctacttcttcttgtttggctaaagtgcttgtgagaggcttctcaccgggcaagtctaatcccacaggggcgtgacactggaggtctttttctgcctcattctccaccccgtctcaatctcgcttctttttatcctccttaactcttatctgttttctccccttttcttcccctggaacctgcttgtctcctttctttctctttttccactttctgtccttttgtttgtcatgattgttttttgtcttcgaagaggctggagttgtgccccgagctgcccacggagagttcggtgacttcattccctcctgctttgaggaccagcttcaagggsttctctacatactcctggtagaggtgtttgtccgacttgagcttcttgtgcttgtgcttcttgtccatgtccgaccgggcccctgtgctcaccccccgcgccaggcccaggcagtgcggcgctgcttccggtctgggccaggcgagccgagggcgggagcggggcccgcgaggcccctctcgagaagctaaaaaaccctctttcctataactccaccccaccccgccccccacattttgacactatgttgtgttaatttttatgtttttatattgcctatctcttaatgggttgctataagtattactgtttttggtagatttgtcttttggacttcataccaaacagagttacaaatggattgtacactacaaattgcagtaatagagtattctggtttgtttgtgtacttaattttaccagtgggttttatacctttacaagctttctttttgtaagttagtgtttttttctgtctggtggaagaactcccatgtgcatttttttgtaaggtggttctggtggtggtgaattctcttagcttaagtttgtctgggaaagactatgtatttgactgggcacaatggctcacacctataatcctagcactttgggaggcagagatgggaggattgcttgagtccaggagttcaaaaccagcatggtcaacatagcatgattcccatcactacaaaagaagatttaaaaaataaaaagacaaaccaaaaaccctcttttttatatttgaaggatagcattgctcaatactttattcttagatggcatttttttaaagcacgttgaagatggcattccactctttcctggcctttatagtttctcttaagatgtctgttgccagacaagttggagcacttgtatacatcatttacttcttttctcttgctgctttctttgtccttgacctttgagtgtttcattattatataacttgggagtagtcttatttgcatcaaatctatttggtgttgtcttacctttattcctgtacctggatatttatctttttctcaagtttttgggatttttttctgttatttcttgaaataagctttttgcccctttcccttgcttaacaagagccctcactcttaaataccaataaatttcttagattttgtctttagaggtaattttctgtatcttaaaggcagccttcattcctttccattggtttttttcttttttctcctcatgtattttcaaatagcctgtctttgagctcactgacttttttttgtttcatatatcctgctattgagagactttaatgaatttttcagttcaccaaatgtatttctcagttttgatttctgtttgttttctttgtattatttcactcctcttgttaaatttctctaataaatttctgtattacttttctgtgttgtcttgtaggttatttagtttccattgtgctattgagagtatctaatgaatttttctgttcaccaaatgtatttctcaatttcgatttctgtttggttttttttgtattattttgatctccttgctaaatttctctaataaatttcttaattacttttctgctttgccttgtaaaagttactgaatttccttatacctggtattttgaattcttgatcagaaagctcatgtcactgtcttcttagggtcagtcactggttccttgctttgtctgtttgaggtcatggttccctgttttctgttgtttgttgtggatatacatctgtgtctttgcattcaaggattagttatttattctagtcttctctatctggcttgttttggtttttatcgaatatgcttgcttagagattctttgaagtttacctgttaattttctttctttttttttttttcttaaatctgctaggttgctgcctccttttcagcacctaacctctgggtagaggttcatgtccaatgaacctgtgaaatgaacctcttaacagtgtggtgctgctgaacagccactccaacttggcatctcttttggctgagttacatagcagagtttccaggactagggatggtagtcccacctccgacctcttctctttatttctggtggttttcagggattatttctcccttaggtatttccactgctcccagttattaggacagggataggtctcttgccaacaaacccaagatggtggagaagccagttgtccacctcagttatactttttccagtgtagcaactctgagttgggaaagttttctgcatgcttggtgctggacagattgaggggaggggcactgtgattatgaaagtctaatttgctttcttttgctcagagttttttcacttctttgtggccttgggaactgtctcctcatatttgagttcgggatattgctcatgatcgtgtcagcactgtatttgtggttttggtttcctgtggcagtgagtgaagccaggttacttctgtaccaccgttttacaaccagaagtctctgtccattttaaaattttattgtctttttattattgagttgaaagagttgtttgttctagatacaagtcccttatgaaatatatgattcacaacttttttttcattctgtgcattgtcttttcaactttcttttagacaggtaaaagcttaaggtcctttagtattcagctaccataaaatatggttgaataatttactagacttgcatataatgttaattaccaataatattttatttatttgcatttgaaggagcatttaggtatttatgtacaaatttgaccagacagtaagtttgttttgattaacttttgatattgctttaaattgagatgaattttcatgtcataatcagaatttttttttgagactttggtttatttacctttcaattaaaataccacaaaaattaatgtgtgtgaccattctggctaaattatctgaaactaaaaagtgtttgttttacaagccagaattttatttttcactaaggttaataacactaattatttttatgacgtttagtctgaaaggtgcacattttcttggagatttgtgcttgaaactactgttagaagctttgttttttaagactgagctttttagaaatagttgtaccatggtgtgtgcctttgagcagtacccatatagtttcatagttattgaaaatcaagggaattgttgatttactttctataacaataattgcagattaaattgcttatgaactttggatacaacatttcatcagatttctgacatattaatcataaaagaatcatattaatcatcaaactactgttgttcagtttggaagttggcccttaacccatttatgcctagtgttccattattgggctgctaagcttgtgggagttatttatatcctactgctcagggtcatcaccaaagtctgatttttcacacacaaaaaattgcaacctctggcataaatgggttaattgattcccttctagttccgttccataaaggggagatgtgaggacattatacatatcttcattgtttataaggagaaagaaaatagtttataaggagaaagtaagatttaaatccatcaaattttcagctagactcagttgaaagccttcttagaggccacccaatttgaaaaagacatcctgtgcatcagttttacagtaacaaattctcggttttctgacatcaactgtgggtgttctacaattgaattcaattctgacactaactactactaatgtataccctacagggtaagggttctgtccgatagtactgctcacttcagacaccagccacaaatggagtccctaggctccctgcacttctgccctacctgaggctatccaggagcccccagctaccagtcatctcattggtacacatgtaaacacttaacacttaaaagaatccaaacgttttaggagctgtgtaccaggaagagggacaaagaccaaatatatatttcttcttatatcatagtatcataccccctcttgtaaatttttcattttagttattgaacttttcaattgtggaatttctatttggttctttttttataatttctctctcttcattgatattctctatttggtaagatgttggtctcatactctcctttaactctcttgacatgtttcttttagttttttgaaatagctggcttaaaatctttgtccagtaagtccaacaccttggcttcttcatgaacagtttctgttgtctgcttttatatatatgtgtgcatatatatatatatatggtgccatatttgcctgtttgtgtgttttataattttatttttgttgaaaaccagacattttaaattatgtagcagttctcaagttagattcctctctacccacccagtttatttttgttgttgctgcagtttatttcttcagtgattttcatgggcttattttgtatagtctctattcttttttcttttttgagatggagtcccactctgtcgcccaggctggagtgcagtggcgcaatctccgctcactgcaagctccgcctgccgggttcgtgccattcttctgcctcagcctcccgaggagctgggactacaggtgcccgccaccacacccggctaatttttttttgtatttttagtagagacggggtttccatgttcgccaggatggtcttgatctcctgacctcgtaatctgcccgcctcggcctcccaaaacgctgggattacaggcatgagccaccgcgcccggcagtctctatttgaaatctctgctcagctagcatagtggtcagttaatggttgaccagagatttctttaaatgcctcttttctcagcttttgctgaggggctctgtgagtatgttggggcagagcctcaagatcaaccagaggcaaaatattagtcttcttagatctttcctgggcatgtacatagccctacacatgcttatggccttctaaattcccttaactgtatcaaagcttttccaagcccccggtggacatttcattcctgtttgtacttttgaattttttggtcagcctcttgttagacccaactggtaaaatttctccaggcagctacagcaattaaataattgctgttgattgttttccacaaagaccctgccgcatatagggctcttcacatagtgtgagcccttcttcaaatcaaataaaggcaagtgctgggaatggagtgttgttcagcaagctgccagacaagtccaatagtggcagttttctgagggtagggctttggaggagctccaaatgggttccggctcctccagtggctgcctggctgctggtttttacagctgctatggatgcaaggctttgattttcaagactgttttgaagctgcagagggagagatcagattagaacaagttaaaatgccacaaagcttgctgttttagcattcatctggtgttcttgaataaatacgccttgaattgttgcaaacctttaatttccagagttctgaaaaagttgcttttgacagtttttgccagtgttcttgttgcttttatggaggaacagatattgaaaggtccttactcagcaattttgtaaatgcctcttttcagtcctatatacttttatctacatcctgccaccaatctctgatccagcctctcgttacttgcctatctcttatatttccactggatccttggaacactggttccatggctaatatgtttatattatcaaattttcactattagcttccctttcttgcctggtagccctctcagggctctgtctgtcacatttcacataaatcaaaatatttagtgcctctcttaaatatcggctcaggattcttgcctaggtcccttctcttgtattgggtattggatattttccctgagaaatcttacccaattgttgctcatactggcaaatctgtcttcttctctagctcagatctctttcttaagctccatatctgtatgtgtttcatttaaatatccatttagaaattctatagacatgtaaaattgtataaatgcaaaacagaagtcaacccgcccctcttttacagttttctttgagtgacattatcatccgtccagttgcctaagccaaaa

SEQ ID NO: 96583 - DNA, 12531 bp, Homo sapiens
gacattgtgagaggcactacacaatgacaacaaacattgccagcgactgctgagcccctcccccgcgccagcctcagcccagagaatgcaggcccggggctggctcgccgcgggccaaacacggacgcagcttgcgccgggggcatcccgagcagaggcatccctcggtgccaggcagccgcgggccctctccgggcatctcccacccggagtgctgggccagtgcccaataggaagccccgcgggggaactttcgccactcttctgccacataaacaagtcgggctcaagaccgtccaatgactgggcagggcggtgaaacacacttggaagtcctggcagcttcccggactcgactgagtttaacactctaggaggagaggaacccagggcggatgcttcactcgccccccttggccagcccctttacccagggccgaggatgttacaaatacgggcaaattctcgctctggcaatcttttccccgctgccttcccctcctcatctgcagcctggaagcaagttcagcaaaaggctgaggcgaaagtgtttccgcgcccccgattgcgcaggctcggtccacaggggcgactttccggggcgcgtgggctgcagcggcccgactgcgcggcgctccggcatcgcgcccgggctcaagtttctgggtcttggaggcccctccagtgcgtcctagccagtcgccgcaaagagttaaccaagtggggccggccccgctccgccgcccccagcagcgcgtctccaccgcgcacccccggccccgcgctcgcggcgatcctcctgaaccgcagctctgtcccgccccagagccagccagcctccctcccgcccagccgacttggcttcccgcgcgctcctcaccgcactcctccgggccccgcgatcctccagcacttcctcagctggaaggggcttcacggaggaccctctgcccccgccgttctccccgctttcctccccgcacccccccaggaggtgccagtaccgatgccctggatgaagacgaagccggtgaccatgagcactgggtgccagttaaactctagtgcgctcccatcccagccaagcccctctcggtagtggaggacccagacgagggcgaagatcaccgacaggaagccgacgagcagtgccgaccccagcagcgccaggaagcgccagtagccctccatggccatcagcgccccatactccgcaccgcgggggccacaagaacttggagaggcggcggcagccctctgggtagtggccgggcggcgggaccggggcgtcgacttcttggggctgtctccgcctgcggggagggactttctgggctgctggcccggaatgtggggcctcttgcgggtggggagctggccccaactcagaaatgggccccacccccgggatcacgcggccgccgagggcgctcactgcctggtggcctcaccctctccctcgtccagcatccaagctcgcagagggcttcagtaacagacctagttagttgctcaaagagaaaattccgaggattttatactcaccacttgcttttaacacttcccgtgtctcgtccttatttgtggggaggttgagtagggcagtggtgcgccctcttggttaagagaagagagggatccgttgggtagggttatgtgtgtgcttttaactactaacgaagcctccttagccacagtgctggagaattggctgtctctgacatcaaagggtgttaaggaggaacctgtaaggtggtgtaaactaaaaataaaatcctaagcccctcactgactgaatggacctccttggccaagcagaccccagaaaaaccttaaagctgagtttctagctacagccggaagggaagtctaccccctccattttggaatttagactcaacagctgactagcattaatgtttaaaatagaaatcataaggcggacagaacagactctttgtagcaataagacatcaaattataaaaaggacctaagtcacacactcctacacttaagaaataaactatggtctaactgccacaaaggttttcttttcctctagaggctaaacaagcactggcttgagataagcaatattaaaacaattacaacttaatcagttcacagatgctgaccagctgaacccctgttgcaccagccagaactacagctttcactgggctgatttcaggaactttttcatgataagaagaccgaccatggaccggttctggccagtgtacagggattgtgcacttgtatgcattcacgtcctgaaaagaccttttgaagtgtaggtttgaagtaatacatttaaatgtatttgaagtaatacaattaaatgttaagtctccaccccaaagagaacatgttacatgcatgtttgttcaatatgcatgtgtaaggaccacctccattaatattcatagctcctcctgtaacctgttacgtatgtatgtttggccaaactgttcagcataaagctcctaccccaacccctctgccttccaagtgcctgtctctggtcttaggccagaggctatgtttatcagcctatggaatggcctccttgcaggctataaccttttataagaaataaagtctcctcttttttcaaatttataattttttgttttaagttaacagtaaaggccgggcgcagtgcctcacacctgtaatcttagcactttgggaggctaaggcgggcagatcacttgagtccaggagtttgagaacagcctgggcaacaaggtgaaaccctgtctctactgaaaatacaaatgcatgcacctgtagccccagctacttgggggactgaggaaggaggatcacttgagcccagaaggtcgaggctgcagtgagctgaggttgcaccactgcacttcagcttgggtgacaaagtgagactctgtctcaaaaaaaaacaaaaaacaaaaaacaaaaaaaacccagtaaaccgggtccccatgaggtgtctcacagctgtaatcccagggctttgggaggtggaggcaagagaatcacttgagctcaggagagctatgatcgcaccactgcactgcagcctggtgacagctagactctgtctggaaacaaaacaaaaacagcatgggcagcggtgggcttggccttatcctgcaatgaaactacttgcagtttgctcttgagagagggaagacaggaacctcctggacctggacttgccgtttagtgtgacaaatggattttcaaagtgcccgcccacccaaaccaatttgaaccaaagcccctccttgatgaagtgaagcttgctccctgccctctttccaacattatcctcacccttctccactggacaaaaacaatgtcagcattatctaatgctattataagaaaaagggttctgactgccagggcttccagaatgcatttgggaacgttcacttctagccctcttctgtagctcatctccaaggactactttgctatattgtcttgttgccgtcttgaaagaccttagaatgtgcaggaagtatacggggatgattttcaaagcaggctaaggaaataggagtggcaagccatggtagtagggcaggattaagggctcagagtaaaaggctgtagacctcacctgtgtcattatttttcccttggtggggagagtaagcaaatggaagagaaggatacctttccccagcacaaggctttctttgatctggtccagcctagcaccccctgccagtctcttaccacaacctgactggccctgatgtccttggctgtaaactgctctggcagcttctgaccacttcctacccacgccactgcctctaaatttccctgacccccatctccactgagaaaccttccctgagtctgcccctgcccagacttttatatcccactgacctccccatccagtgcctccttgtgtcacctgtcaggatgtaatataaggatctgcttctctggctgtctccactctcagactgccctattgaaggcatggattctctaattgatcattttattcctccttgggatgtggcagttactcaataaacatgtgttgggaggctaatgagactgagtgtgttaatcagggtcctggcagaaaacaaacagcatattggaattgagtaatttcataatgaacaagactgtttatgaagttgtgggcagtgtaggaaacctcagggttaggcagtgccccaggtctgaagggcagagaattactggaatccagagagaaaattgtgcggagggggaagtccgatagaggccttgagtacagggatgcagccagcctgcagagacctcatagggagaaagatggaagcagataaatattccagccttactcttctcccctctgatcttctgcctagggtgtcccaggggctaaccagaacctaatcagaagccacagggcagtccatgtatccatcccaggtcaacttagggcacagagcagaagagagaagagtgagagcggatccctaggaataaaaggaaactatccctgaatcttccggttttattttttcagacctttttttggttcctgagtgctgcaaacattgcctgtttcatcttacactgattcttttcctttgcgaactttagcttgtaattctataatgacatcattgtatccctatccctctccctaaaagtatctagtctttgtcctcaattaatgttttcaccccattgacctaacaccttcactccactcttgagttaattttgcttcatagcagcagcagatgagaatctctgggattccagaccccatttaacaaaacatttcgggaggatgaaaacatggccaaatggtaccaatggtgttgaatcatcttgaagttatatgtaaaactgagagaatttcaacttttaaattatcttttaagaacctaactttgatattaaataaaactgtcactgagaaggggaaatttttcaataaacattgttgtggcttactgttaaccttttaattaattaattaattatttttctttttgagacagggtcccactctgtcacccagattggagtgcagtggcatgatcttggctcactgcagcctccacctcctggactcaccctcctgcctcagcctcccaagtagctgggaccacaggcgtgtgtcaccatgcctggctaatttttgtatgtttggtagaaagggggtttcatcatgttgctcaggctggtctcaaactcctgagctcaggagatccacctgccttggcggcccaaagtgctggcattataggcatgagccaccacccctgcctgtgaacttttttaaaacagagttgttaaatgatagaagtttccctctggagattgtaagcagtttgtcaccaaagtacctaatcagactcaataacctgtcagcaatgctgttgggtgattcctgatgtagcaggtgggggagagcattgaagaagatggccttcctaaaaacctagaagctggccgggcgcagtggctcacgcctgtaatcccagcactttgggaggccaaggcgggcagatcttgaggtcaggagatcgagaccatcctggctaacacggtgaaaccctgtctctactaaaaatacaaaaaattggccagacgtggtggcaggcacctgtagtcccagctactcgggaggctgaggcaggagaatggcgtgaaccagggaggcggagcttgcagtgagacgagatcacgccactgcactccagcctgggcgacagagcgagactctgtctcaaaaaaaaaaaaaaaaacaaaaaaacaaacaaaaaaaacacctagatgctagaaacatgctcatgcagaattttttgtccctcacacagatgtagaatgtagagtaagaagacatgttgtgagggttgtggaaagaaaatccaaatcccacccatcaggagatgaggcactgggagccctagatgccatctgtcttttgaacttccacaaaataatgttgcatttcttctggtgcatacagaagtccagtatgctgctcttctgaggatccggcaagatggcagaagtagagcagaagaagaagcggaccttccgcaagttcacctaccgcggcgtggacctggaccagctgctggacatgtcctacgagcagctggagcagcygatgcagctgtacagtgcgcgccagcggcggcggctgaaccsgggcctgcggcggaagcagcactccctgctgaagcgcctgcgcaaggccaagaaggaggcgccgcccatggagaagcmggaagtggtgaagacgcacctgcgggacatgatcatcctacccgagatggtgggcagcatggtgggcgtctacaacggcaagaccttcaaccaggtggagatcaagcccgagatgatcggccactacctgggcgagttctccatcacctacaagcccgtaaagcacggccggcccggcatcggggccacccactcctcccgcttcatccctctcaagtaatggctcagctaataaaggcgcacatgactccaaaaaaaaaaaaaaaaagaagtccagtatgctaacagaaagtcgtaataagctgcacacagtggtttgctttgtgggataagccgaacatttttcacttctgattgttgactgtgtgttggttcctctctgttttcccctccactctccaccctttgccttggcttgtgctctgggaggctgacgcctacaactgtgtcatctgactctccttgtcctctggcttccaattgggtttggctgatggctggtgctgactggggattagaaggcaggaagccaggtcagcctatttatcccactgtgactccttgttgggacatggttttgcagtggctgcattcctctttgccacgggactttcaagtgttcccttctccacagctgtggctctcacaggggtccagtaacaccatcaccacttgcttctacgcgtctatgagtggcattggcttcctgctgtgcttgtccctggttcttcaccactctttgccgagttcccttaaggctgttgcacctctgttaatagtccatttattaaactcacttcaattaaatcctttgtgcaaaccagctatttcttgcaagaccagatacaagtggggaaatattctgacctgatactactgttctcctagccttttgttcatgccttctgaagacatatgatgaatggaggaacggacgcagtgtgagaaaatcacaggcaggagggatgaactcacatgctttcccttcccactttctcttttcctcccttcttctggttaagagatttggaccagtggctgggcacagtggctcacgcctgtaatccgagcactttgggaggcagaggtgggtggatcacgaggtcaggagctcgagactagcctggctaacatagtgaagccccatctctcctaaaaatacaaaagattagccaggtgggtgcctgtaattccagctacttgggaggctgaggcaggagaaccgcttgaacccaggaggcggaggttgcagtgagccaagatcgtgccattgcactccagcctggacaataagagtgaaactccgcctaaaaaaaaaaaaaagatttggaccagaaagctgccccagatgaccaagacaaaggaactccctgccggcaccatgactcatgaggcaagccaagccccagagtggtcagaggcttcttgatgaaataaagcaaggattactgctttgaagagaacatagccaaacccatgttaaatggggggaataaactttcttcatgtaaggctggactgtgttgtctaaaacaaacacctgcattgctgagggatttttcctctgagggaactggagagattagcttctgctctcactgtggggatactggctgtggaagcagccctctaccagttctccaattcaagaggctctgggtccacctgccccacgtgggcagggctggggcagtggaaggtttcatttgtattggtccatagcctcttcctttgagaagaggcaggaagaaactctcttactaagggaacagagtaagacactggactgacaagcagacacaaggataagaggaaggtttctgggagaatggggagtgagcagagcatctttgagaggcattccagcaaaatgtctaattcagtacagcctcttttgtgctacgtggggagcatgggagaagaagagcatgggaagaagagtaggttagacctaggcatgacttctgttccctccacactatactgctttgtaagatctgcctgatcctccatttaaattttaaatacttctgtgaactccaagtatctgagacaggtcccagtcaatttggaaagtttattttgccaaggttaaggacatgtgcccatgtcatagcctcacgaggtcctgacgacatgtgcccaaggtggttggggcacagcttggttttacacattttagggagacatgagacattaattaatatatgtaagatgtacattggttcggtctggaaaggcaggacaactaaaaatggggaggggcttccagattatagaaatttgcattttttaaagtttctgattagccttttcaaaggaggcaatcagatatgcatttatctcagtgagcagagggatgactggatagaatagagaggcaggtttgccctaagcagttcccagcttgacttttccctttagctgagtgatttgggggccccaagagttactttgctttcacacttccgtcaccatccagtgcaagtttggtttaaggaaaactggtaaggcaggaagcactcaggaaagacattggtaagtcttcctaatcatctccctccccctcctttttttttttcttttgagacaggctctcccactgtcacctaggctgaaatgcagtggcatgatcacagctcactccagcctcaaactcctgggctcaagcaatcctcccacctcagtctctagagtaactgggagtacaggtgtgtgccagcacacccagctaatttttaaaattttttatagaaacagagtttccctatattgcccaggctgatcttgaactcctggactcaagggatcctcctgcttcagcctcccaaagtgctgggattacaggtgtgagtcaccacacctattcctaatcatcttgcatcttcctaatcatgtggcaagataaaattaaaaggaccccatcctggtcgtttctccccagcctaggcattagtaggtggagtgtgctctaggcagagtctggtctttatccaggcaaaagagaattaggattaaatccttgattccccaattctcatctactacctttatcccatatgttagcagaaaatacccagatggggaagaaaaggatggtgcttgatcacatctaggttctatttattttagagccctcgctcatgcaaatgtataaaccctaggctaaaatataagctccttcaaggatcttcagcttttcaaagacagatttggtgtgtcttacttgctgctgttcttccagcctattgtctaaaaatttacctggaaattgttttgagcagatatagtacaacacacagacacaaaatgccatgaaggaaggaggttttttatgttcacagtcccctagaaacaggaggcaaggcatggcaggcagggccacatagggaagcaccgaagccagatgagcaggcagaaagggcagaagcctttattgtggcttttgaaaagaggaaaggggaaagcaaagtaagcaagcagaacaaccttatgattggacagtttaaataacttcagcagggcctgtagtgatctgataaaagcaggtaggttggggcgtggaaccctaattggttggtctgcatatcaaagatgtgctggcaggcaaattcttatctctaggaattagttaactctgggaggagtggttccccaggtccacaaggctccacatgccagagatctaagaatacagacaaatagttaacatagcctagaacagttgtcaacagagaagaggccgttaaaaacacattcaagcactgactggctgacagactgatgagaagtttagagagcctaagacagagaattagcaaggaaagaaatgccctggcacatttttcttataaccaaattttacgacattggactgtttggatggcacattttagtatgtaagaactgggttatacgattattatagagtagccagaaacattgttttacctttggagaattttttttttttttttgagacggagtctcgctctgttgcgcaggctggagtgcagtggcgcaatcttggctcactgcaacctccgcctcccgggttcaagtgattctcctgccttagcctcctgagtagctgggactacaggcgcatgccaccacattcggctaatttttttgtatttttagtagagacagggttttaccgtattagccaggatggtcttaatctcctgacctcgtgatccgcccacttcagcctcccaaagtgctgggattacaggcctgagccaccacgcctggccctggagaacttttattggatgctttcttgtttggctttgtaataacaggaataaatgttctaattataatctctgtcacatggattttttaaaggacgttcactggcagtgtctcagaattttggctcatagatctgagggccttattgaagtatgaaggaatcatgcaagtccaaaaagaactctgaatgtagaccagagaggccctcttaataggtcaagtgtttggctagataaattttgcctacaaactttatcttacacttcagtggatcttaggaaggcttgactacatttctgttagcagataaagctttttttaaaagagaaatcaaatggtataagtcagcattttacctttgttggaaaataatttagcttgacttctgtcatttgcatgttgctaaagccaatgctgaatccttgagattctagtcaacatgaagcagtttggaataagggaatagatattgttctaggccttcaatctgctactagtttactttgtcatcaaacaattcacaggggtcaaaaactgggctgcagtttgctaatccgtgacaggacactttgggactagattagtgttcttaacccggtatatgtggacagaacatggatgaggggaaattgcatctttattttcagtaactcctaactgaaatttagcaatctctttattatgaatgcagacaacaaaccccactagtattcataggacctgtgaccttgtcaccaatataaatcactgataatttcatgttgcatcagaatttttgcagatatctcaatttatcaattatacccagcacttcttcaaagtaaccctagttactttgtagggagggaggagggggaagttcttacttgatttactgtcataggctggcacacatgcaaagctgaatacctctcatggaaaaacacccatgggttctttgggggctcccctgctgagcccctctagctgtaattcccctgtcactgctgtacagcctattcctcagctactgttacccgctcagctctgggtttttcattcagactcttcctattgcaacttcatcatctgcttcctcttccctaaggcaggagcaaaaacacttgttccacagaaatgacctatttactctgtcctgacaaactctgggagagacaggctgagctgaacgcagctgcagaccttcatcctctgaaaccaaagcagatcaccagttcatctttcttgccctttaggtttcctgagcagcagttagactcagtcctttgtggccccaaactcaaggggatacagactaagttcttaaagcccctctaattagtgaagggaaggggaagttaccctctgtccccctctcctgctgggagggagagtgcaaagtcacagctctgcccaaagaaaacctcacaaagtagtccatctctgcttttgccatctttctatatcttcctttgagtttgagagccacatcatatgttctaggccatccacttggaaattcccacttggtattgtggcatgcatggtggccttgaccatttattatgttacagtgcagtattagttttccattgctgctgcaacagatgaccacatggcagcgtagctaacacaaatgtattatcttacagttgtggagcacgtaagtctgacatgggtctcactgggccaaaatcaagggttcacagggctgctgagctcctctctgaagcttctaggggagaatccatttatctgcctttccagcttctacaggccactgacattccttagctcatggccccctcctccacttcaaagcaaacaatacctgcatctctctgagcctttcttccatcatcacatctctttctctgaccctcttctcctgccctcttccacttttatccactcttaaatgttccacctagataattcaaaataatctctactttaaagtcagctgattatcaaccttaataattctatctgtaactttaattctcctctgctgtgtaagctaacacattcacaagttc

SEQ ID NO: 96584 - DNA, 12824 bp, Homo sapiens
  misc_feature (1)...(12824): n = A,T,C or G
gagattgtgccactgcactccagcctgggcaacagagcaagactctgtctcaaaaaaaaaaaaaaaaaaagaataaataggccaggcaaggtggctcatgcctgtaatcccagcactttggaaggcagttggattacttgagcctaggagttcaaggatgcagtgagctatgatcgtgtcactacagctccagcctgggtgacagagcaagacactgtgtctcaaaaataaaataaaaaaaagaaacagctaggccaggtgtggtggtgtgtgcctatagtcccaacttcttgggagaccgaggcaggaggatcgcatgggcccaggagttcaaatacagcctgagcaacattgtgagatctcatctctttattttttattttattattattattttttttttagatgcagtctctctccatcgcccaggctggagtgcagtggcacaatcttgactcactgcaacctctgcctctcaggttcacggcattctcctgcctcagccttctgagtagctgggattacagacgtgcaccaccacacctggctaatttttgtatttttagtagagatgaggttttacatgctnnnnnnnnnnnnnnnnnnnnnnnnnnnnnnnnnnnnnnncaccgcacccggctgaccttgtctctttaaaaataaactaggtattggccaggcgtggtggctaatgcctgaaatcccaacactttgggaggccgaggtgggcagatcacaaggtcaagagattgagatcatcctggccaacatggtgaaaccccatctctactaaaaatacaaaaattagctgggcatggtgctgcgcacctgtagtcccagctactcgggaggctgaggcaagagaatagcttgaacctgggaggcagaggttgcagtgagccaagatcctgccactccactccagcctggcgaaagagcaacactctgtctccaaaagaaaaaatatatatacaaaaattagccgggcatggtggtgtgtgcctgtagtcccagctacttgggaggctgaggcaggaaaattgcttgaacccaagagacagaggttgtggtgagccaagatcatgccactgcactccagtctgggcaacagagcaagactctgtctcaaaaataaataaataaataaataaataaataaataaactaggtattttttttttttatctaaagtggtgatgttttaaatgattgctttatatattggggtctaaatcttaaatatgtttaaattagacaaattctatttgaaaaaattaatgctccagtattagtaatattctgtatgttcctagttcctataaagacatttaaggccgggtgcagtggctcacgcctgtactcctagcactttgggaggccgaggcgggtggatcacttgagcccaggagttcaagaccagcctgggcaacatggcaaaaccccatctctacaaaaatacaaaaattagctgggtggctgagttgctgggtggtggtgggcacctctagttctagctacccaggaggttgaggtgggaggatcacctgagcccaggaggttgaggctgcagtgagctgtgatcgtgccactgcactccagcctgggtgacagaatgagaccccgtctcaaaaataaataaataaaaatagtaatttaaaacattttaatgaactagtagctcatcatagtttgaaaacccaagaatttgattcagcactgagtgacagaatgtggggactttgaaaaccagtaattgtaagtgatttagtcttcaagcagcactgctggcaagctaaaaatacatgtgaaggatagaaccactatcagcttctagaatggttagagtaatgtcctttgaaaggagtttttcttttgctaaagaaaaatttctaacataaaaggaagtaaattatgaactttctgatgctttctaaattaccaggaaaagatcagattctggtatatgatgagcattagactaaaatgatggattagggtctgataaagttggtgctactcccacgacatttggaggaggtatggagcagcatggattacttggctgggttatgagccttgggatttgcagagattatatgtagatagactcatcacagttctactcatatgtaagatgacaaagagaagttaatcagactcctcataaaatcaggcctctagtgctgcactctaccaataagcattgagtcatgctgtaagagcaatagactaaatggaacactaatggcctaaaaagagaatgtgccctctaagctgctaacttattgcgtaggcacaactcaggcggtggggagaaagcccattacaaatgaagagctcttgcttccctagaggggaataagctaaagagattccatcagatgcgtctgctcagctgcaacgagatctgttttataaacatcagatccagcctaataatgtagcaaaattgctcttggaaatgaattttgccaagagcaatactttgacagtgatgagggatagatagtgcacataaagtagaattaatgtgcagacccatatatacagtagggtcaccctttgtaatattggcttactagaaagaataatagtaggagactctagtcattattgctggggagaaaggccaaagataataggggatatttaggttagaaaaatattgccattgaggtttgagaagagagaagtgccaataaatacaaaagtcttctttaaagggggaacaccaaaaatataattctgaaatagttgtctcactgttatttactttaaattgatattaatgtgttttcctttttcctaaataggtgaatttttcctgaaaaatctagtggctaaaagaaaaacaaaagacctctaaaacttcaacaagaccttcaagatcacagaaatttttaaaatttgattccagttaataacagaggtggtgccagaatgcctggactgcagtggatgtaccccacctctttgcttaaaaaaaaaaatgtcaatagccaggcatagtggctcacgcctgtaatcccagcactttaggaggccaaggcgggtggatcacctgaggtcaggagttcgagaccagcctggccaacatggtgaaatcctgtctccactaaaaacacaaaaattagtcaggcgtggtagtgggtgcctgtaatcccagctactcgggaggctaaggcaggagaatcacttgaacctgggagggggaggttgcagtgagccaagatcgctccattgccctccagcctgggtgacaagagcaaaactccatctcaaataaataaaaaggaaaaaaaagtcaataaactgtacaaatttaattacagtaattcatttggcttttagtgtatcttctttgtcccaattaaacagttgcttgctgtgatgtaatcttaaaatatctttgtaagaattttcttttaacataattttaaaatgcattaaaaacatggcatggtggctcacacctataatcccaacattttgggaggccagggcgggtggatcacttgaacccaggagttcgagaccagcctgggcaacatgatgagaccttatctctacaaaaaattagccagacgtggtggcacgcacccgtagtcccagctactcaggctgaggtgagaggatcacttgaacctggaaagcagaggttgcaatgagctgaggtggtgccactgctctccagcctgggcgctacaactgctctccagactctgtcttgaaaaaaaaacccaaaaacttccagaagattttccaatccactgttaacatcattacatttcatttatgaaaaataaaaacttcatttatgttactgtgatgaaacagtcaacatagattgaaactcatcagtttagcatttcattcaactttagcattcattcaacgtagattgaaactcatcagattagcatttgtccttgtaatattggaataatttagaaaggcttaagagtgaatgttggccagatgtggtggctcatgcctgtaattccagcactctgagaggccgaggtgggcagatcacctgaggtcgggagtttgagaacagcctggccaacctggtgaaactccattgctactaaaaataaaaaaattagctaggtgtgttggcaggtgcctgtaatcccagctacttgggaggctgaggcacgagaattacttgagcctgtgaagcagagattgcagtgaggcgatatcgtgccactgcactccagcccgggcaacagagtgagactgtctcaaaaaaaaagtaaatgttgattttttacattggtgtgactacttcagaacctgcaaaatagttttatgctgattacatttagtccctctgaaaacaccaaggccataatgctgcctaagacatggaaatagaacctagaaatattaacccttatttgtatagtagcttgctaaatccacatgccctattcctttcatttctcacattggttgtattatatgatggtaaaggcctgagaaaggaatttccttccaaaatactaataactcagattcatcttttgactgaatcctgcctttctactttttctgcatatctaaaaggacacttttaggtggccatgttgtaaaatatgtaaagtggatagccaattctgttttgaattcttataacgagccagtattataaaagtaatgcacatccttgccaggtgtggtggctcacgcctgtaatcccaccaccttgggaggctgaggcgggtgaatcagttgagctcaggagtttgagactagcctgggcaacacagtcagacccccatctctaccaaaaatacaaaaaattagctgggtgtggtggcacatgcttgtaatctcagctatttgggaggctgaggcaggagaatcacttgaacctgacaggcagaggttgcagtgagctgagatcacatcactgtactccagcctgggtgacagagaccgtgtctcaaaaaaaatttttttaagtaatgcatgggccgggcatggtggcttaatgcctgtaattccaacgttttgggaggccgaggcaggtggatcacctgaggtcaggagtttgagaccagcctgaacaacatggtgaaacactgtctctactaaaaattaaaaaattagccaagtgtggtggcgcatgtctgtaatcccagctactcaggaggctgagacaggagaatccttgaacctgggaggcagaggttgcagtgagctgagatcacaccattgcactccagcctggacaacgagtgaaactcctcaaaaaaaaaaaaaaaaaaaagtaatgtatgtctttatagatgctagtaaattttgggatgcaaatttaaccctaccaactttcttttgttttgagacagtctcactctgtcaggctagagtgcagtggcgcgatctcaactcactgcaacctctgcctcctgggttcaagtgatcctcctgcgtcacttcccaagtagctgggattacaggcgcacaccatcacgcccagctaatttttgtatttttagtagagacggggttttgccgtgttggccaggctggtctcaaactctaggcctcaaacgatctgaccgccttggcctcccaaaatgttgggatttgtgagccaccaccgggcctaaccctaccaacttaaaatagaaacatctcaagctaccttaacttattttacaggaaaaaaatggattacttttcaggctaattttgtgacatttctagatattatctaatagttaggccctttgcacagtgtaggccaatggcaggtaaacatttgttagcaggagacccatttggtgaaataaaattctcagccggcgcggtggctcacgcctataatctcaacactttgggaggccgttgcgggcggatcacctgatatcaggaattgacaccagcctggccaacatggcaaaaccccatctctactaaaaatataaaaaattagctgggtgtggtggcacgtgcctgtggcactgaggaggctgaggcacaagaatcgcttgaatccaggaagcagaggttgcggtgagccgaaaatgcaccactgcactccagcatgggcaacacagtgagactgttgtctcaaaaaaaataaatgaataggccgcgctcccgcccagggaggatgcgccgacgccccgagcgcccggccctccgcagcagcccggcagactgcctctgtcatcaggaccctccgtccacgtcccctgtgcggccagcgtcagagccatggcgatggaggagaggaagcccgagaccgaggcaacgagagcacagccgaccccttcgtcatccaccactcagagcaagcctacgcccgtgaagccaaactatgctctctaaagttcacccttgctggccacaccaaagcagtgtcctccgtgaaattcagcccgaatggagagtggctggcaagttcatctgctgataaactcattaaaatttgggggactcatatgatgggaaatttgagaaaaccgtctggtcacagcctggtcgtcagattctaacctttttgtttccgcctcagatgacaaaaccttgaagatacgggacgtgagctcrggaaagtgtctgaaaaccctgaagggacacagtaattatgtcttttgctgtaacttcaatccccagtccagccttactgtctcaggatcctttgatgaaagtgtgaggatatgggttgtgaaaacagggaagtgccacaagactgctagctcactcckatccagtctcggccattcattttaatcgygatggattcttgatagtttcaagtagctatgatggtctctgtcacatctgggacacmgcctcaggccagtgcctgaaaacgctcactgatgatgacaacccctggtgtctttcgtgaagctctccccgaagggtggatacatcgtggctgccacgctgggcaacactcaagctctgggactacagcaaggggaagtgcctgaagacatacactggccacaagaacgagaaatactgcatatttgctaatttctctgttactggcgggaagtggattgtgtctggctcggaggataaccttctttacatctggaaacttcagacgaaagagattgtacagaaattagaaggccacacagatgttgtgacctcaacagcttgtcacccaacagaaaacatcatcacctctgccgcgctagaaaatgacaaaacaattaaactgtggaagagtgactgttaagtccctttgctcccacatgcgatagaccgtcaggaagttgacccggattggcaagaaacatgatgtctcggaggcggtcccctgggtctgtgcctgggggtcaggaccgggcctgatttgagcctcctttttgaagatgatttggccgagtgtggaccaccggaaagttctaaaagttgctggtgacatttcttgccaattctctaacactgtctagggaagagttcctagtctgttgtgttcaaacagagtcaacaaaaatttttaattttttgttacaaaagggtgaagttcaattttaaaaataaataataaatataataaaaatctcatggaacttcaatgtaaaataattaaaatggcattttattagcagtgtatgttaaagtttcagatttgtaacatttactctgtaaataaaaatagggaataagtaaaatgaagcaattttgatacatatgcaaaattgggatttatggataacagttgctgtcttcagcctcaagagtctacttatttgttttggttgcacagtattgagaacaattctaatatagctaaataatagtaaatttcagttaatagcatagcttaaaaagaaaaaaatagtaaataatttttaaaaatggtaaaacacctcatcttggaatgtctggatactttccagttaaatttaatacagaaacttgaaagaggaatagcaggagatgtttttgttttgttttgttttgttttgtttttgagacagagtctcgctctgtcgcccaggctggagtgcagtcatgcgatgtgggctcactgcaacctccacctcaagtgattctcgtgcctctgcctcctgaatagctgggattacaggcacgcaccaccatgcccagctaatttttgtgtttttagtagagacagagtttcaccatgttgcccaggctggtctggaactccaggactcaagtgattcactcatctcggcgactcaaagtgctggtattacaggcacgcgccaacactcccagctaattttttatatttttagtagagatggggtttcaccatgtaggccaggctggtctcaaactcctgacctgaagtgatccgccagctttggcctcccaaagtgctgagattacaggcgcgagccactgcgcccagctggggctgctatttttgaatctgcttttaaagagcaggtggtacctttcccttcctcttttcctttttccttgctggctagaatgaaaacatgatgcttagagtgggagcagccatcctggacatgagatgggagacttgtgtcaaggacagcagagcgaccagatgaggaaggcttgggccttttccagccctcgaccacctacctggacttttgtgtgagagagaaatacattactattctgcttaacacactataatattgggtccctcttggagcatccaagtttatatgctaatgcaatttataaattatgtttattctaatgcccgtaaaataaatgcctattaaaattaagaaagatatatatgcacctaaaataatctcccatgttactagcattatctagtgagtagtctcttacatgtctgtattcaagaaaaaggaagggaagaagggagcaagcggtcactgtatccaacttatcctctgcttatacatattattttgcaaggcaaacactaatgatatatttcttcctgagtttttggtctaaaacttgaacacactcccagtatgtggtgatgataacagctagttggggaccacatgctatggaaagctaggataagtctctaaaaagtgactaacaaagttcatgccttttttttttttttgagctagaatctcgctctgtcacccaggctagagggcagtggtgcgatctcagctcactgcaagctccgcctcctgggttcacaccattctcctgcctcagcctcccaagtagctgggactacaggtgcccgccaccattcctggcttatttttttgtgtttttagtagagatggggtttcactgtgttagccaggatggtcttgatctcctgacctcatgatctgcccatcttggcctcccaacattctgagattacaggcatgagccacagtgcctggccttttttttttttttttttttgagatgggatctcactctgttgcccaggctggagtgcagtggcacaatcttggctcactgcagcctcaacctccctggctcaagtgatcctcccaccgcagccccccaaatagctgggactacaggtccccaccaccacacctgcctatttttttttttttgtcattttggcagagatggggtcttgccatgttgcccaggtgggtctcaaactcctgagctcaagcaattcacccactgtggcctcccaaactgctcagattataggcatgagctactgcacctggcctttttttgttgttttttttaaataatgtgatagctgcaattgtgccactgcactccagcctgggcaagtgagactctatctcaaaaaagcacaaaaaatcggctgagtgtggtagctcatgcctgtaatcccagcactttgggaggctgaggcaggtgtatcacctgaggttaggactttgagaccagcctggccaacatggtgaaatcccatctctactaaaaatacaaaaattagccaagcatggtggcgggcacctgtaatcacagttactcgggaagctgaggcaggagaattgctggaaccaggaggcgggggttgtagtgagccgagattgcaccattgcactccagcctgggcaacaggagtgtgaagctctgtcaaaaacacacacacacacacacacacacacacacacacaataaataaataaaatttttaagttaaaaaaaagtgactacaaaaataaaaaacacctcaatgtttccttttaccattttaaccttttttttgagacaggatcttgctgcatcacccaggctggagtgcagtggcacaaatcggctcattgcaaccttgacctcccaagctcaagtgatcctcccacctcagcctcctgagtagctgggactacagacacatgctaccactcctcactaattttttttctattatttgtagagatctcactatgttgcccagactggtcttgaactcctgggctcaagtgatcctcccttctcgacctcccatagtgaggcagaaattagagaaagaagaaataaaaactaaaagagaaagacacgttttcctgtattaggttgtctcatcccaaaaagcagtaacagacagagcccaggtgcaggcaaggtcctgataacactatctaagaagtcagaacccaaaaggaatgtgctctggaggctctcccagcactccccaacataaggataagaaaaacaaaattcctcttttagccctttaccacctccccataaatattttgcaagttttagaagttcctgtttctccttcaatgcaactgcaaggtcacaagctatgctagagattacgagacctgtcactgtgtcattaactgtctttattctgcttctgtaagctttcttataaaaattgagccctgtctttgttctggcctcaattttttggatatgaatccactgagccagcatacaccttaataaaaatcctcctgtaacacccatttggtctctttggtcctctgattcctacaacattttggtgagccagccgggagaggagatgacaggtttgctgtctcctttgcctgtggggctggagccccagactggcgggatacctgtgaccccaggtgtgccatcaggagaacttcaacccggaggggagatcagctctcctgcaacccagtgtcccttccctgacggtgcaacggaacctaaggggtataggacgattccagggtcagtgcacttcaggaccacggtaaggtattggggcccaaggcaggacctgtcccataaggagggaaggggagcctgatcaccttccagggtgcaactagtagtccgacacaggatgagagaatggctcgtaaatgttggggaaacttacaccctaaccaacccaggacgcaagagtggcagggaagcaattggtcatgtatttagggtagtaactggggtcggaggacagccgggacacctggaccaattcccctatatctactcatggccgcactcaggttatgcaaatgcctctcaggtaaaaaagaggacccccctctattataatgaacaaggtcaaatccagggaagggaatgaaccttcatttaccagcctttttcaaccactgatctcctaaactggaagcaccataccccttcctgcacagaaaaacctcaggcctttatagatctggtgcagtccatcttcctaacacacaatccaacttggccagatgtcaaacagctcctcctgatgctgtttaatactgaggagcaccggaggataactcaggcagccctccactggcttgaagcaaatgtaccagcaggcacaatgaacgctcaggcatatgctcaaggccacctcccagaagcagacccacacgaggacccaaatgatgtaacccagtttcagcacctgcagaggtaccaagaggcaatcctgcaaaggctgagaaatggtgggaaaaaggcaatcaacatacggaaaatctcagagatgctccagggagcagatgaaagccctagccagttttatgaaagactgtatgaggcattccggctttgtactccgtttgaccctgaagcagctgaaaatcagcacatggtgaacacagcatttgtaggacaagcccagggtgacatcaaacagaagctgcagaaattagaagggtttacaggcacgaatgccacccagcttatagaggtggccactgaggtgtatgttaaccgtgaccaagaggcaaagaaggaagcagaacagaggcttgagaaaagggccgatctgttagcggcagccctcgtagaaagggaaactagtattctaagaggatgtggacgtggacatggatgtggaagaggtcaagttaggcagagatctgagagccggccgaggctagagagagatcaatgtacatgatgcaaaaagaagggacactggaaggatgagtgtccagaaggtaatgaggagagtagtcagggccatggtatgaagagaccatctgccaagggctgccgcaccctgggggaactagatactgatctaatcaggctggcaggggctgaaggatatgaagactgggacagactgggctccttctctttaggcccccaggaaccaatagtcacattagaagttgcgggccagctaatggactttatggtagacactggggctgaacactcagtagtgacctgacctatagggccactaatcacgaactatacaactattgtaggagtcactagagtctcagagaaaaggcctgtcagtcaaggaggtgtgttataggaggacgagaggtccaacatgaattcctatacctcccaaattgtccagttcctttgctgggaagagacctactccaaaaactccaagtacagattgcttttgggccacaaggaagtatgactttgagcctaactgagctgaaggccatgatgttaacccttactgtcccaca

SEQ ID NO: 96585 - DNA, 38676 bp, Homo sapiens
ccctgtgtgaaccgctccctgtgcccgcctcactcctgccttcttccttgtttgctccacagcaggctctctggcctccttgttcagcccagaacctgccatagggccttgcacctatggcactgctctgcttcggaggtggccttctcagaggccctccccggctcttctccctcagttgcagcccccattcttcctgtccttcctgctctgtgtctccttaatactttccaccatcgaactcaccacacctgctgcttactcctcttttttattttttgagatggaatttcgctcttgtcaccctggctggagtacaatggcatgatctttgctcactgccacctctgcctcctgggttcaagcgattctcctgcctcagcctcctaagtaggtgggattacaggcacctgtcaccacacccagctaatttttgtatttttttagtagaggcggggtttcaccatgttggccaggctgatctcaaactcctgacctcaggtgatctgcctgcctcggcctccagaagtgctgggattacaggcatgaggcaccgtgcctggccacctgctacttactccccttagtgatgatctcttccccatgaaagatgagcccagcagggctctgctttctgcacctaacacatttctagcacagagtgggcacctaataagtatctattgaatgaaagagtgagaggaagtgaagatagcatagatgactttttcaaggattttagtcaaaaagaagagtaggaagatgaagtggtagcaggaggggtgtatggggtccaaggcgttatgtgtaataagtattaatatggcgagtttgtatgctcatccagtggagagggaaacaggtgctggaaagagaggagctgatttagcggcagaggcttcgagaaggtgggaaggaagggatcggggcagggacaagtcttccacatagggggatgagtacagatatgggggtggtgggagaatggaagttctcctttggttgcttctcttttctcagtgaagtaaaaatcagggttctctgctgaatagaaaggatgtgcaaagtgtgtgcggtagttttttctgggagactggggggctgatgatgaggaataggtagtaggaatgccatgaagtactggacatcaggtagtgattgcagtgatagaccctggcacctaagctggttaacgagcacagcaggggccaggagcattgcacggtagctcacgcctgtcatcccagccctttgggaggcccaggtgggtggattgcttgagcttaggagtttcagattagcctgggcaacatgacaaaaccccatctctacgaagaatacagaagtgagccagccatggtggcacatgcctgtaatcccagctacttgggaggctgaggtgggaggttggcttgagcctgggaggcagtggctgtagtgagccaagatcatgccactgcactccagcctgagcaacagagccagaccctgactcaaaaaaaaaggcacagcaaggacattgtaggttcgggtgggacaggacggctaggagaaaagggtcagagtcaggagtttgcaggagggtggaaagtggtggagcctgaagggtcacagtactggggagtgtagttggagaaccagaggtgtgagtgggaaacataggagggggtcagagagcatggggttcaaagctgtcatttgggggtaggcattgggaatgaccatgtctggggtatgccctggaaatcagggagctgaggtgctgggcaggtggttgttgatcccttaccttctgtctgcatatttgtctgtggcttgctttgatcatgtccatgttggcatgtgcagctctaggcagtaattttggctgttacaatattcttttgtatgaacctaccacagtgtgtttacctgcaaatagacattccaattcttaggttgtaccttatgaaatagctgatattagaccttttttttttttttttttgagacggagtctcgttcttgttgcccaggctggagcgcaatggtgcgatctcggctcactgcaccctctgccccctggggtttaagggattctcctgcctcagcctcccaagtagctgggattacaggcatccgccaccacgcctggctaattttgtatttttagtagagacggggtttcaccatgttggtcaggctagtctcaaactcctgatctcaggtgatctgcccacctcagccttccaaaatgctaggattacaggcgtgagccaccgcgcccggcttggaccatttttttaatctgcaaaatcatcaatttcacatggctcacactaatattttcctagtttttgctacctcaagcagagcttcagtgaaccggcttgtacgcatatcggtgtgcgaggtgcgagtgcctctgggacctgtacttaggtgtagggcatcagggccacacggtcctcaccgctggaccaggaaggggactgacttgcactcccaccagcagcacagggttcctctatcatgaatgtttggtgttgtccaactgttaaattgctgccagttggacgggcatgaaattacttagcacataggtgagtgcagtaacctcctgcctgtctggcacaaagtcagtggtccataaatgctgatgccttaactaatagcaggctatcgatcccttaaaccatgtggttggcggtgattgactggaagggatgtgtctttaagtgaaataggttaaaagcagaaggtgcagtatgatttcatgatatttatagtagatgtgcagtgttcatattttggtggcagaattatggacaatacttctagtttgcttatctgtgtttttaaaaatattctacaacaaacattcaatgtctttgtaatttaaaaaatcctaataagttacttttatgatttaaaatgagatatgcacgaggcaattttagcttaatgtaccaagcctcctttcaaatctataattgatcaaaactttttttttttgagacggagtcttgctctgtcacccaggctggagtgcagtggtgcgatctcggttcactgcaagctccacctcccgggttcacgccattctcctgcctcagccttctgagtagctgggactgcaggtgcccgccaccacgcccggctaattttttttgtatttgtagtagagacggggtttcaccgtgttagccaggatggtctctatctcctgacctcgtgatctgcctgcctcagcctcccaaagtgctgggattacgggcaggtgagccactgtgcccagccacatagtaagtacttcatgcgttgaaggccactgtagcctgaaagcagctgtaaacaatgagtgaatggatgtgcatggctgtgttccaataaaactttatttacaaaaaaaggtggtggactggatttggcccaaggttatggtttactgataactgccaaaatactagttttctattttattttagtaatggtaaaacctgagaagaaaactatggctttgcacaatataatggaaaaaaaatgtaggatttgaagagtctggagttcaagtcctaattctaaattggctatatagccatagagacgtcatttaacctctctgatccttattttatgcctctgtgcaatgagtatagtaataatgtgtactttatagggtggttgtgaaaaccaaatggaataaaggatatgaaagtgcttggtaaactgaaaatgctaagcacacattgctcgttctcacgaattgcttgttcagcatcttttagattcatgtgtaataaacattaaatatttaagagtaaagcaaattagaaaatttgcatgtaaatataatataaacatgaagactgagaaaaatgagttatacataatgcatttctattttcctaagccaacaaagtgactttggaagatggtataaatatcatttttttccaaaatagggttttccagagaaaaattggttttcatcatggttgtgaaattttataatcattaacactcttgtggggaagccaaggaaggaggaagtattgaggggtgcaggcaggaggtgaaagagctgaacctgaagtgaagccatcacagtgggcagcgagtgcatgtctgtgacctgcaagaaagcatttcagtagggctggaaccagcctagcgcaggcagtcaggagggagtgggcagggaggaaatggaggcattaggtggagacggctctttctacaagtttggcagaaaagagaaaaaatagggtgtagttcaaaaaggcctcagggtggcatagaccttatcataaagcgggggaggttggtgcctctgtggagacaccaacccaagcccgcggagcaggatggggaggaggggatggggtgaggaagacggcctgagggcagactaggagaggagaagggtgtggggaaatgttccgggaagtggaagggaaccatatccccgggcagaggccaggcagggttgagaagcagtgaggaggaggtactcgcaaagctgtggaagtcacttcttcctgggagcataccctgaccacctcctttccctccaaatctggattaaatgacaggccgtgtgcgcccatagccagctgtatgtgcagtgatgaaacggtgtgtttagttaattgtcttgtctgcatcgctgcttggctggtgagcttcactgaagacagggctgtggcctttcttgcctatcctacaaaacatggcacgtacagcacataatagatcctcattaagtatgagttaaattgagtccagactagctagctggggatctgaaaccttgagaagtggttgtaagttatgtctctgggtctctctcttttaaaccctgctgttgtaggaggaaattctgtaccttctaaaggacttcaaccctcttgatgtccacaaaatccagaatggctgcaaatggtaatgactgttctttctttgttttctttgggaagcagctcctttcctccctgtccattttgctgatgcactcatgttgcagactagcccagcaaccgccacgtccacacccactctgacttggcaaaggaacatttgggaaaccccctttccatatttaaccctgtgacccagcagcgaatactgtcttatcaacacaaccctggcttagaagtccagagacctgggtatatttttggtcatgtccttgctgtattttctgacttgagataagttactataccaccctaagccttagttgttcctgaaaaccaaacctacttatattttccctttcttattttcaaggcagtaaaaagtgctttgaacgtttgtttgtttgagacagggtcttgctctgtcgctcaggccggagtgctgtggtgcagtctcggctcactgcaacttccacctcctaggcttaagcaatcctcccacctcagcctccgaagtagctgggactacaggtgtacaccaccacatccggctaatttttgtatttgtttgtagagatggggctttgctatgttgcccagactggtctggaactcctgggctcaagcgatccgcctgtcttggcctcccaaagtgctgggattgcagatatgagccaccacacctggcttgctttgaacttttggggcagtagtattaaactcaaagtcatagacatacgatgcatagtgaaagtcagctcatttcttctgctccttagaggcccatgacagtatctcacactggcccagccccaagtctggacatacttgtagcttgcttgtgaacagttcatcttccatcactgcagagagaaaggacactggccttccagctcgggcttggtgcctccctgcagctctgggcttctctggagatgtgctcaaagcctccctctctctcttcccttttcagctttgcatttgtagatctgggctccatgcagaaagtgacacttgcaatccaggagctgaatggtaaactcttccacaagcgaaaactgttcgtgaatacaagcaaaaggccccccaagaggacccctgatatgatccagcagcctcgggccccgctggtatgtcttctggcctttctgctctggggcgttccattttcaccctttagagygtggctgactttgctttcagtgctttcatcctcctccagtccagtctgactgtggagaagaaggcagggtctcsggtgaagtcagggaacttttatgacctttaacagtcagaggtaaggtcagatgtggaaaacttggaatttgtaaattaaggagactatatttttggcaaggataaaaagggccattaggcaattcagtcagggctttttcaacctggaatattgaaacttaggttttcattgttaatgtagcagacattgagtgtctactgtttgtacagccttgttctggctgctggtgtgaagtgtaagacaaaagtcaataaaatccagctcttcctggcaggaagataaacgttgccaaatatgaggtatggggggcagttaatggtggaggctgcctctgcaagcagagaagataaggtccataactaacccctgggagcttccctcaaaaggaggagggccsattctccgtatgcagaggtgaaccaggagaaaaagatcccattccagagcctgaagtgttagtgctagaagccgacttggctgcacatacgaggaaatctgaacaatagtagcttaaacaagttagcgatttgtttttctttcctatagaagtcaggaggtagggagtccagggttgctatatggtggtatcagggttctaggcaggaagaaggggagaagcagagggcaaaaggggcctgtgtcctcttaaaaggtgcattttccagaagccctgaccacagttctgcttgtgtttcactggatgtccccgtaactcatggccttaagtgcacagatgctgagagatgtagttttaaaagatagacacattgttgctaaacttggggttctgtcagcaaggaagcagagcatgcatatggctggcagttaacaaggtcagccacaaagctggagaggttggaggtagaagccgagagatgggttggaattattgactacagtcagattttcagaggtggcccaggcgcaatggctcacacctgtaatcccaatgctttgggagaccgaggcaggaggatggcttaaagctaggactttgagaccaacctagccaacatagcaagaccccatctctataaacaggaaaaaaaaagattgtcagaggtgactccctttgctaatttcaaactttctcttcctttctctcttaagccctctttgaaagggcagactgtcagactatactgcttaggaaccttcctggcagcagttgtctgctcttctctgtgttatgcccttcactgaaaacttcagcttctggctcattatctttctgtcttattatcatgcaaatttagcatccatgtggatgattcgactaagagtccagtcacttacttcctggaccattgtatcttttttttttgagacagggtctcattctgttgcccaggctggagtgcagtggagttatctcagctcactgcaacctctgcctcctgggttcaagggattctcccacctcagctgggactacaggtgtgaaccaccatgcctggctaatttttatattttttcgatagagacagggtttcaccacgttgaccaggctgatctcgaactcctgacctcaaatgatccgtccacctcagcctcccaaagtgctgggattacaggcatgagccactgcaycccacctggattgttgtgtctycctaatgattttttcttccacttggtcacagtttctcatccccctagctgtatttcagaccttgtgattgctgtaaccatttcaagcatcccactctgcgctgtcccccagtctttgcagctctcttactctggaagaatggttctcaagctttaacaagcatcagaatcaacaaaagggtttgtgaacacagttttctgagccctagccccagcgattctgactcagtacatgtagggtagggcctgggaattagcacaagcttcaggtggtgctgatgctcctggccctgggaccacattttagtagcaaggctctacagcctcagtccaacagttgatgcattggctcacgtaggcacacaaagtctgctgaccccaccatttcttcattattcaatattctctttgttctctcatttccctcttagcctagattctatagtcaataactaccttagttcaaacatctttaactccattgcccttttctcactaggttatagcttgcagaacactaatcctagttggacccagccctctgcctgttctgaactcaccctctgagcccctgaagacattcacacaaacttgctaactggtctcagtatatgtgcatggtcacaggctttcccactcttccaaactgacctgttttggaattctctgatcttttctcctcctatgtccaatctgctcttaagcccatctaatgaatgttctattttagatatttttcaacttccattttattcttttttcccatttctctgctggactttttcatctttttacctattttgtctcttttttaagattaacatttttataatagttattataaaatcattttctgctaattccaacatttgagtcatttgtggatctgcttctgttgacatttatcccttgattatgggtaaaattttcaggcccctttacaaatagttttctgttttttcctgagacagggtgttgctttgttacccaggctggagtgcagtggctcagtcatagctcactgcaacctccacctcttgggctcaagccatcctcccaccttagcctccctagtagctgggactacaggcatgcaccactatgcctgactaatttttgtattttttgyagaaatggggtttcgccatgttgcccaggctggtctcgaactcctgggcttaagtgatctgcccaccttggcctctcaaagtgctgggattatagccatgagctgagccactgcacccagcctatagtaattttttattgtatgttggatattatggatgctatatcatggagacttctgttactgtcctctaaatggtgttgaaatttttctagcaaagattaaattactagcagatcttttatcctattaagggtttttgtgtgtgtgtcatagttaggattggaatgttccattgtgagtctttttcttgggtaacatcatttttcctaagacttggcttttgtagggtctcaggtgagtgctccgggtgcttgccaaggtctgtcccccttgctgggttggaactccattgtctccagcactgtgagacctctggcatctgtgtctctctcagagccctctcccccaccttcacagcgactgttctctttaaggcctccaggtacttgtcccacaccacggacagcttaggcctcaaccaaggacctgaggcagacacctagattccttggacttctgtgtggctccttcctctctggtcctctgtccccaaattcctgtcacctaaactctgttgctgcccaatgagactgccactttctgcttgggctctgtttccctttgctgtggtttgggaaaatgcccccaggcagaaggtcagggtgaatgtggtgctcacatgctttcctttgctcaggaaacagccctctgccattcactctcattagtcctgtgctggaaatggtgagttcctgtattttgtctagttttagagttgtttggggtgagagttaagttgtgtcatgccagaaccagatactgggaaagagaatcatggctctcacctttttttctcttgggataaagatgatttcccagtattcccactgcttttaaattagaaataagtacataaaagctgaacataaaatccccataaatgtggacatttaaaagcattcctatgtaaacaacacatgggtcaaagaatttataaagaaacttaaaaacacttagaactgaataatgaggaaaatagtacccctgaaaagttttgggatatagtgaaggcaatatttagaggttcatccaatcttagatgagcaaagaagaaaggttgaatattaatgagctaaaagttgattgaagaagtaggtaacaacattttaaaatccaaataggaagtagacattaatggccaggcacggtggctaacacctgtaatcccagctctttagaaggccaaggtgggcagataatctgaggtcaggagttcaagaccagcctagccaacatggcgaaaccccatctctactaaaaaatacaaaaattagctgggcatggtggcgggtgcctgtaatcccagctacttgggaggctgaggcagggagaattgcttgaaccccggaggcggaggttacagtgagctgagattgtgccactgcactccagcctgggcaacagagcaagattccgtctcaaaaaaaaaaaaaaaaaaaaaagaggctgggcatggtggctcacgccggtaatcctagcactttgggaggctgaggcaggtggatcacaaggtcaggagtttgagaccaccctggccaatatggtgaaaccccatctctaataaaaaaaatacaaaaattagccaggcgtggtggcgtgcacctgtagtcccagctactcaggaggctgaggcaggaaaattgcttgaacctgggaggtggaggttgcagtgagccaagattgtgccactgcactctggcctggtgacagagtgagacttcatctcaaaaaaaaaaaaaaagaaacttgacattattgaaataaaaaaaaaatctagccaggcctacaggcactttggcaggctgaggtggtaggatcactggagcctgggaggtgtagtgagttatgataatgccacttcactccagcctgggcaacagagtgagaccctttctctaaaaacaaacaagcaaacaaaacccaaaacaactttcacagatttttttttttttttttgagacaaagtcttgctctgtcacgtggctggagtgcagaggcgtgatctgagcttactgcaacctctgcctcctgggttcaaatgagagcttactgcaacctctgcctcctgggttcaaacgattctcctgcctcagtctctcgagcagctgggattacagccacacgccaccacgcccagctaatttttgtatttttgtagagacaggstttcaccatgtcggccaggctgatctcaaactcctgaccttgtgatctgcccttcttggtctcccaaagtgctgggattacaggcgtgagccactgcgcctggcctaatttttgtattttttggtatggatggggtttcaccatgttggccaggctggtctgcaactcctgacctcaagtaattacccacctcggcctcccaaagtgctgggattacaggcatgagccaccgcacctggcctgaatttttttttatttttttattattaattattttttagacagagtctcgctcttgtcacccaggctggagtgcagtggcacagtcttggctaactgcaacctccgccttctgggttyaagcaattctccctgcctcagcctcccaagtagctgggattacaggcacctgccaccacgcccgcctagtttttgtatttttagcatggacaggatttcgccatgttgggcaggctggtctagaactcctgaccttaggtgatccgcctgcctctgcctcccaaagtgctgggattacaggcatgagccactgcgcctggccctgaatttttttaaatatttgttgagtctgtggatgcagaaaccacagatacggaagaccaattgtattggcttaaggccagacagtttgaccaataaaatataatcgagaactcaaaaagaggctcattcgtacacagaaactattattcaggtagagtggtagatctctggggaaaggatacacacttcagtaaattgaactgggacaattgcttattcatgtagaaaactgtgaaattgtatccctaccttatcccatgcacaaaaatactaggtggattataaacttggcagtgaaaggcaaaacttaaaaacttttagaagaaatgtagcagaatatctttacgatctcagtgaggatgatcttatcagatgtcctactggatatgatctcagatagaatgagatttgtcaaggcataaagcatcaggtgaaaaaaaaagatggataagttaaaataaagaccacctctttgaaagttgatgtataaagaaagataaattcaagccaagaactgggagaagatatttgcaataatataactaacaaaggatcaggaaaggtgtcatagactttggccagtgattcaaatatggcctactgcccatttttatactgctggcaagctaaaaatgttttttttaattacactttttattttgagattaatagcagattcacatacaattgtaacaacaatacagaaagatctggtatactctttatccagtttctccccagtggtaacatcttacaaaaactatcacaaccaggatagtaacattgacccagtccagatacagaacattttactttttgtcttttgtttgttctatagtttttgtttctttgttttcctgaggcttacttgaacattttttagaattccatttcttggctgagtgcagtggcttcatgcctgtaatcccagcactttgggaggccaaggtgaggccagaagttcgagaacaacctggtcaacatagggaaacctcgtctcttaaaaaaaaaaaaaaatttttttttgagatggagtcttgctctgttgcccaggctggagtgcagtggcgtgatcttcattcactggacaacctctgcctcctgggttcgagattctccttcctcagcctccctagtagctgggactacaggcgtgcaccaccacgcgcagcaaatttttttgtgtttttactagagacggggtcttgccatgttgatcaggctggtctagaactcctgacctcaggtgatccgcccacctcagcctcccaaagtgcaggattacaggtgtgagatgctgcaccctgccaaaaaaaatttttttaacataaaaataataaatagaccagggacaatggctcacgcctgtaatcccagcactttgggaggctgaggcaggcggagaccagcctggccaacatggtgaaaccctgtctctactaaaaatacaaaaattagcctggtgtggtggtgcatgcctgtaatcccagctactcgggaagctgaggcaggagaatcacttgaacccgggaggcagaggttgcagtgagctgagattgcacccactgcaggtcagcttgggctacagagtaagactytgtctcaaaaaaaagtaataataaagataaatagaattccatttttatttacagtgttaagtgcatctctttgtataactttttaaatagttgtgctagatgttacattattacattatatacacataacttatagcctactcttgttggttttatcagtttgagtacatctatttacttccctttacctttccctgttaataatgcagttgtatttgaaattaagtatttactctatatacatttagatccaagttggaaagaattataatgttgttttttttttgagacggagttttgctcttgttacccaggctggagtgcagtggcacaatctcagctcgctgcaacctccaccttccaggttcaagcaattctcctgcctcagcctcccaagtagctgggattacaggcatgtgccaccacacccagctacttttgtatttttagtagagacctcgccatgttgaccaggcaggtctcgaactcctgacctcaggtgatccacccatctcagcctcccaaagtgctgggattagtgagccaccatgcctggctggaaaacattataatttttgcttcaactgtcaaatataacatcgaaaactcaagaggagatggaagatgtattgtattggttggtgcaaaagtgtggtttttgccattaaaagtaatagcagaaaccgcaataatttttgcaccaacctaatatttacccatattttttctgtgttcattttttttttttttgagacggagttttgttcctgttgaccaggctgaagtgcaatggcatggtctcagctcactgcaacctccgcctcccaggttcaactgattctcctgcctcagcctcccaagtagctgagattataggcgcccaccaccacaccggctaatttttgtatttttagtagatacggggtttcactatgttggccaggctggtcttgaactcctgacctcaggtgatccgcctgtcttggcctcccaaagtgccgggattacaggtgtgagctactgcgcccagcttctttcttactttgtaatgtcccaaagttctaccttttatcatttctttactgtttagagaacttcctttggctgttctcttagggtaggtctgctagtaacaaattcttttccttcatctgagaatgtcttaatttccccttcattcctaaagaatatttttttcttttctttttttatctgagacagagtcttcgctcttgttgcccaggctggttggagtgcaatgacacgatcttggctcactgcaacctccgcctcccgggttcaagtgattctcctgcctcagcctcccgaggagctggaattacaggcacctaccaccatgcccggctaatttttgtatttttcgtagagagagggtttcaccgtgttggccaggctggtcttgaactcctgacctcaggtgatctgcccgcctcggtctcccagagtgctgggattagaggcatgaagtgtctggcctaaaaacattttcattagataaacagttttttttttcaacactggaaacataattgtaccactttcttctggcttccatggtttccttctttttttttttttttttaagtttttttcattaaaatttttttttcttttgaaacagaggtggggtttcaccatgttgctcaggctggtcttgaacccctggacttaagtgattcacctgcctcagcctcccacagtgctgagattaccgagctgagcctccatggtttctgatgaaaaatctgttgtcattcaaatggtttttctctgcattcaagatttttgcttggtttttagttttcagagtttaattgtgatatgtcttggcatttctttgtatttttactgttgtgggttcacttgcctgtttgaatctaggttttctcggtctactgtctttctgttgctcagactgcataatttttattgctgtgccttccagtcaccggttctttcttctgggcctccagtctgttgtagagtttacccactgagctttttattttggttatggtatttttcagtttaaattttttttttttttttgagacgagtctcactctgtcacccaggctggagtgcattggcacggtcttggctcaagcggttctcctgcctctgcctcccaagtagctgggattacagggacctgccaccacgcccaactaatttttttgtatttttagtagagatggggtttcaccatgttggccaggctggttttgaactcctgacctcaagtgatccgcctgcctcagcctcccaaagtgctaggattacaggtgtgarccaccacgcctggcctaaaatttccatttttaaatactgtttttggctgagacttggttcatttgttttaagggtgcttgtcattgctccttgaagcattttgtcgtggctgctttaaaatgtttgtcaggtagtgccagcaccagtgtcgtcttggcattggcaggtattgtctttttgtgtctggaattggtgggttcttggtctcactgacttcaagaatgaagccgcggacccttgcggtaagtattacagttcttaaaggcagcatgtccagagtttgttccttctgatgttcggatgtgttcagagtttcttacttctggtgggttcgtggtctcgctggctcacgagtgaagctgcagaccttcgcagtgagtgttacagcttttaaggcggcacatctggagttgttcattcctcccagtgggttcgcggtctcgctggcttcaggagtgaagcttcagaccttcggggtgagtgttacagctcataaaggcagtgtggacccgaagagtgagcagcaccaagatttattgcaaagagcgaaagaacaaagcttccacagtgcgtaaggggacccgagtgggttgccactgctggctcgggcagcctgcttttattcccttatctggccccacccacatcctgctgattggtccattttacagagagctgattggtctgttttgacagggtgctgattggtgcgtttacaatccctgagctagacacacaagttctccacctcaccactagattagctagatacagagtgtcgattggtgtattcacaaaccctgagctagacacagagcgctgattggtgtatttacaatcccttagctagtcataaaggttctccaagtacccactagactcaggaacccagctggcttcacccagtggatctcgcaccggggccacaggtggagctgcctgccaggcgggtgctgtgcgcccacactcctcagcccttgggtggttgataggaccaggtgctgtggagcagggggcgttgctcatcggggaggctcaggcagcgcaggagcccatggcggggtggtggggagactcaggcatggcgggctgcaggtcccaagccctgccctgcggggaggcagctaaggcctggtgagaaatcaagcgcagcaccagtgggccagcactgctgcgggacctggtgcaccctccgcagctgctggcctgggtgctaagcccctcactgcccggggccgctccgagtgcggcccgcaaagcccacgcccacccagaactctagctgtcctgcaagcaccgcgcgcagccctggttcccacctgtgcttctccctccacacctgcctgcaagccaagggagccagctctggcctcggccagcccagagaagggctcccacggtgcagcggcgggctgaagggctcctcaagcgcggccagaatgggcgccgaggctgaggaggcaccgagagcgagcgagggctgcgagggctgccagcacgctgtcgcctctcatttttttcattccatgtgaaattttcctggttcttggtatgatgagtgagtttcactggaaacttggacattttcttgttacgttgctagactagattttgtgtacaccttgtgttttaactggcttcctctgatgctgctcccacaggggaacatggtactgcctcgctgctgccaggtgaggatggaagtcaggctccctactcagcctctaaggcggcagcgagccccttgttactgccagttctagtttgtggtctccactgacatcttggcgtggatggcttcattaccgctgaggaaagtcttgactctccactacacttctgacaccccccccagtagggagagagaggggggctttctctctgtgaggtgggtatggaagtccaggattcccaagtggtttctattgacacccaggcagggtggtggtagggagagaccggtttctttattgggtaggggatgaaattcctggctgcctgcttggccctttgtgacaccatcagggtgggggtattgggcgactcatcccagccccatgagggcagaagtctgggccctgcatgctgtctttgttggcatgtgtggaggtgggatctccttgttggtggcatttagctggagtaaaggagttattatctacaagctttctgtcttcctagcctgtctcttctggtgctttggctagaaagagcaggcttttgttgggttttttttttttttttttctggacctactggtgtttctgggttgctggcctcttcaattctaagtttggaatatataaagcaaaaggaaaacccagagaagtcatcaccacgttgtaccctgggttccaaggtctctggtcagcctgttcccttctctccatctttcagagtcttcttatgtttgttttacatgtaatgtcctgggctcttagttgtgtttaacaaaactaagatgaagtatgtatatttcatcttctcagagtggaggttctaagaatggtttttatttatttatatttttagagcagggtcttgctctgttgcccagactggagtgcagtggtgtgatctgaacttactgcagcctcgaactcctgggctcaagcagtcctgcctcagcctcgtgagtagctgggactacaggcgtgtaccaccatgcccagctgatttggcctcaagcaatcctcctgctttagcctcccaaagtgctgggattgcagggcagccactgtgcccagccatatatatatatatatatatwtwtwtttaaattttctattgtttgtagagatggggtcccactatgttgcccaagctggtcttgaactcctggcaagcaatcctcgtgtctccacttcccaaactgctgggattataggcgtgagaccccccagccgtatttttaaatgggaaaaaaaatgaagaatatttcatgacacatgaaaattgtatgaaattcagtttgtgtccatgaaacattcctggcatgcagcctcagccatttgtttacagattgcctgtggctgcttcctcactacagcagcagagtggactcatgacagacagtaaggcccccaaaatctaaaatatttactatctggccctttgcagaaaaagtttgccagttcctgggttaagatctaggctattttttaaaaaacaaaaataaacaggatgaaaatgcctggaaatcaatgcaagaaagaaacaacctaatagaaaaatgggcaagagctaggaataggcaccttttgtaggtgaagatgcataaaagccaggctgcaactttcccgttgcttaccacgaggtggcagtttctgacaacacctggtggttttccatagcctgctccgatcaagtcagccacctttgatgctcctggtttccatggctttgcccatcctggtagaactatccgctgaaggagtggggagtggggaagccccagatgctcactgttttcgtacaaaggtcagtcgttgttgttattgttttctttttaatagatgttttcaatttcttgtatgcttcagtcaatttccagagtcctgaagtgattgtttttgacaatttgtcaagatttgttattgctttttggggagaggatttgttgattgaaatattttgtagtgaaattgttttaaagaaaagaaaaggtaaaattagaagataagcttacgtggcacaacacgcatccaggcagtgttcaggtcagcgtgggggagagattatcaaatgatataagataatttcccatgggtgaaggatgtgagttttcagatacaaagcagccaatgagtgcccaggataatgaatgggaaaataaaaacctacatgaaggcactttacagaagtattttagaatactagggataaagctttaggaagagaatccacattgaaggatatggaatcaggtggtgtgattgaattcttcaggaaaataatatccaagcccaaacaagtcagtcaagaataagggtagcactttgggaggccgaggtgggcggatcacttgaagtcaggagtttgagaccagcctggctaacatggtgaaactccatctctattaaaaatacaaaaattagccaagcgtggtggtgcacacctgtaattccagctactcgggaggctgaggcaggagaatccctggaaccygggaggcagaggttgcagtgagctgagatcatgccactgcactccagcctgggcatcagagtgagactccatctcaagaaaaaaaaaaaaagagagagagaatataagggtaagccatctrcagtggtgtgtacctgtaatcccagtgctttggaatttgggatttgggaagctgaggtgggaggattgcttcaggccaggagtttgagaacatcctgggcaaccctgtcgacaaaaaatgtgccgggtgtggtggcacacacatgtagtcccagctactggtgaggctgagatgggaggatcacttgacctgaaggagtttgaggttgcagtgagctatgattgtgccagcactccagcctgggtaacaaagtaagacactgtcacttttaaaaaaaggttgaaaaagacttgctcagaaagatagggtctcaaaaaatgtgtgccccatgtacctgttctcagaaagctatgaaggagtgtgttccaacaaaaatgaatcagtaagccaaaacaagacgggatctggtatccaacccagatccaagaggagagagatgagaggcttcccagattggccaaaggcagtcctggaacagttgctgtgcagcaggcagtccagggcagagcaggacggggtgagactccagcggtgacgttggcaggaagaaaaatgtaaaattgagaggagcggtattatgaagagccactggaggttataggaaaacttagccaaagattcaaggaaatccaagtaaatggactggggaaaaagcagcagttaattcctaagaaaaggttgcaggccgggcgcagtggctcacgcctgtaatcccagcactttgggaggccgaggtgggtggatcatgaggtcaggtgttcgagaccagcctggccaacatggtgaaaccccgtctctactaaaaatacaaaaattagctgggcgtggtggcacatgcctgtaatcctagctactcaggagggtgaggcaggagatttgcttgaacttgggaggcagaggttgcggtgagctgagattgtgccgttgcactccagcctggacaacaagagcgaaactccatcttaacaaagttgcttaagaataaaaataacacataacttgattcaataggatttgcagtcacataataatgagaacactggaggctttgagcagggggtgacatagccagatagaacccattcwtatattttagaaaatcaactttgttgaagtattcgatatacttactgaagtataatttacttaaagtgaacccatttaagtgtacagcttgacgaattttgaccagtgcgtgcagcatgtarccactgtcacaatcaagatagagaacatttcagtcgcccaaaagattcccccttcagggcccccagcagccctcagctgttgtccatcctttcgatgagatggagcttttccagcgtgtcctgtaaatggcatcaggctgtgcgtgcttctttgtgtctggcttctttcattcagtggaatgttattgagatgcatccatgtggttgcaccatcagcagttctttttttattgccaagtgatattctgttgtatcatgtgccaccatttattcgtccttgcacctagatttaacttttaaagggaccctttagaacccactggaggaggccagaatggaggcaggaagacctgtttctggcagtccggggaagagatgaaaatatcttgtcacaccagccctggggcggccccccagacaagccaagtacatccccaccttagggcctctggacctactattgtcagcccagaaggctcttctcccaggtgtctatagggtttgctgtctcccttcattccgggctccactcagcagtcaccacctcaggaggactttccatgagacagcacccacccctggcacccttcatcccctgtctctgacktttgtctcttcatccctcttrctgccagccaaagacattattcctctttgtatacttatttagtgtctgctgcccccaccagaacgtgagctttgtggtggcgttttatatttgtgggtgactaaaggggggctccctgaggagcccacgcagaggtctttgtctttcatctttgtctttttgtgtctagcacatagaagtgcaagtgattaaagaatgagaaggaagcagttgaggttgaagctgcacatgcaaaatttccaccaggatgggcccctcaggtgttcccaggtgcagttccccaggttggtggaggtgagggtgggtgtagacagcgcttaaagagagatggcccagggttgtggcagcgagcagacttggaggctgcaggttgggacactgcctgtgttctgggtgtcatgaggctgtaccctgctgagtgtatgcaagaacttctccctggtgtgtggaggggactggatggatggtcccacctccaagccttctggccaccaacctttgtatttttgtttctcctctcccactgcacggactccccagcatcactctggagcaggcgcacctcttagaacacttgaccacctggtagaaatgtcccagaacaaagtaaagggataattaagagctgttgattgatctgggcatgagggtgaccatgcttgtagcaacaatggaacttaattaaaattaactgctcttgcagctattgaggtgctgccttgatgtctgtggcttccgtgtggccacctttgtattacagacacgtcggaaattggaggtctgtgtttaggtgatgtgcctgctgtggctgttggatgataattatgtagattttcctctggaacttaattttacaaactgtcaaaacgggcttgttatatttatcacttaaatcattagggaataataattagaccaaaaatgatgtgaaatgcttctgtattaataatcatttttagcttgaaaccactagtgataattggtttgtggggttggtatttagaactgccttaggagaggccaggcaccgtggctcacgcctgtaatcccagcactttgggaggccgaggtgggcggatcacctgaggtcaggagttcgagatcagcctgacaaccaaggggaaacccggtctctactaaatacacaaaaaattagctgggtatggtggcgcatgcctgtaatcccagctactcaggaggctgagataggagaatcgcttgaacctgggaggtagaggttgcggtgagccgagatcatgccattgcactccagcctgggcaacaagagcgaaactctatctcaaaaaaaaaaaaaaaaaaaaggccaggcgcggtggctcatgcctgtaatcccagcactttgggaggctgaggcgggcggatcatgaggtcaggagatggagaccatcctgactaacacggtgaaaccccatctctactaaaaatacaaaaaattagccgggtatagtggtgggcacctgtagtctgagctactcgggaggctgaggcaggagaatggtatgaacctgggaggcagagcttgcagtgagcctagattgcatcactgcactccagcctgggtgacggagcgagactccatctcacggtgctttgttatgggtaaagaagagaggcagaacgtggttggtttagcgaggaaaggttcaatttgggtctcattgattgacagcagtagttaacttgcactgaggactcactctctaattgttttaccgtatgaactcatttaattacagcagtaggtgctgttaactcccctgttctgcagatgtgaacaccaagtaactcacccagacttaagcagccaatctcccaaccaggattggggtccagacagcctgactcttgaatccgcacttgtaactgctgtgttgtgctgcttctgtttcttagtaccaactgcatgtcattgtcctgagcccaactaaatcctcacatcaagacaggtgggattcctggtgtagaagaggaaaccaagatttagagagtgaagaatttgccctaggtcatttctttctttcttgtctctcttttcttttttcttttttttaaacagagtctcactttgtcacccaggctggagtgcaatggcacaatctcggctcactgcaacctccgcctccccgggttcaagcaatcctcctgtctcagcctccctagtagcttggattacaggcacccgccaccacggccagctaattttttgtatttttagtagagacagagtttttccatgttagccaggctggtcaggctggtcttgaactcctggcctcatgtgatctgcccacctaggcctcccaaagtgctgggattacaggcgtgagccgcagtacccagcccctaggtcatttcttatttgattctttcattcagcacatatttactgagagcttaatatgcaccaggcatttcctaggccctggtgttacctccacgatcaaggtaattgttgaaagacacttgtcattcttgttcttgtgatgtttacattccagtggtaaaagagacaaacaagaaaataccagataatgagtagcagccggagaactaaaatatgatgatgtgatgaagagtgagaggtcacttctttagatggttcttaggggggcccccaatgccagctcagagccagccacttggaagaccagactaagaacattccaggcagagggaggcctgcaagtggcccaaggtatgagcctggtgggtgaaggggaggggagtaggcagagaggtcactgggaaggggcatccattggtacagccttgagagccaaggtcaagactttgggttttatttgtaagcacgatggggagatgttggaagattttaaccagtgatgtcatgtgatctactttttgtttgaaaaagatcacagtcctcaggtgattggattgtgggggcaggtgccacagcagggctccctgtttgctgtcactgttattctggtaagagatggygagtactggggtggtgggtatggacacagagaaaaatgttcatgggctcgggtgtgtcttggaggaggaggtagcttggcttgctgatgaatttgacgtagggagcttgggagagagaacttgggtgaactgctctgtaggtagtgatgcggtaggctgagcacagtggctcatgcctggaatcccagcactctggaaggctgagggaggcggattgcttgagcccaggagttcaagaccagcctgggcaacatggtgaaaccccatctctacaaaaaaaaaaaaaaaaatgccgttcactcaaatggagaaagctaggctggggagggtctgctttatttgttcatgattgcaggctccttgggcgggtctgttgcagacatgctaagtctgtgtacctcttcactgtcctgtcaagtggacatcacatgtgagtggaattccagagaatgatgagggctggggctgcagctttgagagtccgtggtacattgttgatacctaaaaccgttgcactggagatggccttggagagaaggtggatggggagaggacaagtcctgggatgtgccagtgttgagcagttgaactgagaaggccagccagggaaagagaaggagaaccagatacatgtgatgccaagagatgcgtttctgcaaagagggagcagagggaatactgcaggtggattcagaacaggggagtgaccattggatttggcagtgtgactgttcatgctgacttttgcagggccattttggggaagcctgagaggagatgtgagtgtggaggtaaacagcacagagaccgtgaaactgtggagttgcagtgagaggagcacagaagcaggaattgggggagctgtgaggtcagtcagagtctttccaaatgggtgtcagagcctgcttgtttcctgtggaaaaggctcacacgggagggagacagtgctggaggagcagcagggtgggtctgcagggtgagggcttgagccagagcgggagggagcaggtccatgcaggggagggatggcggggagggcaggagcgggagaggggttggtggtgggggttgggagaagagggagtcctgtctcattgcttcctgtttgccctctgatgaagaggcaagttaatgggcaggggttgtgggcgttttgaagaaaggagaggacgtgaggtcctttggagagaaggaaagtcaaggtgcgtgggtggtggtggtaggatggaaaggcctggatgcagggcagtgggaagggggatagatacttgggtttccccagggttgggggtttttcaggtgagaacagtggagagagggagaccagcatgggttgggggctgcagggctrtggggagtggcagggcacccaggcytttctgtccccacccagccctgcaccaggtgaccgctactacttcttttcctccctgcaggtagtgccagcagggcaccaggataagcgttctggtggtgctttctgcccstgtctggggaaggctgctgggcagctcattctgtgactgtagctccagatgagtgctccctggyagcagccctgctccctgccttccctgcttctgatcgtcttttctttgggttggctcaggatgcmgtgaggwtggagasagtggacsgatgtctcaaaagtcagctctaaagtcggagtcagaacaggggctgccgatgctctgtctcccagtctacctggagtgattcaacatagaaatcaataaaacaaatgccaccatggctgagtgagacctttcatttttcttcccaggtrttggagaaggcttctggtgaaggatttggcaaaaccgccggtgagattctgcgctgccatcctttcccaggatgtggctttgcagctcctaatggacctcttccagccccttctgcagcctcccttccagctcagtcccctgatgacccttagtgtagaaatatcccttttccctttcttcctctaggatgcttgcttgcttgctttcattttttctttgagacaagatcttcctctgtcacccaggttatagtgcagtggcatggtcatagctcactgcagcctcaaactcctgggctcaagccatcctccctcctcagcctccacagtagctaggactataggtgtgcatcgccatgcctggctaattgttaaaattttttgtgagatggagtcttgctgtgttgcctaggctggtcttaaactccttgccttaagtgatccttccacctcagcctcccaaagtgctgggattacaggtgcaagccaccatacccagccctaggatgctttcttaaagaatatcatccgactgacccttcccgcccagatgagaatctagagactgagaagttggagggtgcagcttcttggcccattttatgcttccttggagggcagggccaaggcctcttgtgggttaggggagcaattcctctctgggtagttctggtgcctccaggacttagtcttctgctttctagctattatacagctcgctcctaaagctcctgttgacctgtgtgagacagagaaactgagggcagccttctttgcagtcccgttggaaatgaggtgagcaaggtatagaaagaccaccagggcaaatggcgattacagacatcctctgtcccccagagagtggggacaaggatagtactggggtgggggatagttttcgggaactcctgtgtcagacccaggctgtaaggctgtgacccacactgacttataaaatcagcttcccagccgggggcagtgactcatgcctgtaatcccagcactttgggaggccaaagtgggtggatcacttgaggtcaggagttcaagaccagcctggccaacatggcgaaaccccatctctactaaaaataaaaaattagccgggcatggtggtgggcatctgtagtcccagctacttgggaggctgaggcaggagaatcacttgaacccaggaggcagaggttgcagtgagccgagattgtgccactgcagtccagcctgagtgacagagtgagactccatctcaaaataaataaataaataaaacaaaatgataaaatcagcttccacttatgtacagcaaaggcctgtgaccgtcccctgccctggatgccatgagatcatcatgcccaccatgtcccctgctttgctttaacagcggataccgttcttaatgtcaagagtgccagaatactcagtttgacttgaaatgctgtagggtgtcattagccccgtgtggtttaggcaggtaattgagttagtggagcagcagggtgacatttggaatgtgcgtagacgcaggggaggagcagctttgggatggaaggcatatcctgcatggtggacagtccacacctgcatcatttagaggctcgtgaatcacttaggaggccccaaatctacccattgaggacttttatccacctctctcggagtttctcagtgtgtttttgtttccctctgctgcttccttttcctgaactcttcaacccctacgcccccagaatggcccttcctttcctctgccgtggactgggattacttgggaactggctttagctcccaccctagagggggtgggcacagcctttctgcttaggggactcatcccccaggcagttcagcctcctgcaggacaggcgttggtccagtcgttcctttccttgcgttggtccagtygttcctttccttgctccccttgctcttcccgcagagggtccttcctggtgctgctcctgagggaatgcttccragacctgagctggctggcactcatccatagcgtccgtggggaggcggggctgctggtgacgagtatcgtcccgaagaccccgtttttctgggcyatgcacrtcactgaggtatggactggttgttggccccctcaggctcctgtgccttcctgcgtggcctccctagggtgggcatggtgacggggccggtcagtggtggagatgcagggtaactacggtctgatcctgggttcagtctcgttctctctcccacctcatacctgatggccttgggacggattagcggtgctaacataacaggtgacgtctacggaggcagatttgtaatgcagtgcaggcagtggggccgttgcgttttgcaccccacaggctctgcaccagaacatgcaggctctgtttagcaccctggctcaggcggaggagcagcagccctacctggagggctccaccgttatgcgcgggactcgctgtctggcagagtaccacctgggggattatggacacgcctggaacaggtgtgtgcctgggcaggggtagagtctatgggagaggcgtgcagggaaaatgctcccttcttgcattctcttcctttgggctctggttttttttcctgtggcttcttctctcaaaatcatctttatccttatttcctcactcaaggattggggagaaacagagcaaactcgctcttcctccctcctacctccactttcacatccactttgttgaggactgctgygcatggcactaggcggaatgattgtcctctgtctttctcttttcctctgccaggtgttgggtgctggacagggtggacacctgggctgtggtcatgttcattgattttggacagttggccaccatccctgtgcagtctctgcgcagcctagacagcgacgacttctggaccatcccacccctgactcagccattcatgctggagaaaggtgagacatcttctatcttcctcccaagggtttcagggacaggagaagccatggttgcttctgggacctgaacaggaarcagcatagtgggcggccaaggtgcttcagtctctctttccacccaaccccagttttcagcatatgacccctgcaaagctgcctctcaagtgttggttttcatgcctgggatctggagcccaagatcccaacagggacctcagatgctgcccaaaggctgagttctctggaaggggagagaagagggcagatttcccacccctgcttccaccagagctgctcagctttcatctgttttacatacttggcgtgttgcttcagatttcactggaaaaagattctgccatagaagaaaactagcactcgaatgccagtgctagacgccagagcacagcacttagcactgcactctcctaatgtgattcatttagcttcagacacctgtgggtttctccataggtggaaatgaagaggccccttctcaagatcgaagttaggtgaaatgtaaaaggatgaaagaatgttttagggggcagtcaggagaagtggaggtgaagaagcatacatacacatacacaggaagtaagatggaaaagttttatttaaaaaatttctttttttttcagaggcagggtctcactctgttgcccatgctggagtgcagtggcataatcataactcatagcagcctcaaactccttggctcaagcaatccttccaccttggcctctcaaagtgctgggatgacaggcatgagctgccgcgcttagctgagatggaaacgttttatagacaaactaagtctttttttttttttttttgagatggagtctcgttctgtcacccaggctggagtgcagaggcgcaatctcggctcactgcaacctccgcctcccaagttcacataattctcccgcctcagcctcccaattacaggcacgcaccaccacacccagctaatttttttttttttttttttttttttttagtagagatggggtttcactatgttgtccagactggtctcgaactcctgacctcgtgatccgcccacctcggcctcccaaagtgctgggattacagctgtgagccaccgtgcccggccctcagacaaactaagtcttgagatggagtcttgctctgtcgcccaggctggagtgcagtggtgtgatctcagctcactgcaacttctgcctcctgggatcaagcgattctcctgcctcggcctcctgggtagctgagattacaggcatgtgctactacgcctggctaatttttatatttttaatagcgacggggtttcactgtgttggtcaggctggtctcgaactcctgacctcgtgatctgccctcctcggcctcccaaagtgttgggattacaggtgcgagccaccgcacccggccaaaatatatatatatataaaatatatrtataatgtaatttatatattacgtatatattatatatatcacgtaatatatattatatattatgtaacatatataatatataatacgtgatatatataatatatatatttaaagatggaaaggcatctcccaattgtgcagggccaaggcttcctgggaggctggtggggcttgtgcccagtgggcagggagcaccacccagaggttgtcttgggtcattgcatgaagagggtccctgctgcccaggctgggaacagccaggcatcaggagcttcttcaggtgacccagggaagaggagcttcctgtttcaaagtgcagctcccagcctgtcagaagggccagagtccccaacccagagataagtcagacaagcgtcagttttcctccctttatggatgaggaaaatacagctcagaaaagtgaaatgaactcatacttaatagcaagaaaatggcatagctggggatgaaacctaggtctgactcttagtgattcagtgtcatacatacaaacagtcccagagtttggggactctggtgggatggtgggagttgcgtgagggacgacatcctggggaaaggtgggtttttgatgagctccctgcctggttccagcatgtaagagtgcttgcgtctcatggtgaaaacctctctggttttaaccttcttctatccagccggaactctcagagcagagttcagtgaacgtgattttctgtccccagtagaatttctcattaaaaatcccagatccctgtaattattttaacaagtgcctcctccctttatctgctgttattttgccctccccctatgctaccttttcagcatttatcatctcatttgatcctggcagcagggatttagcaggaactagcagagacttgctggttggagctggttggcggccagagcactttccctgcagcccccgccttttgcttccctcctttgctcctcctgcccaaccccgtgccactgaggttttgttgttgtgtcttgttttgcagacattttgagttcgtatgaggttgtccatcgaatcctcaaagggaaaatcactggtgctttgaactcggcggtaactgctcctgcatctaacttggctgttgtccctccactcctgcccttggggtgtctgcagcaggctgctgcctaggcctggacacagtatttacctggcattcttttagatcaaacgaactggttatctgaggggttgggtgaactggctcgggtgggccttccttcccaccaaggctttgtctttctcttccagttgcacatcctaaagtttgaagagtctaaataacggggcttccctcagcatgttccctctcctgtttgccacggatccagaggccacctgccctgtcttctcgtacccctttcactcttgaggcctgggaggtgaaaaaggccagactgtgcccaggattgattcaattttgcttttactcccagcttccctctcaaaagagagtgaagtctcatttgtcatgtgtcttcagttccccaacttggcatgaacatttgaaccaaacataggaaactaccattaggttgaaagcctgaggcagctgggatggtctttcttgtgtctcttctttgcaccccagagcatgatataagtggtcctaacagattctggataatggagaagccctctgctggttttcctggcattccatgtagaataggtagagaatatttaaccaatgagcaaataaatgttggcatgtttcatgagtttggagtgattgatacttctttccagccacccttccactgccctgccgtgccctctaaaactgctgcagtgagattagagcctgccagtgtgggctctgggccatgcaaaccctgcctgggatatagatacatgtttgaagtgtaggggaacaacctaagagttagtttcattatttctccttgccttctaagtggagagaagaaaattgtttcatgatgatatggccttgtttcttttttatactttgtactttattagaaccctaaacttaaggtcataaaagggagtgctgggtttggcaagaaaaatggaggattctcttagagttagttggtgttatgcaactcacaggggcaggcatttccctctatgtcaagtgaacaggaaccccactgtttcttcaaataattttattagagccaaactatttaaataattttatttgtttcatcctttggtagatgagaaaaatacattacaaaatacattatacagaagacagctcacagtacacattactaaaaacacaatctacattccagccagggctggtggtaagttcagaagaaagccacagaggccttgaaaaccagatttcagctctatggaatgaattttccccttatgtcccgtctttatctcaacctcagcatgttttattagcacccctaattaggtgggtgtgggtagagttagagcagcattgagtgggactggtggactctccatccacctaaagcagcaaacattaaaagtccctcaaaagaaaaggggtaggggaggggaaagaatggccaatgtgaaaattgctgtgtctcaaagcattacagaactgctctagcatcctagttcccaggcagttgtcccaagtctgggttttctgagacttgggtcttcacttggccatctttggcctctgtcatttcactgttaatgagagctgctggcatcgtaggtcctaagaggctgagtcccagagcaagcttacagacaaagagatgcaggcagcacccgctagatgcaaagtcatgcccaaacttttacaacagcaagtacatacaacacagcactgacagttccatctcagtacagactccccacctcatcttccctccctggcagttcctgagcctggggtaaggacacaggtgtatagaacaaccccccttaaaatgctaaccctttctagtaggacccaccttgtgggagtggcttgaaagaatccataatttcccaagccaaacaaattcagagctaggtctgttctttttgataaagccaaatgaagcaagagagagggaggtgagcaaagcttaccaatgatcaccatccagtgctggttagaagccactttccaggagaggaaccaatgaacagcgaagagttgcagccacacagctgagatcagaaaagaccacatacacacttggagactgtgtccccatccccactcaattcattcaaaaggaattctacgaagcagcctcttgagcctcattttctttttcttagaaatttgaaaacatctgtgactagaaaagtagtcctaagaattaacaccatcgtttcagcctaccacattgtagtttggcaggccaggctctgcattccaagggggcaggtgctggttgctccagaggccttgaggagaaatctaggggcagaccaggtgtgtgcttcagctccaagtttctcttgctttagcagcaaaatgcggcctctcatctctaccaaagcaacagtggactcgtacccctccccacctcccaagtagttcaggggatggggtgggatgtgcgaataaaaataaagatgagtcaagaccagcatcttcaaattaacaaactgtaattgttttcccaaagatacatttttttcatacacatccatcatacactgtaaccaaaaaaagcagtgtacatgaaataagagaaaataaattaaaaatccatagcataggtaaggaggctctagtctggagcacagctgagtttccagcaatataaggaggctcgaaagtttcttttataagaatgcctgctagcaagggttccagcaaggtggttggttggtctgtaagtcagtcttgagtacttgaaacagttctgtgtttgttttttttccttagcgtttagaatagccatcattgtcctgcaataggcagagctatcacgtccaggaaaaatgagggagggaaccacagaggcagcgtgagatccaaatacagcattcaaaggtaattggtccagtggtgcctggggagggaggaagggtgatactccagggttagccgtcttcttttgggggtgtgtaccagcctgcaaagaaatggaatggtcagtgaggtgaaggttcaggcccaccctccctgtcctgccccaatccctgaagacgtctccagtggcagagataagaggatattggggagggctatgctgtgtggggagaggtgtatgggaagctgagagcctgcatacctggagatgagaagggggaatgatgtgcccaacctgagatgatgggagagttagatgagctttttcaaaaggtggtcaagaagggggtagcaccaagtttatcggtgatatgatcattttggtgtgtttctggaagaggttgtgaatgttagccaccgccagtccctcctgggagaactggggcaggtgctgtgttaatgggtggttgagtatcagaaaccaaaagaaggggttcttgctctgtggctggaagtgaaaacctgggtgtggcaagtgtccgaatctcctgagtcctggctccagcctcaccgtttttttcgtggatctgcaccaaggacttgtaggactgctgtgctcttgtcagactgtattgagactggggagaggaagccaccagatcaggccatggctagctgtggccttactgcccctcaccttctgcaggctgtcacccagagaccccagagtcccagctcccagcacggtggtctagtaaaacactaagtaccctccaccttcgaggtcccttggaggcataatcccatagtcttccttttccagacccgaaacctcccaaaagtcctaggggtgcccctaggggccaaggcacagttgttccattgtgggcaccctaggccctctcatccaatgccaccagcccgggggccttatgctcattcctctaaagaaggcagccttggcctgctagtggccccaagtgtacttggctccacccagccccaccagccccaggaccaggatccttactttgttggctccaaactgcactcgtgctttccccttcaccagtgtggcactgatctgcatgatcactgactctatggagtaggcactgctccagccctgggtgaagggaaggacaaggcaagcaggtccagatggagcttccagagaaccctcatgcttgtcctctgggcaatcagctgtgtctataggagggcccttgccctttgcccccagcactgccaccacctgtctgtctaggtcagtgggtgcagacccagcccagcagaatgaaagggccacatcatgtctatcacccagcccgtaggggtgtgtgctgtaaagctcagacaatccccgcccaggccggcctggccaaggaggagagacaggctcacctgtttggtgagaagttccatgcagatggcccctccgcccagaacatacctgcatgagaaaggttagtcagctgtgcctgacaaaatctccaagtctcttccccgccctctgccagaggagatgccctcttccgcatgccagccactcaccctccagagaggactggagacacaaccctgacaaatggtgggtcaaagggaaagttatcctgagagagagagagacgacaatcaggggagggaggccagcatcctccacaggactgtcaggcagactgggcagcctaggccagagggagagactggaaaagaaaagtcttactttaaaggaaaagttaagtagaatgaagtcggctccttctttctctttgaggatctggagatcgttgtgcaaagcgctgtcctggtcaactctaagaagcaacaagcctgggctcagatgcctggttccacctcaggagcttcataagggctcccctgccctggctggcagcagaccacgaaaccactgcccacacccgctccgggaccctgaatgaaaatgctggatggggctgccctggagatcccaccacagtagccccactcacactcctcctcaacttcctctccaatcccagagtccccactcacttgaggagtttgacattccaatcatacagactgtcattcacgagttcgactgcatagtttcctggaaggagggaaaaaacaggtgttagtagaatggtccaggtggtgagtggtctctaatgcagacccctttcccagactgagagaaaaagatcaacagctctaggttcaccacagatggacatgcaaccaagccactggcttgaggagctccattcttggcctgaaaagttcataagcactcctggaccccagaacctcttgggccccttgccaccatacccttctttatgggtgactcttgtgcaggcccctctctggggcaaactcaccgcctttgaaactctgtgatcggtatatatccctgagctccttcatcagccggtcagtggcctgcaccgagccagacactgcaccctgtgagggacggatgacaggaacattccttggtcgtgtggtttataaacacacgttagaccttaggggcagtctggcagcttgcccaggatttaagaaaggattaggcacaaaaaaggagtctgctctccatactgagatgcgatggcctactacttcccagccatttcccaccaaccccttcaccagcctctctctagaaggcacgtacatttaagtaatcttgcctctggttctttttaattttctctaggatggccaagttttcttttccaatgccatcatcttcagatttcttgccctcagctggctcttcctctttcatttcatagtgatctaagtcttctgtgtcctggaggaggtgtggggtgggagtgaaaagaaaaggaaaaaaaccgacacaggttagagaatgaccatcaccttcccagtcccatttggcgaagagccaaaagttaaagtgaagcagtccatctagcagtcttataaacgcaacgtgctttccatttttagaacaatttccagccccattccctccacagtctaaatcttcagctctcaagctacagcaaggacttcggaaacgagcagagctgcagctgagatcgaggcagggacttagccctcttgtttcctggactgaccctgctccaactgttcctaaaactcccttggcagcagaaactcttccctaattcctagcagaaatgacttgggcctgaccctgtgactcaaagctcatgtttcaccaggtgactattgcacccgggagttctcagggccccaagcctaaaggagaaacctgaatcattacatctcctctcctcgctacaaatgcaaggcatgaatcaggtatgcagaggcacgcactgccagatggaaatgagaaaggatgtccagagagatatatggaagaggtcaagaacagaattagccccttattcatcctgctctaagtgagcaagcaactagctcactgagcatagggaaggaggagaacctatgtagggttcagcccctcagccagatgttgggggtgtggcccagagggctgtccactatctgggaggagtaaatttcatgtcgtcagccctttgccagtctcaagaaccttacacggttatagaacctgggatattaatctaatgctaggaaataaaagtaatcagagtgatctccccatttctggcaggacatacctaattaccacaccagcaggtaatgtctactgagtgtttattacatgccaggttctgtcctaggtgccgcagatactagctcatttcattcttaccaccatcactcattattctatcattatccattt

SEQ ID NO: 96586 - DNA, 15722 bp, Homo sapiens
ccgcccctggccctgcgggaggggccaggcgtcttccctgagcatggtgccacttccccagtgttggccttgtttcctgctcagcatttggcagatgcgcctctggcccaactaggatgtttccattttacagacgggaaatccgaagcccagagagattaaataatttgcccaaggtcacacagctggctagtggcagggtgggattcagccagatttgtcgcactccaaagcctgagcttttacccacgttctttactgagtgtgtgctgtggggcaggcatggagaagggtggtcagcaatcccctgccacagccctcaggtgcttggggctggaagggaggagcgaggcagccatgtgctctgagggcaaggacaaggaggaggggcaggtcaggatggagcaggtccttagagccgtgggggacctcaggttccatacagggggaggcaggagaggaagccgcccctgggctggcggggaggaaaaggcttccagggtccagagcatcactccctggaggcctcccttccttcctcccgcagtaatgaccggcgctgggcttcaggctgccgcggagggggatggtgctggatgccatggttacatcgatctttcctgccacatcctcccccagctccagccctgacttggctccaagtcgccccacagggggcagtgggcattgctccctgcctggctacttgtggttggggcaggggcgggggtgggggttgtgtgtggacttgggggaggaggcgggagtgaggggagggggctactcagtgcctgcagttcctgcttcccaagtcctagacccctgcttcttgcctgcccccctccacatttttcctctgttgccctctagggctgtggcacttcagaggcctcttcccaggagggtcccagggcggggagggcaggcctgggggctcccccgccagcgttctcctagtcatttccccttgttctgggctctcatttctctccctgctccgtgatgatgcttcaggccctgacctctgctcctctaaccctgcaccatgggtgtcttcatctgggtctctcgctgggtttaggggtctccaggaacccccagcactgaacacacaattgtgtgtgtgttcatgctaggagcacagtgtgggcatttttctgggatgaacatccccaaagggtcaagccccctgctcttcctcttccctgagccatctcacttgcctcacagccgaggctgccacctgtgggctggtgaccttcagtctatttcactggccagtctatttcactggtggcacccaccctaggagcaccacctgaaggcccctttcttggcctctccaggatctgccttggccccacaacatgtttcttctgggttcccagttttggttaacagctctgccatctccttttcttttcttttcttttttgagacagagtctcgctctgttgcccaggctggagagcagtggtgtgatctcagctcactgcaacctctgccttccaggttcaagcgattcccctgcctcagcctcccaagtagctgggactacaggtgtgtgccaccacacccagagagttttttgtatttttagtagagatggggtttcaccatgttggccaggctggtctcaaactgctgacctcaagtgatctgcccactttggcctcccaaagtgctgggttacaagcatgagccaccgtgcctggcctgccatctccatttctgaccaggctggtggcctgagtacatcatcctgagtcccttccttccccacctcccccttcttctgtcacccaagcctgctgggtctcccttcccagtatctcttggtctgtttctgctattccctagctcttctccagaaccccttactggtttgtttacctgactggtctcccggttattttaatagagctgaacctggatcatggtatttctttgctcgaaacactccagtgggtctcatgttgtacagaataaagctttactgctttagcaaggcattcagagcctttcaaatcccagttgctgtctgcatcccctcctgtcctccctctccctaagtccttccctgcaggcacgcaccatctggggcaggtggtctgcttttgtgtctctgtgtctgtgtttacagtgtttcttccacagggaatgcccattctgtgaattccctttgattcttaaggtgcagctcagtgatcctctcagattccgccaggcaggttttgcctacctagccgtcttgtaactcttttgtcacaagtctgttgtagcacttatcacatcctgccaccattgggtactcatcgtctcacccattatatctggatttctttaagggcagactgtattttacacagatttgtaccctctgtgtggcctaccatagtgtctgacacatagtgagtgctccatcaatatctgtgcaataattaaatgaatgaactgtgacagaagcaactaccacaggggcttcagaagctaaagaaggcccagcgcggtggctcacacctgtaatcccagcactttgggaggccatagcaggaggattgctcgagcccaggagtttgagaccagcctgggcaacatcatgagacgtcatctctaataaaaataaaaaattagccaggcatggtggcacatgcctgtggtcccaggtacttgagaggctgaggcaggaggatcccttgagcccagaaggttgaagctgcagtgagttgtgatcatgccactgtactccagcctgggcgacagcaagaccctgtctcaaaaaaaacacccagaggctaaagagtcaccttgtcttctctcgacttgttccctcacctattcatggctctcttcctactgtataaagcttgagaagaggccatccatcagatgccagggcggctcagagcttgttttgtgctcatgtgggtatgcatataacaggtgtctggccagtgaggtgagagagcttacacagggatgtcagcttcacagactggcaatcacttccgtaaagtctgtgtctcctaggggcatgtgctgagcttggcaaagcacgcagccccagactgcaggttgggaaggcctactctcagggaggtggctttgctgggttcaggtcagagcctctgggagagtaggattggatattggaccagggcagggtgtgggaacagagctggggtcagagtggttctcccagggccttcaagggctgggccaggccctggttggcccagtgccacctccatgcggatcagcagcccagggcgatgcacaggatgccagatccaggtagggcccatgatcatctgtccctaccccctcagatgaggacccagaggcccagagagggaaaggaacttgtcacggcaagtcagaggtcaggctgggacagagcaaggagccagcatcccggtaccacactgatagttgatcagaggccagctgtgtccacatgtttggggctatttgcagttgggtttctctgggcaggcagccgctagcctcactgcatacccacaggctctctatggggggagggctgggctatagttgctagggatctgtgctcaccttgctgaggctggagccagatgaccagcccccttcagcccatgccagtggaaacctgccctttggccctcctgagttcctgaggggctggccgagattatggtagcaagtgaccatgaaggctcttgggacgcaggctagactcccagcaggcaggcccactccagcaacttttgtcacccactatgcagggaagttcaagctcctggaacaggcccgggatgtgcgggagccagtgaggtacttcagcagcgtggaggaggtggccagtgtcttccctgaccgcatcttcgtgatggaagccatcaccttcagcgtcaaggtcagtcactccctcaccaggtgtggtgtccccacactactccttgcctcaggggcaaccctgactctggttggaaggttgccctcaggatccaagaaggagagcggctcctggggaccccttaggggtctttggcacaatcaagccatgtcagaagggtggggaataggacccactgggctgaaggacttcctatgaaaggtagtgaagcaggagcgggtgtctggaagggtcatgttctgacttggagacttttcagggcaacctgtccctagctgccccagcacccacttgtagaggcggtggttgtggtgagcaggcagtgtaaatagacccctgctgtggggtgggagcagtggctcatgcctgtaatcccaacactttgggaggctgaggagggaggatcaactgaggccaggagtttgagaccagcctgggcaacatggagagaccctgtctctacaaaaaatgttaaaaaattagctgggcatagtggtgcgtatctatagtcctagctacttgggaggctgaggcgggaggactgttgccaggagtttgaggctgcactgagctgtgaatgtgccactgccctccagcctgggagacagagcaagaccctgtctcaaacaaacaaacaaacaaacaaaaacaactaaaagcagtccctgctatgtacagatagtgctgttctgtttacaaacccttttcttatccatcaattcatttctcttcacttagccttgttggatgggtagggcattatgatcgcccaaatggtaaagacaatgatgataaaagtcgccatttactgcatactttaaaatatgttgctgatccaagtagtggggaagaaaagaaaaatatgtcactgcacagtctttttaatcctacagcagttcttcgaagtaagagttatcagatatggtcgctaaggcgtggaggggcaactcatttaaggtggcacagctgctagtggtctctccaggatgaacgtggatctcctggcctaccatctagtccgagccccgggagggcggaagaggaaggctgttttccctttccagtctctgggagctggccgtgtggctttccctgggacctggctaaggccctgccctgtctctgggatccccaggtggtgtcgggcgagttcagcgaggacagcgaggtgtacaacttcacgctgcatgcgggcgacgagctcactcttatgggccaggcggagatcctgtgcgccaagaccaccaaggagcgctcgcgcttcaccaccctcctgcgaaagctgggccgggccggggcgctggccggggtgggcggcggcggcccagcgagcgcgggggccgcgggaggcactggcggcgggggcgccaggccggtcaaaggcaagatgccctgcctcatctgcatgaaccaccgcaccaacgaaagcctgagcctgccctttcagtgccagggccgcttcagcactcgcagcccgctggagctgcagatgcaagagggcgagcacacggtgcgcgccatcatcgagcgcgtgaggctgccggtgaacgtgctggtgcccagccggccgccgcgcaacccctacgacctgcacccggtgcgggagggtcattgctacaagctggttagcatcatctccaagacggtggtgctggggctggcgctgcgccgcgagggcccggcgccgctgcacttcctgctgctcacggacacgccgcgcttcgcgctgccgcagggcctgctggccggggacccgcgcgtcgagcgcctggtgcgcgacagcgcctcctactgccgcgagcgcttcgaccccgacgagtactccacggccgtgcgcgaggcgccagcggagctcgccgaagactgcgccagcccgcgccgcgcgcgcctctgcctgcccgcgccgcgcgcccccgggctcgcccgcgcccccggcccgctagcgccggctcccgccggcgagggcgaccaggagtacgtgagccccgactgggcagccgcgcccgagcccgccgcgccgcccgccgagatcccctacgaggagttgtgggcgcaccaggggcccgagggcctcgtccggccgcccccagggctcgacctcatctccttcggggccgcgggaccgccgcgtcgggagccggaagcgccgccgcctccagtccctcccaaatccgaggcggtgagtgagcgcgctgggggccgagtcccgggtccagccagggcccaaagcccgttctcctgggccccggccccggagtatgtggcagacgaggtgtcttcctcggcggggtggggaaggggagaaggaaagggcagaggcatgccaggcaaaagcatttgtagtaaggggcactggggcgggcggtggcgggagagctgtgggacagagatgcgtgtaggtccccagcctcagaggatttgagaggagccccgaagcactgttacccagaaggtaccacagaacaggggtcctttaagttgttgcgtgaaaagaaggttccttggcgaagtaagcttagaaatgctgtgaatgattcccagccctttttccctcctcatattggagtcacagagcattggtagattaaaggctctgagaagtcctgcactaaggaatcctgtttatcagaacattttctccctgcccgtaacacccgtcagcatcccatggagtcctctttggggtacacgacttgtagggagggatgcaggtggcagacgcttccttccctctgtcccttcggctttcctttgtcctctgctttctctccttttccttgaggagggagcacgtctgcttaacctgttttgatctacctttgtgttctttttcttaacatccatgatggatttccaaggaacaggaaggaggctgtgggacagggtgtgggtgcgtgagataggctgggaaggctaggaagggtggggtggctggctgactggatgagcagttggggtgcaaggcagcctattggcaaagtggggcaaatgtcaggcccagacagccccctcgcccagctgcttgggaaggggaagataaggagtgccagctgtttggagtcgaggtggagtcaccgccctctgcttgtaggtgaaggaggagtgccgcctgctcaatgcccctccagtgcctccccggggtggcaatggcagcggccggctctccagcagccccccggttccccctcgcttccccaagctgcagccggtacattcccccagctccagcctctcctactactcctctggcctccaggatgggtgagtccctgccttcccttggtcctgagttctaaggtagatcaaggcagggaagggtgaggagggggaactacagtgctgaggaagaggaagtcttgaggcctgggagattcccgagggtgcagctccctgtgcagtggctcagggattggcactgctgtctgggtgtcttggggcctggggcccagtggcctgttctgcccacttcagcttctttctctcttaaatgttgaggaacggatgggagcattgccctggtcccctcaaggtggggactttgctgcaggatagagagaagagagctccttgctgttttgaaattttgattaagttcaggccaggtgcggtggctgatgccggtaatcccagcactttgggaggccgagttgggtgaatcacttgaggtcaggagttcaagaccagcctggctaacatggcgaaactccatgtcttctaaaatacaaaaattagccgggcattacggcacatgcctgtaatcccagctactcgggaagctgaggcaggagaatcgcttgaacccgggaggtggaggttgcagtgagccaagattgcaccactgcactccagcctgggcaacagagcgagaacaccatctcaaaagaaaaaaaattgaaagaaaatatttttattaatttcagtttcgtttcatttttcccctgtgttttctgacctgggctgggggatgctggaaggaagaacacrgccattccggagggtcttgggctggggctggggtgcaggcccgtgttgctgaggtcatagtggtgcttggttgcaatgcatgtgtgaccctatcggattccctctcagcctcacctgtcctatgtgtgtgtgtctgtctctgtccacagggcgggttcccgcagtggcagtggctccccatcgccggacacctactccctctattgctacccatgcacctggggagactgcaaggtgggcgagtcctctagccgcccagccccyggtcccctaccctcaaccacacagcccagccaggcctcccgggccctcacagagcctctgagcggtcgagccgcctcccttctgggggctgacacccctgttaagacctaccacagctgccctcctctattcaagccctcacatccccagaagcgctttgctccgtttggagctctcaaccctttttccgggcctgcctacccctcaggcccttcagcggccttgtcttctgggcccagaaccacctcgggtcctgtggctacctctggccctgcgtattccccaggcccagcctcgccaggccaggcctattcagctgctcccccctcctcctgcgccccctcctcctcctcytcttctgaatggcaggaaccagtcctggagcccttcgatccctttgagctggggcagggcagttctccagagcctgagctgctgcgttctcaggagcccagagcagtggggacacctgggcctggaccccgcctttcaccacttggcccctccaaggcctttgagcctgaaggtttggtgctgcaccaggtccccaccccactgtcaccagctgctctgcagggacccgaggcgggaggagcactttttctaacccaagggcgcctggaagggcctcctgccagtccccgggatggagccacaggctttggagtccgagatgcctcctcctggcagccccctgctgacctgtctgcactctccctggaggaggtctctcgcagtctgcgtttcatcgggctctcagaggatgtggtgagcttctttgcccgagaacgcatcgatggtagcatctttgtgcagctcagtgaggacatcctggcagatgacttccacctcaccaagctgcaggtcaagaagatcatgcagttcatcaaaggctggaggcccaagatctgaactgcccagctggagctgcacagctggaatgctggtatgggggccccaggtacagcactccggaggagcaggtgctgcctgcaagaaggatctatgtcgagactgaggctgctcagcagccactgggtggatccaggggagatgcatgtggaaatgtggtcctctggggtcagacccctgcacgggacatcttgcctttgagtgtgcagagtacatggggaaggggctgggggcaccactgtgtacctgggcccagtaaggcatttgccgtgattcccacaacggggtcaaaagctggccttcagggtgacctaacaccacctcatgccctgctatagaccttcacaaacgacttccactgctgaagcctgtaggctctgtttagagacaagaagatggctggtaatttaagcaccgatttcccaagtgcccactctcctttgtgctctgttggcttttggcctaaagctgccccagagtgagggtgtagatgtctgtgtctgtgagatgcctttcccttccccctctgctccaccgtggttgagggrggtggggcctggccccgcacacaggtgagtcgtgtacaagcctaacccatggcacctcagaggctccacctgtgggtcctggttcatgggtgacaactttggaagagcacagctctgcaattgacccgacccacttatctagttaggaagccagacactgcccagatgactctagcaccctggcttctgctctgactttactgcagctagtcatccatccgtcaggtggcgttcagtctcagaatactgattccgtggaagagcaggttgatttaggtcagcttctccttgattctagaagcaagcggtagtcaaccacctccaattccgccaatctcttgcccccatcatttgtctctgacaatacttggtgtttttccctggttttctgtcactggcacaggagggtacagttgggagagtgcgttcctggagctcagtcctgcatttgttcacgtgcctcacagcaggcctttgtgcccttgaatctcaaacatggggatctgcttggtacccagagctctggtcattgtgtccaaccacacaccccaccccatccgtgtcctccatctcacccagaaccacagggtgcccactagtgtcagggcccaaagtgccagccttctcttctgccttacctagtctacctatttatttcctccactttttatcttaaaagtagctaagccatgctggtgcccatactccaagcaggctgcctcagctcagagaagtggtcagagagtagagcacagaacctgtgatgtggggacatttggttttcttgcagatcatttaatgaatcctcaaggactaatgaaataaatgctagactgctgaagatgagtacaagtggcattctgggtgccagctgctttcttcttttgaaaacaaggccatggggacccatgggcacagtgtatatgccttctggcaggagaggactgatggaggaatgatgtgggtgtgtggccattcccatgtctgtggaggcggctggtggcagccttcattcccttctgcagggccctcgccagcccctccctacccttcaagaacccccaccccagcttccactagtttcaacataattcacacctacctggtgttactgaagggaaagacccaggctcaaagctgaatgccaccagccagggcccaagcttagcttcctgcattggcagaatgccggcttcaggctctctcagaccaaatttggaaaccggttaatggctttggtgcaagggatcagctccctactctggtcatctgaaaacctcaactcagaggtgacttggttttagagtctggcttcctagtgaccaagcagagccagacctgatctccttgcctgccagtcccagctacagagctgggaccagggacatatttgaagtacaactggagcagaggcaggagtaactggtaatatctgacaatttagaatgcagaatgtgatgggactggaattacgattccgcacacactcagcgtggatccttctgccagacccagttagccccagtgctgtttacccagactgggcactgcttctgtaggaactttccatcccagggggtggggtggggaggggctgaagctttgggggagtgcaggtgctgtgggggtcagcactcctcatgctgctcccgtgctgcctgattaccgcacaggcatttctggggcagccctgctatgcaggatctccgaacatcaagggagatgtcagcgcctctgcttagcaccaacgttcccacaaccatcccaagaagcacctatgaatgaggcacacccagaaaagaaatgggtaagatcacacaatgaggaaatccaggctggggaaagaggtttaatatcccggtacaccgtggtgagaagcctgggcaaagcatctgcacagacaggtgtgtgtggttgagcccaccaggtcccactttctctcatcccagtccctccctaaggtgctgcctagaattctgcacacacattcttactcccccaaagcacagggctttcttccagattgctttttgaaggaggcgtttaaaccagaagggcaaagatgctgacacagagtttggtttttattgttatgtgtttggctgggtgcagaactgccctcaccacccctggccaccctggcctcttgggaggaacaggcagagaggtggcttcagatggctcttggctgccactctaggcctcggggcttatacaatgagcagtgggctctaccttccaataggaagtgcaaactaattcgaagtcacacttcaccaggagggagagatggtcttggctgaaggcactttaatcagggagcaaacccagtgccggagtttgtcttctcgttactctgataaatctagacaccactctgttggagaaccagcactgccggcagctggggttagtgcactgactgagcgaggcatgaggcctgctcactggtagaacttcttgttagggctgttagcatggtcagctagcagctggcatggggtgaactgttttccataggcagcttcatatttcttgagccggtccactatcttctgggcgccatacagatccacaaagcggaaaggccctgaatagagaaagaggacttcgttgaaggagacgcaacacgggctccaggctaaagtgagcttccttcccaacctgcgagaccaacctcccagacaaggcgggaagccaagcccaaagacggctccgatgtctccctctgcaggtgtggccaagatcccctcttgcaggcacatgactgcctcattcacaaatcttgtcaccaggcggaactggatgtcttcgtctgatgagctgccaacagaaagagatgtttaggtagaagaagaggaaaaggggaggaaagccagagccgcagatgcagaatggaagtcgggatgggtgcatggggagctctgtgggccggttggtgctggccctcagagaagatgctgcctgggtgaaccaaactttcccatggaaaaagtggagagtaacttgccctaattaacatgaaactgagcacctagaacagggcctggtgccgagaagataatcagtatctctttgacatcagcaacagtcagctgctcacaaatgataataaagatctgggagggtgaaggggccaaggagaatctgtccttccagcggctctctgggaacttgccagagaaggctggagcaggggagggccttcaccagacgtggcctggttctcacctagatgctgggcagagaccaaggagcacgtgcgagggccttccacttggaaagcaccatgccagcatcaggagtggtcctcctgttcaggtatggtggtcacaaagaaaatggaagacagcaccatggcacgtgtatacctatgtaacaaacctgcacatgtatcccaggacttaaagtattaaaaaaaaaaaaaatggaagaggggctgggaagctttgggctgtcagagaaagtcaatttccaggcattagccactcaaacggacttacacttcagacttaggaggcagcttcagactcgctaaaatactatccatgtcagaattcaaatccttcctcttcacaccctcctgatagatgtaaaagcccttcccagatttacgacctaaaacaggcaagaaaagggagtgttactatttgttctcagggagggagtgttactatttgttctcagaaccctggcctggccaggcgtggtggctcacgcctgtaatcccagcactttgggaggccgaggcggaggatcatttgaggtcaggagtttgagaccagcctggccaacatggtgaaaccccatctctactaaaaatacaaaaattagctgggcgaagcaggaggatcgcttgaacccgggaggtggagacgagattatgccactgcactccagcctgggcaacagtgtgagactctgtctcaaaaaaaaacaaaaaacaaacaaaaaagaccctgacctgagaattcttgtctctgttggtctattataaagctctggcctcttctgaattcctgaatttgtatgtctagctaaccctagcaaattagtctttgtcagaagagtgggcagagaaggaaagaagatcttgtgacccggagcttgggcatctgtgtacatggatgagaaaggccacctgggtgagttttaacatccccatatgcagcaccgggtcctagaacacccaggttgtaatgctgattttgctgttttgccaagacagaaagtcacttctctgtgggcctcaactgtatactgtgtatggtgagcttatacattctcctcacaggtggccagacagcatggtaaagcccggatgcagagcttgcttctgcactattgcagatttcatctcggggggataaaaatgcttgtccatctggcataacttggaccaggtgatgctagagccccagaagggtagaactctgccttttgtccataatctatagtcctagcccttagaaggttcacatgacatcttttttttttttttttttttgagaaggggcctcgccatgttgcccaggctggcctcacacttctgggctcaagcgatcctcccacctcagcctcctaagcagctaagaccataagtggttgctaccgcacctgactcataaaatcatttttgaaatcgccagtgataagggctctgtgtttagaaaactttcttccacgagggcttctgtaactctttggtctcaggaactgcttagaactttgtaactaatggtgctagttatgtttccttgaggctactcacctaggaagcccttggacaccatctgtgtcagcagttctgggtttccacctccaaaccgctccccaaagactttgcccagatcttccgccacatgtttcgctacatccacaccaacttcatccaccagtgtggcggcacccacaggaaagccaaagcttgtggtcagggaatccagcttcttcgggtcaactccttcctgaacaggaagcgatgcagggacctcaggggaagggcagcccaaatccccccaaagggctccctgtactggctccaaacactgccttgtgtaaaacccacttctgagtgtcacctgaccaggcccaggactggtgctatttcattcagggaagcacaaagaagtttggggccacaagtggaaagtctgagccttctctaatctacagcactttaaggacgtttagagatgactaaattcttcattttcttcttgtttgcatttctgaatctcaataataaggagattgcatgacagacggctgagtgtgtcatgaccaacagaagaaacatcatcaaagaggagcactcagagccctgtgatccccaagtctgggtaagtgcccagcgaggaggatccctctcctttcctgccagaatgacctcgatggctactggagaggtctgtgtgctgtggaaacagatgcagcaccagttgaaccaagcgggccctgttctggatggtccctgcctcagagaggtgcagaaacagcatagaagacatgctggggggtggggtgcctttagcttgctggaacagtgaggaggctgtggggcagagggaaagctctgcccctttcagtgcagtataagcccaacttccgactgctgtgcagagagagggcaccagggaccttcctagacaagagcaggagttggtgtatcagaaggaagcttggtccttatcttgacatcatgagttttagagtgactgaaggagtggaagatgccgcaaacactctggagagcaataccaacctggaggattcggatgacttcagacatcatgggcgcaagacacctggtagtatagaagccaggtccatcctgccaaggaagagaacatgagctcactggccctgctgctgggactgagtctgaaacactctacctttcccagggtcacttcaaagtcatttgaaagtcactgtaaaacttaaggtgacttaaaatctcaatcagaatccttaaaaatgaaattgcaggggaagccgtactaggggtagcctggcttgaatcaaacagtacagcagatagtttcatggtcaccttcaaggtctgggatggctgggagaaccctgccacatcctagatactccccactcccacc

SEQ ID NO: 96587 - DNA, 13766 bp, Homo sapiens
ggcggtgaactggcggtccaggctgcgcctggactggcggcgcgtcccatcccagggctgggagagcaggggcgcgccccttccccggcccggaacgctgagcaggcagccgagcgggtgcgggcgagtggtccgcggtgggctcttctctccccggccgaacctctccagtccacccgctcctgcgcttccccaggccccgacggcgcccctcctcgcgggcggcccggccggcacgcagcggcgcggctggagctcccggccctcgaccccgacggatccctggcggcgcagcccgccccacccacccgcagcctcccgctggggtcagactcccgcgcctcgcggccaaaccgccagcggggccacgcagggcgctgaggtcccggagaggcgcgaaaatagctcagggtcccgggagtatggtcagggcggaggcgggagcgcggccggacccagctgccagctccttccccagcccgcgagggggcgccgcgtccccatgacaacgcggacacccccaccccccggagggcagcgccccctgctcccctgcgtcgctggccgtgggcggcgccctctgtgcccaagcagggagctgccggccagcccccgagaggggcgcggaccgccggggtctccgacgcctcgggtgttgacccccgcgcgtcgccgccgggtgaccggcccggggcgggcggcgcggccccgccacgattggctgcttcctcgtgacatcacgcggctcggggaaaagtgcgagcgtgagcgcgagtcggagccacagcgccgggagctgcgggcggagcaggggccgcccctcgacaccccgtccccgcccccggccctcggcccggccgcccgccccgccggcccgcggggccgcgcgtccgtcccgccgtctgtctggcgcgaggggagctgggcagaggcggcgggtaagtggctccgcggcggcgcgggggcggggggctcgccgggaagagcaggaagcaggtccccgggacgctctgaggctccccagaggtgggttcgactgggacagggcgccagaccccctctggggcgagcgcgggccgggagcggcagtgggccggggctgggggaccccgctggaagcaaggccgggggctctcggaggcttctccaggtgcgcccgggtgcgcccgtgggaaggggtgggcatccaggatgtcgggggcgggggattgcccgcccacagaccccacggagccaggggcagccgtcgggggtgggaccctgtactccagccctcccactggcggctcagcagggcgccgggcgctgaagccccaaagagcccttttcccgccgtctccccgccctccctctccctccacccctttgcccccgcgctgccagcccactccggcccctggagtcctccatctacgaccttgagccccgacggaaaacacccctgccctccccgacacccctcccccgctccggtactacccccctttgctgcccagcctccaagccggggtcctccagctccaggccccctcctccggccccgcaacggaagtgttgggcacaatgtcggtgccaaatcttcgcctctccctcccttggactctggagtctcctctcccgccccagggacagatccaggggccacagccttcccagagccatggagtgaatgcccaagaaccgaagacctacaccccaaaccaccccacgggcgtgcggagcaccccctccggtctcgcccggggaagaggggtgtcgaggactcgggaaacacagtgcccacgcccagaggctgcaggaactgcgtgctaggggcttggagggagggcggggcacccgagagccagggctccttcgaccacggcggagacatggaggagcctccagatggcctaggaaaacacggccctcgaggcccgcccgaccctagcgtgagaaactgggtccccactttggtcacaggggctagacagtgcctctggggtagggtgcagggtgaggagagaaggaggacaagagtcttgcactcgcctgacccgagctctgtccgggcctccgccttgtgggtgcactgcggatgccctctcgccgcgagaatgggcggcttttggcaataacgcctcttaggggagttattagagctgagcgtgcctggtgtccctcaaggccaggttgggcgactctcgcagaggcccctcgacagatgtcagtcagaggctaggactctgccacatctttaaggacttggacacctctgggcaccgggctaagacggcgtcccaaagttaggtggcccgtcgcaggcagcccctagtagtctggcctcctcgcccgcacaacccttcacccacaggccaggtgcaatcccgatgcaggctcctggcccgaccctctacgcgctcaggcggacagctaaggtctggctgagtctccggcaggggcgtttggaatgtgaccggtcacccactctcggccctgcatttgcttgtgcatgcaagtccacaggtgtagaggcacccgaaccgtgtgcatcctcccggccacagcaccctaggcacgcacacgcatgcacatgcacgtgtgcacacggcgcggcatgctcacgcgctctcacgggcggactggtatccaggcgtggccgtgcgcacacacacgcacatgcatacagctactagcgtctactcgcgctcccccgtaggcacacacaaacagaactcgcactcgcgctcccgcccacacgttcctcgcagggtgccgggtggaatccgggctccctcaactttcccacccgagaaccccgcgcggagccgagggcagctctggggcggcgtccgacggggcctggcgaggggaccccgcgtcacttccccgggaggctgtgcctgagggctcctctgggttcgcagtcgcattggagttgggggcggtggccaacggcggccgcacggtctaggtccggagcgggcaccagggaccgacattgccatctagcggtgcgcacagccccggcggcggcggctcgctccccagatgccaggcgtatctggattccagggaaggcgccagagggggtcggaatgtctgcgggtgaccccgaggtgtccaaaacgacgacagctggggcggggcggagtcggggagaccctgagcctcgccctgtcagcacctggcagctccctcacgcgggccaagagcaggacttaatcaccggccatccagtggtcccggctcagcccagccgccaggatctgggagaagacaagacatcgcttgtcttctgggaaagctaagtcgagaagccagcaggaatgtgaggggaccctacccaagcctcacctggacagtccctcagttgtgtggttttcgggtcgaggggagcagaggcaggaggtcaactctgagcagtagcaccttggactttaagaaggagcttcccgggttcttctgcccccacccgtacttcctaacctggtgactttgggccagttgattaacattatcctcatctataagaggatatttacatctgtaagatgaggacactaataatacctgccttttcaggctgttgtaaggattaaaccagataatctatattaaaagctcagaggggttcctgacacgcagttaacactcaataaacaagagctattatgttttcacattctgcacttctagccccgtttgttatcatcctgctgccctgtatcctgccttgggaggctgaagtgagtttccttggggctggctgactgattactcctgcctgccctgtcccctcctccacgtgagtgattgggggagggcagcctcctggtgctggaggggacagctcagagagtgacacctgagcttctatttcagaggctctcagagccaaatggggttgtcagggaccccaagagagggcagtatgtggtctttgcccttgactcgttgtgtgaccttgggggtgacaacacttgctctcagcctctcctcctacgaaccaaggatttagaacaggagaacttgaactatcaggctaggaggctgggtctgtatctgcgacggtggaatagaagggctggggtcagacttggggcagttaccctggcccttggccccagcctgcagtacatttttgtgtttatgtatagagatcaagtttaggtgccaatccctatagctgctggggaggatgtcccaggacaggatcctctctattctgcaaatgagaaagaggtgcaggaaggggcagtggatcgtctcaggccacagagccagagcccaggctgcgggttagtgctccttcctccacagccggctgccgcgccctctcttcctctcacacacagacgcacagaactgcgtatccgaccatgcctgctgggctggcgtggctgtgatgggcccgcgtgcgtctgtggagcggtgtgtgtgttggcgggtgtgaaggaggctgggctgagcggctgccctggcactcagagctggcgtgggcctccctcacatggagggaagaggaagagggggaggagagctaagaggagcctggtgggagggagggcaggctcagggaagggcctgtggtggggactccagctagggcgccgcccggtgtgcggagtggactgtggaggggagaggcggccctggcagcccttctcttccctctgggacaattctttcacctcacgggtccccagttgggcctcagggttctctgacaacctagtgacccctgcactgcctccctcccagctgcatgccctgtggctggagctgaggactccttgaaggggatgtgacagttgcaggtacctcctgaagccccttctgcagggactctcctcctctctggggtgcccagctccatgcaccgcctctggtcccctgcaaagccttctggctcctggagctctttggcctccttcagccagagctcttaagttacgggactgccttcctctcaccacctcaccccgcacttaatcccaccagcaacatagtgcaagaagccgtgaaaccttggtcaggcttttaacagctccgtgcctcagtttccccatctgtaagtagtagagaaaaaatggtatctacctcataggtttgttatgaggatgaaatgagttaacactataaaaaatgttgccaggcatgatggcgcctggagtcccagctactcaggaggtgagaggatggcttgagctcaagagttctagaccagcctggacaacataccaagaccctgtctctacaaataaatagataaataaatagacactttttttaagtgtcaaaagtgcttggcacttagtagaccatcagtgttaggtgctcatacataccccgattattgcctttgtcccagtgtcttctacaggggttggagagcaggtgttaagaaatgaccgaatgggtaaatggatgaacagaacacctccctccagagcccacatgctcgtgggcctctgggaccactctcctcctcctcttgcttccctgagctcccccagcactggcctctgtccaggccttgcgctgcctccaggcctttgctgtggctactgcccctggcagggccactctccacagctcctcctgtggctggctcctcatcacccagatgacctggtgggtgaggccacctagcaaggagtcatgcctgtcctgccttctgactcactctctcatcaccctgccttttttttcttttgtggctcacgtgtttgcatgtctccccccatgaggcagggggccatgtgtgtcttattcacttctgtagccacagcaccctgagcaatgcttgccacatagtaggtgctcaattaatgttgaatgaatgggcaaatgcgggatggcgggacagagttctctcaaggcattctgccagagaatgtccctctgtcaccttgaatccagtgtacctccagatgactcccccattccctcctgtagttcatgcttttctctccccttcctccccagacacggcctacccacccctggcaaccaacatggccaacttcacacctgtcaatggcagctcgggcaatcagtccgtgcgcctggtcacgtcrtcatcccacaatcgctatgagacggtggaaatggtcttcattgccacagtgacaggctccctgagcctggtgactgtcgtgggcaacatcctggtgatgctgtccatcaaggtcaacaggcagctgcagacagtcaacaactacttcctcttcagcctggcgtgtgctgatctcatcataggcgccttctccatgaacctctacaccgtgtacatcatcaagggctactggcccctgggcgccgtggtctgcgacctgtggctggccctggactacgtggtgagcaacgcctccgtcatgaaccttctcatcatcagctttgaccgctacttctgcgtcaccaagcctctcacctaccctgcccggcgcaccaccaagatggcaggcctcatgattgctgctgcctgggtactgtccttcgtgctctgggcgcctgccatcttgttctggcagtttgtggtgggtaagcggacggtgcccgacaaccagtgcttcatccagttcctgtccaacccagcagtgacctttggcacagccattgctgccttctacctgcctgtggtcatcatgacggtgctgtacatccacatctccctggccagtcgcagccgagtccacaagcaccggcccgagggcccgaaggagaagaaagccaagacgctggccttcctcaagagcccactaatgaagcagagcgtcaagaagcccccgcccggggaggccgcccgggaggagctgcgcaatggcaagctggaggaggcccccccgccagcgctgccaccgccaccgcgccccgtggctgataaggacacttccaatgagtccagctcaggcagtgccacccagaacaccaaggaacgcccagccacagagctgtccaccacagaggccaccacgcccgccatgcccgcccctcccctgcagccgcgggccctcaacccagcctccagatggtccaagatccagattgtgacgaagcagacaggcaatgagtgtgtgacagccattgagattgtgcctgccacgccggctggcatgcgccctgcggccaacgtggcccgcaagttcgccagcatcgctcgcaaccaggtgcgcaagaagcggcagatggcggcccgggagcgcaaagtgacacgaacgatctttgccattctgctagccttcatcctcacctggacgccctacaaygtcatggtcctggtgaacaccttctgccagagctgcatccctgacacggtgtggtccattggctactggctctgctacgtcaacagcacyatcaaccctgcctgctatgctctgtgcaacgccacctttaaaaagaccttccggcacctgctgctgtgccagtatcggaacatcggcactgccaggtaggcaggcaggagtgccctaggaggtgctggtgttgcgtgcgtgtgctggggggaccacacggctcacttgctgtggggaagagttgcaggcaccattctgcgttcacgtttgctgaggaggaagttcagaagaggctctgtggctgcattcagagaccagatctctgctcaggctgaggaggctcaccccagggagtgtctgaactggggctgcctggcccacctctgtggccctgcttcagcgagctgcggggcactggcctgggtgggcacctgccccactgtgaccaaccatcagcagtgctggaagaatggacatctggatgggggccgaagcccagggccccctcaggaagaacaaaggggccagtgcttggaaaaggaggcttgggaagggagtagaagggtggggtcccccattctgctgtaatcggtgctttctgcccccttgcaccccgcatgtaggctcagccccctctccccaaatcccactccaggggcagaaatctcctctggctgcagctacttagccaggttctgggtgggtatgatggaggccaggtcccccccgccccagcagcactgcccttgtcacattaagatggggcagctgggaggtcagaggttctgtctcaggaactgaggtctggccttctgcgatcccaggctgagccgtgagtggtccacgtattcagaagacagccccctgcagccccggccttagaaggctgtcccaggtcacacatcgagtcagggtgaggctgtggtggatggcattcccatctgccctcttcaaacctctcaccccctggcttctgcagggtggaggcctgggtcacacaggcaagaggaaaggggtcaacctggtggctcactcgggtttccatgacagtgggaaggggggaggtgggcagtgaggtaggcacgcagccctcgcatctgctctcccccatgggtagaaccttcctgattggctgtgggttgtatcaaaagacctttgactgggtgaggctgagatgggtgtggtggttccagtgagtcagccaggttcccttccccagccctggtccctgagggagatgaggaccgaaaggcttaggtgacttgatggggagcaccctttcaggggccctggaagaaatgtttgtaattgttctgctttttccatgagctctggagagcacccaccaccaagccccctgaaacccaccagtccctacagcctggtctttctccccaccttcccactcccaaacacatttccacagcaaactccttgggaaggggcttttatatattaaaaaagaagagcttttattggggggaaaaagtcagtttatttgatgtgtttcttagtaatggaattgtggggaagaacaaaagcgggctctgggactcacattgctttgggggaggctcaagcttcccagaatcccttgtccctccccactttgggcacttaggggtggggctggggagtgagagggacaaggcagggcatgattgattaaagctaacgagcagacagaaggcactggtgggtcacatctcgggcctgggagagggagggcgtgggccaggccccatgtgacaccaggggctccttggcatccaggcttggcgtctagtcctttcccttccctttcttggctgtaaaacaagaaagaaatattaataccatatcagcagttaggctgacccattgcagaccgccggctccacaaacacccgggcatcagggaaggagaagattctgccccctagtggtttccaatcagctgactcggaagcaggggatggggcagccattgtgatgtggacatgggacatccccagcttcctatttccacttgggatcagaaaaccttcaagtttccagtcctagtcctggtcacagcagccctgggcatcctcagcctcctcacctgagaagcgggcagattcacccctgccctgctggcctcgctgggctgagtcacgagtgagctgagaggcccagggtgggccttgacctcctcccaacactagaaagggcagagctgaccaaatgctgcccgtggctggagagctgacaaaggcaagccgttccaggacactctccctgggtcctaagccagatgctccaatggagtagtttgagttggtccctatttgggccagggaggatttatgtccccagcatcacctgcggcctctcttgtagtgcccatcttcagacttttccaggcagggaagccaagtgaggcgatgtcaggaagccactggccaggactcaaaacttaaggtttaacttggaattgtcccctcacaggcgggggggggggggcagccccccccggacagcccccccccctttttcttttgctgacctttggcctttgctttggtcttgggggtgcagggctgggggacccggatggtctcctggcactgagcattgtagcgcgccttcttcagggtgccttggcggactttggtgcctgtgcccccatcacacgcaccccagttctcaaacttgtacttgcagtcggctggcgagagagcggcccaggtcagcgctgcgcggcccgcggccccgccctccgccaagggtccgcccaggcttcggcgaggctgtgccccccgtctcctgccctctgactgcgccccgcctcacctccaaactccttcttccagttgcagggcaccctgcaccggatgcgctgggtctgggccccgcaggtgccctcgcggaaacccacgccgcaatccttgctgctgggggtgcagggcccccaggcccactcagcgcactcgctccccgggccgcccttcttcaccttatctacaacgcgcgaggaacagagttcaggactggggcacggggagactccctcgggagccgccttcctggggttccaggctaggaacccaggcggcccagcccagaagtggaggggcctcgcctgcccgtccccagccctccttcgatcatcccccatcacctttctttttggcgaccgcggaggtgagcgccagcagggcgaggagggtgaggaggaggaagcctcggtgctgcatcctgaggggagagcccgagtctgaatccctggcccgtccccttccccaccgggggccgcgtgcagggccctcccacctccgcgtgctccactttccaggccccaagtcgggctgctaaggtggcggcggtgggaagacttggggcggcccctcgccgctagcccggacgcaccgctaagaggcgactccccgggggacgcctcgagcccaggacgcagctcagacccccacccccgcctccagcccccagcccctagatcggccgcggccgggcggaccaggggccgccgcgcgctcactcgctcgctgcccgcgctgcttcgctccctcccgcgccgggcccgtcccgctccggccgccgcggccccttttgtctccagaaccggtctgagccggtcacatgggcccccgccccctctccccacccccccagggaaggacccgccccgccccctcccctcaaacccgcaccgcccccgaccccggcgtccccgcccccgctccagcccgcgccccccgcgcttctactccggcgtccgtgttcccggccccgcgtcctcgcgtctccccgccggtgccctctgcgctgcgacggcggcctctcccggccccatcttccgagcggtggtctcccgaccccgggccccgtcccgcccgcgcacaccggcccccggcccactccctgcgccgccgcccgctgcccccatcccaggtcgtcccctgccgtacgccaaggcccgggccgttctcaggcctcagcttctcttgcctgccgcggagccccggcgcctgtataacccgcgggacccgctcccctccacggccggctcagccctggcgccctgctggctgctggggagggggcgcggcccacctggggcggtttccgcgggtgggcagggaagcgctctgctgtgctggggggagtctgggacccggtcgcccagagaaagccacgggtgcggtcgcccagtgcctttccgggagcacaggcttgagggactgcgagtgggggtcctgggggaggagcccgcaggcctggatttggtgaaacttggcgctgacaggagccgtctgagaagttccagatccagccacatcggcagctgcaagtgcccaccccctctaaccctgggcctgtggcattgcctcgcccggttcccccaaaccgggagagcccccgaggcctgggggaggggcttgctcaaggccacagggcaaatgggccacagaacccgggctcgcccccgccccacccctctttcactttcattgttgttctccgcgggaagcgggaagccggagggatcggccccgcccccggccccgacgagcgcggccgccgggcagaggtcaggaaccgggcaggccctgggaccaaccaccaaacgggagccggggccccaggaaggtgctgtcgacagcgtccagtcccccaccccgaggacaaccccgcagcccccgctgcttgttagacctcccccgcaaaagaagaaaagcagaaaagaaaaaaaaatccactttactgagtcacacccagctgtaaacatgtcaccgtgagagtcccgccccccacccccaggccgcacagtccgcgatgaaatgacaggggagcggggagggtcgccggagcgggtgccaagcaaggcagggcaggcaagtgcagcaggcgctgagtttccgggaggaagcccggaggaggtggggtggggcaggagcgggggctggggacccggccgaagaccagggggcccaggaagcctcttcccgaaggcctccccctctccagcccctccactcctgggagggcatctgctgcggccagggagcgccctgccccagaaccccggcaaaggcatatccaacccagccgtgtcttgttccctgtgagcctccgggtccggcggggtcctcaggggaacaggtgaggcccccccagctcctgagtccagccctaggtctgggcggctccttagggggcggcatggggctctttccctggggcctaggtccccccgtggccgtcccactggaatgtggcagtgaggtgggcaaggaaggcgctcgtcccctggccgcattgtccctcctgctgcccgtgggcggcccgctacacagccgtctcctggtcctcccgctggatcatctggtagtgctgccggttctccaggtaggcggccagctcggtgtcctgagccttctcagcccgctgccggggagtgtcgccctggaggagggcggagctgcgatcagcaggggccagaggcaggcctaacccctagcaggctgagaggcaggggctctacctccctgtggcctggtcagggagggaggcctctctgcccaccagctcctcccctgctggctcaggtttcccagggtctggactgtgtcttcccagggacagcccccagccccagctcccgcctaggaccttgggaaaggtttggttggtgccctcgtgggctccctgcctgccgtctgctcacctgctggtctgtcttcatgagcgaggccccggcctccacgatgtagtggcagatggtgcgctggcccagggccgctgcttggtgcaaacaggtctccccgctgggggagcaggggctggctgtgtaccccatcccgtcccctgatccacccatctgtctcccaagggccatcagaaagggcaggaagttcagggctctggggcaataggggtggcccaggggatgacagatgtgaccaggaagtttatgggctctgacctgacaaaatgggaggggtggggaaaagggtggtttccggggtgaccacggttctgcactgcccagatacttacttttcctccaccgcatcaaggatctctgggggggctggagaaggggaggtggtggtcagagaggcctggcagcccctcctcctcccaccttggccccaggccctgggctccactgcccggctcaccgtggtccagcaggtagcggaccacatccttgctgccagtgctgactgcgtggtgcaggagcgtgcgactctgctcgtctcggtgcatgaggtcgcccccagctcggtgcagctcctggagctgagggcaggaggcatggcagggctggacctcctggggccacccctccttccctgagctcacacgctggcccacagccgggtacaccagcacaggcctgaaacgagtgcgctcacacatcttactcctgagttgcctctgtgggtctctctggagcacaccggaggaggggcctctcaccccacagcctgtgggctctct

SEQ ID NO: 96588 - DNA, 14987 bp, Homo sapiens
  misc_feature (1)...(14987): n = A,T,C or G
ggtcatcatggtgctgctcaggctcctcgtgttcctctttgctccggtggtctctggtgaggaggtggtgggtgggggaaccgtagttttcccttggagtcctgacccttcccagataagctaccatggaggacagggattgggggagaggtaggaaagtgtaagaatctgaacccctggccctcaccccttctcttggccacttcctcagtcaagttctcactccccatctgtgaaatgctggatgctggatacaaggaaaggccttagctgcttggccccatggcatggccaggccctgtggcaaaaggacaggactatgctagtatgtgtggttccatcagcctgggggcctccagcctgaattctctgctcttcacagacctctgcagcctgccctgctttataaatgtctctgagagccagggccctggcacagtccttcagtttttatccttcaactgctcctcctacacgcccacacccaccctggagttgctcaatgtccagccacccaccaccttcttcaacccacccagcttggctaggtggcaagggacctatgtgggcaaggtagggtcatgtgtacagctggggactgtgggggcacaagggcagacctaaaatttccaagccccacatggcactgtccacccaccccagttgaccttgagcagctctgctcagttggatgccctgatggtgaaccactacaaggtgcagctgaagttcacatgtggcaaccatgtgatggagggctcactctctgtggatgtgcagcgggaccttagccatatccagtgtgctggtcaatttgccagcccaggtgaggccaggggcagccggcagggtgggggcaggcatggcctgagcagatcctccctgacctccactctggccagctggggaaatgattcaggtgccagagacagtcacacctggggctcggctgtacactctgctcctcccaggcctagaactccacggagcgcaggtaagcccagaacatgggacggtgggtgacaggatgggggtggggggatggagagaataaattaacccccacctggccaggcacagcctgaagaggaaccttgcagcagaggcatagatgagcctctacatgatnnnnnnnnnnnnnnnnnnnnnnnnnnnnnnnnnnnnnnnnnnnnnnnnnnnnnnnnnnnnnnnnnnnnnnnnnnnnnnnnnnnnnnnnnnnnnnnnnnnnnnnnnnnnnnnnnnnnnnnnnnnnnnnnnnnnnnnnnnnnnnnnnnnnnnnnnnnnnnnnnnnnnnnnnnnnnnnnnnnnnnnnnnnnnnnnnnnnnnnnnnnnnnnnnnnnnnnnnnnnnnnnnnnnnnnnnnnnnnnnnnnnnnnnnnnnnnnnnnnnnnnnnnnnnnnnnnnnnnnnnnnnnnnnnnnnnnnnnnnnnnnnnnnnnnnnnnnnnnnnnnnnnnnnnnnnnnnnnnnnnnnnnnnnnnnnnnnnnnnnnnnnnnnnnnnnnnnnnnnnnnnnnnntaatggccaggcacggtggctcacacctgtaatcccagcactttgagggggctgaggcaggtggcctcagggagttcgagactagcctggccatcatggtgagactctgtctttactaaaaatacaaaaattagccaggtgtggtggcgtgtgcctgtaatcccagctacttgggaagctgaggcaggagcatcgcttgaacccaggaggtggaggttgcagtgagccaagattgtgccactgctccaggctgggtgacagaacaagactctgtctcaaaaaaaaaaaaaaaaaaaaagtatttaaaaacagtaactggcttgaaagcaaaaaggattgaggactgcggccagggcttgggctagaagtcagggagcccaggctgggataagggtcagtggtgaagcatgagaaaactgggtgtcaggctgggcacagtggctcacacctgtaatcccgcattttgggaggccgaggcgggtggatcactggaggtcaggagttcgtgaccagcctggccaacatggcgaaaccctatctctactacaaataccaaaattagccaggcgtggtggcgggcacctgtaatctcagctattcgggaggctgagactgaagaatcacttgaacccaggaggtggaggctgcagtgagccaagactgagccattgcactccagcctgggcaacaagagtgaaactttgtcagaaacaggaaggaaggaaggaaggaaagaaggaaagggaagggagggaaggaaattagccgggtgtggtggcacaggcatgtaatcccagctattcaggaggttgaggccggagaatcacttgaacccagtaagtggaggttgcagtgagctgagatcgcaccactgcactccagcctgggcgacagagagagactctgtctcaaaaaaaagaaagaaggaaggaagggagggagggaggaagagagaaggaaagaaagagagaaaggaaggaaggagagagcgagaaggaaagaaagaaaggaaggaaggagagagaaggaaagaaaggaaagaaggaaggaaggaaaataaattgggtgtaggcaggtgcctgctgggttgctggagggttgctgctgggttgtcgatgggggtgctcagggcactgggggctgaatgtggttgccagcatctctgttctgtcagatgagcattatcagtgcccaggacctgccacacttccctggacctttctccatcaatgagcaaggttggctgcaggcaccatcccagggcctcctaggccaggctcaaaaggtgagcatgacctggaatctgagggtgtttatggattgggtagagtgcctaccttttagaaatttgtttattcttggcctccttggcctccttgactaatactgactctctcagacctggacctgctgctgcatgctgtctgtcctcccaccttagcttggttctgtgctgggctctggagttctagaaagaagaggaatccctctctctgggaattcacaagccctctaatagaaagaaaagtgtttagggcaatcacacagtaagagaaagtcctgggtaatggccaggcacagtggctcacccacataatcctagcactttgggaggccaaggtgggcgttgtcacctgagttcaggggttcaagaccagcctggccaacatggagaaaccccgtctctactaaaaatacaaaaattagctgagcatggtggcgcatgcctgtaatcccagctactcgggaggctgaggcaggagaattgcttgaacccagggggtggaggttgcagtgagccaagatcataccactgtgctccaacatgggcaaaaaaaaaaaaagttctgagtaaaatggtcagtgcagtctggaggtggctttcagcaattctaagatgataattcacattgtcaatgattcagatatcactctggggctgtttgtatcctaatggaataatttatggcccaaaggtatggggctcaaaggaatacttgtcagcagagtgacaggtcatggggatcatggggaagagtggaagttgaagatccttttggagatcctaagtgaggttgcctatttaaggggaggactgggcatagacaaagaggtggacacacacaatctggctccttttctgttctgggtgcaccacaggtcttccagctgcaaatctcagtgtcctttggacaaaggcaaagctgccaagggatggtgatagtgaaggttttgcctgttccctccagccaggtctccttcctgtaaggctcccctaccctggaacagtgagggaggaagggcctagccccagggaatcaggtagggtgaggctgctggagctgagtcccagccctgacaggagggggcccagggaaggaagctgtggacccacaggttgagcaggaatgggcaggaaccagtgccccccttttggtccagcgagcaggctcagaatatcaccatccctgagaatctggcccccggtagtgaggtggttcaggtccaggcccggggtgtcgacctgcgctatgaaatcctgtctccggtgcccagcccactcttctccattggtcgtggtgagaggtgttggggggtgggggcaggtactgggatgcctctgtggctggtccagaggtgacccatagtacctcttcaccttcctgtttgggggcctggtcttggagaaggcagcaggagggccaggctcagcggcctcctttgcctatggatctggtgggctggcaggagtgggactgagctgggaggcggggctgatctctgtgttccctgacccctgacctctgtgttctctcaccccatgcagcagacggtgtggtccggaccaccacgcccctagagttagctcgcacctcaggcaccgcggtctccaggctgcaggtgaaggcctttgagcagggccagctgtgggccagtgccaagctcaatctcaccatgaatgtgcagctggtcaacctctggcctccacgctgcctcccagcgcttctggtgtgagtacccgggaaccatacttgggctgctggggtcagagccatgactcagggtactgccagactcctgccttgctgccactgcatactctcaggtcccaaatcccggagactgcacccgtgggcaccgtgctgaatactctcacttgcgaagatccggactctgttggtgccaccctggactacaagctgtggttccgcagctcttccaaccctgccagcctctgcctttatgacagagtccttgaggtgcccagccccagctcccagacccacttgcagggtgcttgcagtgggaaggggtgggtgggccaagggtctctgagaccacgggagtgggggtggagggatggctgtcgagccaacccgtgttgcagtctggaaaacaggatccaggcaagatatttgtggatgccctggcctacagcagccccgtgtggctcagggctctctcaggccctggctggacctcactttctagcccctttggctaggtgaatgccacactggactgtgacactcctggagcctgcttccagcatgcagcctccatcctggtgctcgatggtggccagccccagatgaccagtgagtgaccacacccggcctggacacccaggacaaggctgttctgtcctcccgcttcccatgctcaggacagggtcatctctcctccttcagaatccagtagggcagggttgtcaccatttcagaccctgaagatatatctcttagacccccagcaggggaaggcttctgccctccctttagaccctctcactctctttttttttttttgagacggagttttgctctgtcacccaggctggagtgcagtggcacgatcctggctcactgcaagctctgcctcccgggttcacgccattctcctgcctcagcctccagagtagctgggactacaggtgccggccaccacgcccggctaattttttgtattttcagtagagacggggtttcactgtgttagccaggatagtctcaatctcctgacctcgtgatctgcccgcctcggcctcccaaagtgctgggattacaggcgtgagccaccacgcccagcagaccctctcactctttagacccccagggcagggccctgtctccctcctcagacccccagttcagggatagttaccccaggccagctccttgactgccaaatgacttccagctgaggtgccggtactggtgatggtgacacccatcaacgagttctccccagcctgtgcccctcgcacgttccgggttcaggaggatgcggcgccccacactctactgggctccgtggtgggcacggatatggattaccctcatgacaacattgagtactacacctctggtggtcctaccacctttgctgtggaccgtctcagcggtacatccaccccagggctgggatggaaacagggagccagagttggccctgcaggctgaagctgtggtctccccctctaggggaagttcacctcctgggacctttggactatgagcagcagaggctgtacaggctcactgtccttgtgattgaccatggccaagaccagaaccccaaccatcacctctcaggctcctgtaccattaccatcgaggttgaggtaattgcgtcctaaggctttggaaataaatacttggaaagacaggagttcagattgccctgtggtgttctgcttttccactctgtgccttggtttcttccacgagttggctggagaagagtggggcctaattgaaagctctggagcctgttgtgtgatgacttcatcacttgatgcctaggctacggctgtggtgagaagaagttgaggggctggctcagaggtttagggggtgggttccacccactcctaacctggttcctttctgcaggatgtgaatgaccatgcccccgagtgtgagcccccatttcaggaactcaccatctatgctcctctgggccgtagcgtggaggtgaccaagatgtcatgccagatccctcaggagccacagcgcctgatctactcctatagcatcgtgggaggtaggggacatgggcaccaccaggttgtgagtgaggggcaggccaaggccagcaatggtctcttcctcctgtcattctgctttcagggaatagccagaaccgattcatcctgcaaggggccatcctggtgcacagtgaccttgtgttggggccgttctggccagagcarccccgtacctatgagctactgatctgtgtggccgatgcaggcccctccaccccccacctcagcaccacagccaccattattgtgcatctagttccccggagggccagcacagtggccaccagcacccacagaaccacagtgaggaggctccttgggccctcagcagggtgggaagggtggaccttggagagtgaggagacccagtttttcaggtggaactatggggaaggcagttcagagggaagcgcagagtgcggagagcccagcagtgttgaagagcaaatcatgggtgtggggtggcttagcccggggaagggttggaaggctggatggtcagggcattttggcaaggcagtggtgaggytgtggcctccttttcaggtgccctcaacratgacacccatgctcgtgacagacacagaggctttctggcagccacagccctggtttgtggtggtgttgacagcaactggtgctcttctcctcttggccctaggctggcttcttggcaggctcctccaggggtagggatcctatccttgtgctccctacttgcccccaacccacctatggaccccagttgtgatgggtggtttcacccaagattagatgacaatgcccaagtaggtgggtgacgaactgatattgaggagggctactctccctccagaggtctttagattagggtcagagagacactgggaggaagcaacttccatcaccggcagaatccagtcttggaatgggaggagggtagataagctcagggcttgaaactgtgagtctgtcatacattgggcatttacccctattcctgacttctgccctccactggaaagctttcctgctcctgtagactctgaagttccttgtggacataggactgagcccagggaaaggggatgtaacaatgtgggcactgcatacagacattggttgttcccaatataaaggaatgggtgaatggtgctgattcctggagccagtaggcctgctgccctcactgcttcgttactcctcctggcattttaggttggcccagctgctgcaagcacccagcaaaccagcccaggctttgctgctaaacaggtcagtctcytttgcatacttctatgcctgggatcccatctcttaaactcaggttagggcccagagccttgccctgtactcttgctcgtactttgccccagcatccagggaactgagggatccatcgagggtttcctggaggcaccgaagatggagatgtcccaggcacccagcagtgtcatgagtctggtatgtcagctcaccatctcaagtagtggacaccaagggtgcttcagagtactcccctgccccctccaagccttttttcccatgccccttttccgatgaatgggtatccttgtggaaatgcccacactagcaccatcagaatggaggaggcaggtgggcttctggccccctaggggcaggccttcatctgctcccctgtgggcagggttcaattcattgcatcttttttttttttccctcagcagcattttgatggcagagcacaggactcccrtgagtccccstcttcctaagctattctctgcctgggccctcaccccatctgagtatctcctcctctctttaccccatctcaatatctcctcctactcccargaacccaccatctatctgcttttttcctgaatggggtctgctctcatccccgctcactcttcatccatcctttgtcaaacgtctagggggtcaggagatgactcatatctggtctggtctctgcccacaacgggaggagggatgatggtgaggggagaggcctccagatagtccaatgtcaccagtgatttatgggagagtaatctggtattgccttagggaagctggtgtccagtgttggagaatcaaggaggcttcctgtgcatttgagtcagagttgagagaatttgctgagaagggagggaggggacaggttagattccagcgaaggtgggatgtcacactgagggtcctggaggaataatctcctacccttaagtaagggggagggaggcagttcttctggggccagcagcaccccctgctctcctctctctcctaccggttttaggtaccggaagagactacctgtttaacacacacacaggagcccggcgctggctctgaggccaagtagctgtcttactatgtgtggaatttctttttcacaccatcatgggctgtattttcaagttgattcataataaacaaaattacaaaaasaaaagttctagccttgtagccaacgtgtgggagaagctctgaaatctgtgcctccttgttctcacttggacaactccctaccttgtgagcagactctagggagcagtaaggttttccttttctctttcagggttttttttttttagacagggtctcactatggtgcccaggttggaatgcagaggctattcataggtgttatcatagcacactatagcgtctaactcctggcttcaagagagcctctcatctcagcctcctgggtagctgggacgatgggcgcaccactgcacctggctttatttttcttttaagaaggtattgtgtgatgctcagactgacagtgtgactgatgctctatagaagtaataggctatcatccttgtcagtgactgaggggcctccaatcagcatgtctcctcagggccacctgcttccttttcctatccagaagagagagaacaatgctgcgtgtgtgtgtgtgtgtgtgtgtgtgtgtgtgtgtgtgtgtgtgcgcgcgcgcgcgcatgtgtgtgaaggagagagggggcggggagagggagagagggggagagagagagagagagagagagagagagagagagagagagagagagaagagatagggtctggctgtctggctttgttgcccaggctggagtgcaacggtgtgattgtggctcactgtagccttgacctcccaggctcaatcgatcctcctactcagaatcccaagtaggtgggactacaggcatggaccaccatgcctggctaatttttaatttttttgtagagatgggatctctctatgttgaccaggctggtcttgaattcctgggtccaagccatcctcccccttcagcctcccaaagtgctgggattataggtgtgagccaccgtgcctagctcactgttgcttttgttgttgttgttgttgagatgtttctctttttaatttttttcttaatttttaatttttgtgggtacataggtgtataaatttggaggtacatgagatgttttaataaggcatgtaatggttaataatcacctcatcgaaaatggggcatccatcccctaaagcatttatcctttgtgttacaaataatccaattatactctttcagttattttaaactgtacaattaagttattattgactacagtcactctgttgtgctatcaaacactaggtcttattcatttttctttttttttggtacccattaaccgtcccacctccccaccccttccagactctggtaactatccttctactcactatctccatgaattcaattgttttgtttaaatctttttccttttttttttttttgagatgtagtcttactttgtcacccaggctggagtacagtggcacgatcttggctcactgcaacctccgcctctcatgatcaagcaattctcgtgcctcagtctcctgagtagctgggaccacaggtgtgcaccaccatgccggctaatttttttattttttatttttagtagagatggagttttcctatgttggccaggctggtcttgaactcctgacctcaggtgatcctcctgcctcagcctcccaaagtgctgggattacaggcatgagcctccgcaccagccaatctcacaatctcattctttttaatggctgaataatattccattctgcatatgtaccatattttcttttcttttttttttttttgagatggagtctcgctctgttgcccaggctggagcacagtggcgtgatctcggctcactgcaagttccgccttctgggttcacgccattctcctgcctcagcctcctgagtagctgggactacaggcgcttgccaccacgcccggctaattttttgtatttttagtagagatggggtttcaccgtgttagccaggatggtctccatctcctgacctcatgatccgcccgcctcggcctcccaaagtgctgggattacaggcgtgagccaccgcacccggcccatatgtaccatattttctttatccattcacctgttgatggacacttaggttgcttccaaatcttggctattgtgaatggcactgcagcaaacatggaagtgcagatatctttttgatatactgatttcctttcctttgggtacatacccagcagtgggattgctggatcatgtggtagctgtatttttagttttctgaggaacctccgaactgttatccacagtagttataccactgttgctttttgagggtcccatcaaacttcagggcaatttgccaactgtatgtggaggttttcttgggaaggatctggagcttttgcactgcggtgaggggtgatgcagacttgagaatcctgtggcatggctggtcctggaggattagcagaatcccccttttgagggttgttggcttttcttcctgatctgtttcttctggttcctctgctctcacatctccctgtgttgacctgagctattgcatgtagccaagtggcctgcagcaatctgctggtgggcaggtcttgctggatgcagtgttggcccactctccatgcccaacctgacatcaggtctcaggcttctgccagctctccaagaggaccttactgtggtaaatccaagttatcacagtctttactcgtctgttgagtctgtgggcctgaaccccctcagggtactggagaacctccctttcttttttttttttgagacagaattttgctctgtcacccaggctagagtgtggtggcgtgatctcagctcactgaacctctgcctcccaggttcaagtgatcctcctgcctcagcctcctgagtagctgggattacaggcacctgccatcacgtccagctaatttttgtatttttagtagggacagggtttcaccattttggccaggctggtctcgaacctctgacctcaagtgatccaccttctttggcctcccaaagtgctggattacaggcatgagccactgcgcctagctaggaggacctccccttctgaaccagttatggtatcccagggccaggaagaagctgaaagccttctgtgggaacaaaacaaagcaaaacaaaaacgcttcatggggcttccaccaaagttagtgttttaaggcacgcctcaggaacagcaacttggaagcaggttgttccaggaagtggttgtaggcagatttttcctgagttcttcccctgctctgagggctcattaaatcttcctctgagaagctccacttttatcttcattttacagatgggacaaccaaagctaaagagaggctaaggctcaaaagtcagagttagctagttggggcatttgggtgtgggcccaggccacgtaacttcatctgttgttctaagcctgaagccaagcccagagttaggtgttctgtatggggagcaaggtgtgaccatcttcctgggaccattagtctgcttgggaggccggtcatgacagtccagggcaaaagatgctgtcacaggatctcaagacaagatgctctagggaagagaaaagggagtgcccgctgtgtgtcaggacttgtgctaggctctaaacctcaggcaggaaagcatgggcaatgagccagaggctgctgtggcagcacagactgcggtacctcgaggctagtaagggacaaagcgtgggaagctgggatagaggctcctcacactctgaaaccagcaggaggaggtgcgagacccagcacctccatttctagaggtggcgtgaccttggctcggcctcccctctctgagcctcagtttcctctccagagtgaactgggggctgcaccccccttctcccagagtgggggacaaaaaaacgaatagcacaccgctgagattccctgtgtgtgcgcaagtgtatgacaagacgccgccggtaccgcacgagggccagggacgcagagaggccaagggcgctccggcctcgtagtagccagcgaaaactccgccgccagccactccgggaacgaagcgcatgcgccaacccatgccgtcacagtcacgtgccccacgctttcggcagaggccctgagaggcagactctgactgacacgtgagctgacctgtcagcaggaagcacttcccctggcgacgagcaaaaagactgttgattggggatagcaccccctcgggggcgggttctttgcagtcctggttactatgacgcccggcccccgccccctcggctagccgccatcttgttgttgatccgtacccagtgggcagcgccgggagctggaccaagcggccggtgagaggccgctgtagcggtgctcagccacctgtgctgcctgccagggggcgggccgaaacctggaggcccggggggcccagctcccgtaggagccgtgggcgctcggtgcccgggccgggcaggtgagtgacaggagccgggccgatannnnnnnnnnnnnnnnnnnnnnnnnnnnnnnnnnnnnnnnnnnnnnnnnnnnnnnnnnnnnnnnnnnnnnnnnnnnnnnnnnnnnnnnnnnnnnnnnnnnnnnnnnnnnnnnnnnnnnnnnnnnnnnnnnnnnnnnnnnnnnnnnnnnnnnnnnnnnnnnnnnnnnnnnnnnnnnnnnnnnnnnnnnnnnnagcctcccagatgctggcaccgaagccggggggacagccggtgtggaggacggagagcgccagtgcctgagggttggccggctagtagcgggaaaccagcttctctgaccgaagctctggactccgctgatccggagcgctaaagtgtgtccggtgccaccctgatgctctcctgggagttatgttgctcctggctgagaaatagacttacctctttcttagatagcgttcctgcgagtgattttcaggacgctggatgctaagactagacgaagcaagccaaagcccccgcgagccaggcaggccggtgtcacggccctatgattatggcaagggggaccctctgcctggctgctgcttcctgagacccgttcggaacctcacgtgtacctcgaagctcaccgttttcctcgcaaagaacctggttaaatgtccataatggctgagttttattttggaacataatttctttggttcttcaccaccactttttggagagtggtaatgtcttcctctttttgctttaggagaaagtgagtattatggtgatgacttgattttatctcctaaagggatgctcgccataggagacaaaggaaacgtaggagtgtgttagaatcggaaaaagaaacttgtttttgttgtggatgatatggaactggcaaattaactgttttttttcttttttttcttttgagacagagtctctcgctctgttgcccaggccggagtgcagtggcgcgatctcggctcaccacagcctccacctcccgggttcaagcgattatcctgcctcagcctcccgagtaggtaggactacagacacgcgccaccatgcccggctaatttttgtatttttaatagagacggggtttcaccatgttggccaggctggtctcgaactcctgacctcgtgatccacccccccttggcctcccaaagtgctggggttacaagtgtgagccactatgcccggcgcaaattaacttttaacagtactaaaattatcttgctcagtgaaaacaccttcaagcccctttcctgtgaatttgggcaagttggagatcctcagtagagtgtgcaggtctaggaagagttctcattgctccaaaacacatttctcttgacctgtggcctctttggttctttgtacagtcttcttgtatgtggtcatagaatatgcctgcatgagatgactaagaagtcaagcgacaatactttgtgcactttttgttttgttttgttttgttttgtttttttgagatggagtcttgctccgttgccaggctggagtacagtggtgccatctcggctcactgcaacctctgactccctggttcaagcaattttcctgcctcagcctcccgagtagctgggactacaggcacgtgccaccacacctggc

SEQ ID NO: 96589 - DNA, 13840 bp, Homo sapiens
  misc_feature (1)...(13840): n = A,T,C or G
ctacacccaatttattttccttccttccttctttcctttctttccttctctctccttccttcctttctttctttccttctcgctctctccttccttcctttctctctttctttccttctctcttcctccctccctcccttccttccttctttcttttttttgagacagagtctctctctgtcgcccaggctggagtgcagtggtgcgatctcagctcactgcaacctccacttactgggttcaagtgattctccggcctcaacctcctgaatagctgggattacatgcctgtgccaccacacccggctaatttccttccctcccttccctttccttctttccttccttccttccttcctgtttctgacaaagtttcactcttgttgcccaggctggagtgcaatggctcagtcttggctcactgcagcctccacctcctgggttcaagtgattcttcagtctcagcctcccgaatagctgagattacaggtgcccgccaccacgcctggctaattttggtatttgtagtagagatagggtttcgccatgttggccaggctggtcacgaactcctgacctccagtgatccacccgcctcggcctcccaaaatgcgggattacaggtgtgagccactgtgcccagcctgacacccagttttctcatgcttcaccactgacccttatcccagcctgggctccctgacttctagcccaagccctggccgcagtcctcaatcctttttgctttcaagccagttactgtttttaaatactttttttttttttttttttttgagacagagtcttgttctgtcacccagcctggagcagtggcacaatcttggctcactgcaacctccacctcctgggttcaagcgatgctcctgcctcagcttcccaagtagctgggattacaggcacacgccaccacacctggctaatttttgtatttttagtaaagacagagtctcaccatgatggccaggctagtctcgaactccctgaggccacctgcctcagccccctcaaagtgctgggattacaggtgtgagccaccgtgcctggccattannnnnnnnnnnnnnnnnnnnnnnnnnnnnnnnnnnnnnnnnnnnnnnnnnnnnnnnnnnnnnnnnnnnnnnnnnnnnnnnnnnnnnnnnnnnnnnnnnnnnnnnnnnnnnnnnnnnnnnnnnnnnnnnnnnnnnnnnnnnnnnnnnnnnnnnnnnnnnnnnnnnnnnnnnnnnnnnnnnnnnnnnnnnnnnnnnnnnnnnnnnnnnnnnnnnnnnnnnnnnnnnnnnnnnnnnnnnnnnnnnnnnnnnnnnnnnnnnnnnnnnnnnnnnnnnnnnnnnnnnnnnnnnnnnnnnnnnnnnnnnnnnnnnnnnnnnnnnnnnnnnnnnnnnnnnnnnnnnnnnnnnnnnnnnnnnnnnnnnnnnnnnnnnnnnnnnnnnnnnnnnnnnnatcatgtagaggctcatctatgcctctgctgcaaggttcctcttcaggctgtgcctggccaggtgggggttaatttattctctccatccccccacccccatcctgtcacccaccgtcccatgttctgggcttacctgcgctccgtggagttctaggcctgggaggagcagagtgtacagccgagccccaggtgtgactgtctctggcacctgaatcatttccccagctggccagagtggaggtcagggaggatctgctcaggccatgcctgcccccaccctgccggctgcccctggcctcacctgggctggcaaattgaccagcacactggatatggctaaggtcccgctgcacatccacagagagtgagccctccatcacatggttgccacatgtgaacttcagctgcaccttgtagtggttcaccatcagggcatccaactgagcagagctgctcaaggtcaactggggtgggtggacagtgccatgtggggcttggaaattttaggtctgcccttgtgcccccacagtccccagctgtacacatgaccctaccttgcccacataggtcccttgccacctagccaagctgggtgggttgaagaaggtggtgggtggctggacattgagcaactccagggtgggtgtgggcgtgtaggaggagcagttgaaggataaaaactgaaggactgtgccagggccctggctctcagagacatttataaagcagggcaggctgcagaggtctgtgaagagcagagaattcaggctggaggcccccaggctgatggaaccacacatactagcatagtcctgtccttttgccacagggcctggccatgccatggggccaagcagctaaggcctttccttgtatccagcatccagcatttcacagatggggagtgagaacttgactgaggaagtggccaagagaaggggtgagggccaggggttcagattcttacactttcctacctctcccccaatccctgtcctccatggtagcttatctgggaagggtcaggactccaagggaaaactacggttcccccacccaccacctcctcaccagagaccaccggagcaaagaggaacacgaggagcctgagcagcaccatgatgacctgaagacacagacagcagaggaggcttcagaaagctaggctgtttgtctgactcaccctgttgccaggtcagttgctcaaacatagctgggcaggcgggactcctgggcctcccagattctatccccacccatccctggtgactgagttctagacctctggcaggcttccagaggctcagaatatcccattttccattgcccccattcattacaactctaagggcatggaaggggaggaggattaaggttcagatgaggaaactggtcatgcaatccgtggagatagagcaagcacagcacccaggaaaatttggcccaggacctgctaccccacagagtctcaactccagctggaccccctccattagaacattatctgcctataaaaaatgagcccaaccgtcaacaaaatctctcaaaacttgctgggtgtggcggcttacatctgtaatcccagcactttgggaggctgaggtgggaggatcacttgagctcaggagttcaatatcagcctgggcaacaaagtgagaccccatctctacaaaaaattagttgggtgtggtgatccaggcctgtagtcccagctactctggaggctgaggtaggaggattgcttgaaccccaagagatcgaggctgcagtgagtcatgattgtgccactgtactccaacctgagtgacagagcaagaccctgtctcaaaaaaaaagaaaaaagaaaaaaaaagttgtctacatccaacaagcaaaaggaatcctttatgatagaaatacaaatactggttaccgttgggaatatcaattggatagggcaccaggtggcatccaggagttgctgaggatgttctatatctgggtggcagctgcacaagtgtctacagattttaacatttactgggctgtaactttgagatctgtctatttattgtatttatatgtcagtttttttaagttttctggccaggcacggtggcttatgcctgtatgggaggctgaggcaggaggatcgtttgagatcaggagttcgagaccagcctggacaacatggtgaaaccctgtctctacaaaaaaaaaaaaaaaaaaaattagctgagtgtggtggcacatgcctgtagtcccagttacttgagaggctgagataggagggtcacttgagccccagagatggaggctgcagtgagccaagatcatgccactgcactccagcctgggtgacagagtgaggccctgtctcaaaaaaaaaaacaaaaacggttgtctttatttgccatctccagttcttcagtcctcactctcttctccacacactctaatcaggcttgtccctctctacacaaaactgcccttgtcagggttcccagtgacctatgcactgccgaatccagtggtttgttcttcaccctcactgcctaggcagcattcaatgcttgctccccttgggtcctgagtccccacattctcagatttctcctggctgttcctgctcagcttctttgatagctctgcttcatatctcccctacctccacctcatggaatgtcccagggcacagtcccgattgctgtctccctctgactacactgatttcctcccaccccaccttatccaggcctatggccttacataccatccattcactcactatgcctcccagatccaaggctccagtgctgatctctctcctgaagtccagagtcatacacctagcagctgactctgcaactcctcttggatgtctaacaggcatctcaagggttacgtgtccataaatgatcattggattttcctctccaaacccactcttctccagtctttcccagatcagtttatggcaatttcatccaaccagctgttaatgccagaaatgtaggagtcatgcttgatgcctcttttcctgcccacatccatgcatcagcaagaacttgattttagttccaaaacataccccaaagtgacccccttcagtgcacctgccctgcccaggcctaggccctccccttcgttgcctggatgagggcagggacttccactcttattgcagaatccttttctgaaagcagctgggattatctaaacaagggctagcccaggtcattcctgctcaaaggcccccattgctcctcatcacaccaagaacaaaacccacattctgctctaaggccgttagagcctggttttgctgaccttttccctcctgccaccaccaccaatcacagacacctgggccttctttatgtttggccctgtccagctcctgtccgtcggggtctcttccctggctgctccttctgcctagaatgttcttcttctccttcttctccttctccttcttctccttctcctcctcctgcttcttcttcctttcttttttttttgagacggagtctcactctgtcgcccaggctggagtgcagtggcgcgatctccgctcactgcaagctccgcctcccgggttcacgccattctcctgcctcagcctcaggagtagctgggactacaggcgcccgccaccacgcccggctaattttttttgtatttttagtagagacggggtttcaccatgttagccaggatggtctcgatctcctgacctcgtgatccgcccgcctcggcctcccaaactgctgggattacaggcgtgagccaccgcgcccggccagaatgcccctcttcttgattgcatcttgatgtcacctcctgtgagactgactttccccaagctagcccacggccctcattccctggtattttcctgttgctggtatgtccagtctgtctgcagctacactacccttgagcctagcctgtgttgatagagcagcctcagcaccgaccctcagtctgcacctggtaccggcaaagggaatgccgacggtcgcgcgtcgccgctggactcgcgactagccaagcactccccactagagggcagtcccgtctagctcggttgggacgcggctgaggccccgccggtgcgctgccacaaagtcccgccctctcttgagtcctcagacgggctgaaccccacttccatcccgttcagggagtgccaaggccagcctcacgaatgggtcccgtgggtcaggccccgagggtccacaacctctctgggtccgaccatccggggtgctctgcctatgtgcggacgcagcacggcgccccgtgagagggaccgctatttcaccattgaacaaacggggaggatgaggcccccgcacggaggcgacctgtcctgcgtcacgcagcaaacgcagggtccactcaacagtctgggggctcggggggtccccgtaccggccccgtccggcttccagttatgaccccgcccttcccacccagaaccgcggcggagtcgggagggacgccgggctttagccccgccccctttggccgcggggccggggcggggcgcggctgccagatgtcggggcggcggcggcgggagctacggagagcgaggagtcgcgcaggcaggcggaggctgagggcgccgctggccggccctcccagccctctccgcgcggctccgccggggttccaagaggagctagtaggttcggtgggggccctggcatggacatgcacagcgctcggcttgacagcttccttagccagctccgctgggaactggtgaggctcgggagcgggtgtggttagtgaggacgccgtgcgggatgccaggctgccgcccggccggaacaacagacgggtgcggggtggnnnnnnnnnnnnnnnnnnnngccggaacaacagacgggtgcggggtggctccagcgtgccggtccgaggcggggtgggggcggcgtggcgcatatggctcagatggcccgcgtcgggtttcggacggttgggaactgagctgagcatcagataacagcatccagctggccgtgctgctggaacggcgcgggaggagagagtggaagggggacttctttgggggcggggcatggggcggcaagggactaacgaggtgctggcgctgctgtgaacgccccctacttcaggctggcctatgcctcccttctctacccctcacctagcaagcgctctttctgtgaaagacgctttgggctttgggagctgaatcccccaataggcacgggatgcccctccagtcctgggcaggacctacttccccgttcaggcccgcaaccctgcctgcctgcccgcccgccctggtggcgggtgccgacttgcccggccctgcatgctgcagcctgccagactgccaccaggtcggtggatgagaaccacaccagcttcgagtgccagcacccctatgcctgccctgtgctcactaacaccctgctgcccaggccagcaggcctatctaaccttcctggaccctctgttctctgggctggcctggtgacaagtgatacctctccgacttctgccctctcttcccctcagttgtgtggtcgggacacaggctcaccctcaatgcctggtcccctgcagccaacctcccaaactggcccagatgtgcagcccagccaccagcttagggcctcgggtgccttggaagaggactcagtctgctgtgtggaggaggaggaagaggaggaggaggaagcagtggtgacagaagacagggatgcagccttgggaggccccagggagcatgccctggactgggactctggcttctcggaggtgtcaggcagcacatggcgagaggaagaactgcctgtatcccagcgcccagcaccctcagcacagccccttcgtaggcagtgcctctcagtcagtggcctccccrtgcccagcagggcccctgtagccagtgtaccacctgtccaccatccacggcccaagtccaccccagacgcctgcctggagcactggcagggactggaagcagaggactggacagcagccctactgaacaggggtcgcagtcgccagcccctggtactaggggacaattgctttgctgacttggtgcacaactggatggagctgcctgagacagggagtgaagggggtgacggaggtgggcaccgtgcccgtgctcggccccctcagttcctgcttggcctctctgagcagcttcggcgccggctggccagggctcggcggacagctatggcaggaaagcggctgtcatgcccacctcgcccakaacctgaactgcctgcggatgtctcacgctttgcagctctcatgagctgtcgtagccgccagcccatcatctgcaatgatgtcagctacctctgaccctgccctccagcctgggacaataaaagccttttttctagactgtcctggctccatacccctgaggcactaagaggcagccccagccctgtgaggcactgcccagggagacaaatcttctgaagagctttttttctctgtgtgaaggtccctgtcatgcccatgtcacacccgtgtgcattagtgcactgttttctatcgtccgtcctctctgcaatgccttcctttaacaagcatttattgagtgcctactgtgggcttacaatgcagggcttgggatccggggctccattgagctaggtgacagggtggctgccttgtcacagctcatagtgcagaggtgggaaggcagtgtcctcgtcgtcaccctcacagctcagctctagcaccaacacccgctgcccaggagcaggtgcctggcctgtcagctgctgaaccagttctgtcaccctggtaggggtgggtttaggggagattggagaggtgagccatggcaagcagaaggcagcctggcatggactagagagggtgctggcaggccgtcaggagcccaagccaggagcaggagctgctcaagacaggaaacatctgaaactattttaggagcagctgatgaggcaagcaggaggcaggaagctatgggtcccttgggagtgggctgtgaaaggggggctgtgcagcatgtggggagcccatggggctggccaaataggcagctccctgaagactcctcctcagctctcggccctcaccccacctccagcctgtttgctggctccatttggggaaagaatgcttgggaaggtgtgaggggcccagaatggggctgggaagacaaaaggcagtgtggtccctagccccagcctccagggactggtggggcctgtctaaagcccaagtgggctcacctgaggggcaggtgctgggcctgcttttcaggtgaccatccggccgcatagagcagggctgagccgtgcagcaggatcctcaccctcaacccgtgctgctcctgaagatgagccagcagcgactccagggtcctctcaggctgcccagctggtaccttcagacggtcccaagaggtccacttcaggtgatggaactgggatgaggtagaggaggagtcagagacttcttacctccccccaacccccatcccagttaccagcagcctttcctaggggaagagctggactagcaggaaacaggagccagggggtggggggtgggggggaggtgggatctgggcccagagtctcagccccctccccgtccaggccggggccagcacaggaaatggggctatggggcccgcacagggaaacagacgatccatcacatgggccagttgtgagagtgggggatgcggcggtggtgcttcctgaggaaacccagagcagggcccctgcagcctctgataaagctgcttgttcctcaaagacaaggctgggagctggggggcacatcctgtcccccaatcttgtatgtactgccagtgccttgggctactcattgggacacaggggcaaagggcacagtgaccaccagggccccactgtcccagagaccccagcagggatacaatgcatagaggcttcctcctcctgtcccttccttccttccaagagtcttggggttctgggacctagagctaaggacagaaggatggctggcaggtatctagagaccaggacagggggtgcttatcagcccctgagaaaacacactggggtcaagctgagactaggctagaggtgagatgggggcttctccttcacctgcttcactctgtggacaaaggcagcctgtatgctggttagaggcagggtgcctcacaaaggggctctgtgtgctagttccagagggaccccaggctgctcagcagaaacccagtgctggcccatgacctctgccctctcccctcatgagggcattccttctaccctcatccttgccccaaggaaatgccaactgcagagcctgggcacaaggctggaggcattcacagcgctgcagtcacaggaacacaaatgcccacaagcccaggaacacacacatgtgtgcccacatgcatctccatgcatgcccacattgaggacacaggaagatgggagccctgcactcccatctgatgcacagatgtgcaaacttgctccttccatacccacactccggggatgcccagaccccagttgcactcacaactgtgacacaaatacactcagggctgcagaccccacacctctagtggcaagcctattaccttttaactcagcttgtaggaggtaggccagggcccccgtaccatgcagggggaagctagactctttctggggctgatgccctggtcccctccccactacctacccctcaggggtactccaaggaaggaggggactgtgggggatgtctggctccactaatgagttaaagctgcagctcccccagatcctgggctttggaggattgggggtggggatggctgacggctgcttcctgtgtctgacaggtcccagcctggcttcatagcaggaagagggctggagggagtcttcaggacttctgcacagtctgagtttcagtgagagccggcagctagattggggcctgtatgggcaggtgcaggggaaacccaggcctagtagggctaagggtggggtatcatgggctcaccgtctggatggctggggcaaaaggcatatagcggatgaggtagttttcagccagatgtaggtagctgtggcgaaaggcactacgaggccgtggcccactcaccaccttatacagctccaggcccaacaggcctgccacagctgctgtagtggtggcaatggctgggataatctggcccacaattcgcttgctctgccaaggacaagagatttggtctgggcccaaggcgtagggccagggtttgccctccacctccaggcccaagcctcaaggggtggggttacctgggcacggttgaccggtggaatcccgtagttctgacatctcaggctagctgccgctaccacaaagtccacatggaagttgctgtcatcatcctgtaaggcccaagtcaaagtagtgttaacactgcagctgtggaattcaggccaaggggctccaaaactaccttattagctcctgacctttctccacaaactccccagccccactcctcactgccacttgggcacccaccttctcaaacatcagaggcttcaggggagggcccacactccagacttccagggctttgttcagttccttctgctgctcagggcctgtcaggggaggggatgttgaggcagtccttagcccctgtctcctgcactcttcttggagccctgtgcctattcttggtctttgccaagcctgtcacttactattccctgatcaaatcaagaagcccccttaattaatgctacaatctcccctctagaagccccagtcttcacccatgtgtgctcatgacctctgtgaccctgtcctcacctgcaggccatagctagacactccccaggaaccaatggactttatttatttacttatttattttgccaagaatctgccacaagaactgggatgtggggtaggcagcagggagaagacctactgagggaccagaggataagcctgaaactatggaggagtgaggttaggaggcctgagaggtagcaaattggctgtagatcccctaggccctatcttccttctgcagcacaggctgaggacaggacaggttcaggcctttgaaagacagcatgaggggccagggccaggagcctcaccaaactcagcagaagccgaagccagctctagattactagcaaagatgggggccatctgttgggggtcaggctgtggcagcagcttcagcagctccctgagtgcagtccagtcctgtgagccaggcagcccatgcatctgggcatacaggttggcagctgccagtacgtagaggaggtgtgtgtcctgcagccagaccaagagcaggaacagaggcatgggtgcatggggtgggggtcactgtccatttgtggatctgtttgagtgcctgcctttgcctcacatgtagacacccatatatgcacaagcatggctctctctgggcatctgtgcatctctgcagaatgcagaaatgcctacctctgctctgaggggccacatctctatcttggagctccctacagaatcccactcacttggttggtgtcaaactccaagggctggggacactgtttgggacctgaccagaagggagttccatcctcaagcacctaggtaggtaagtagaagctgctgggctcagtctggtccccctgagcccccagcgtcccaacccctagccacacactttattaggtgggaagtgcctcagcagctgtttgatgccataatgaaagcagagtttccagtggccaagagcccacgccacacagtcttgccagttctgtggacgcactctcaggaccccaagcactggcttcagtaaggtgagtgtctgtggctcatccatgtctgccagggaagtgtgtgccctgcagagagaggaggaagtgtgagactgagtcctgcagactcatgcttggagccctggactcccatctgcctctgttggtggccttactgttggtggtggttgatggtctctgcagacagtcggaagagttcttcaaactcatgccgggcccactgtggaggagggaggaagaatgaggtatcaggtggagaacaggtctgcagctgagggctgagctgggtggggtgggagtctccagggtgcttcctacctgcagggtgtgctcggctgtgctagggaagtaccgcacggtacagacagggtagggggcatcctcagaagctgcagctgaggcaggggctctgtaggcctcagtcacatgtggcatgaatactgtagcactgccccaggtgcccgatgtgcctgcctccagcagtggcttcagatagtgggtgcaacgagcagccacatagcgccctggcaggggagcagtgggtcagaagtgggactggcacagctgtgggcaagggactgacctccgaagtcaagcactcacgggcctggaaactgtccagggcagcagccacaccatccacacgggagaaaaagttatccccatagatgtgctctgtggtgggatccagtgggtaggtgagcgggatcacctgtaagtctgggttcaggccccgggcagctgctgcagccacctctgccttgggtctctgggaagaaggcaggaagatgttgggtgggaagctgtatgggaggacggtctgggatgcaggagtgtggagaggggtcagcactcacaccaacgtcctgggacctgaagaggaactgacggctgagattggagcgctctatgtggtccatgtcaacaacagtcaagcccccgctgttcccggcccccagtcccactagggcaaagactttgagcagctcacaaccaatggcaccagcgcccacctgttggcaggaacagccttagccagaggggctgggctggctctcccaaaggcacccccagtctcaccccacagctcaccaggaggtagtgctggcgtctcagtttctcctgaaaaccagccccaaacactgcaatttgcccatcatagcggctgcctctctaggggacagagacggggtcagtgatggctactggcctgcatctccttcttatactgagttttctgaatcaggacctggagggcattcctcatgcttctcccctagtcctgattttggacaaggcttgcacccctatcccaggctctcaccagggcacagtcctcaggactgggaaggagctccccatcttccggaagacaatcgagggcatcaaagtaaagccactggtccagaggcatgaacttcctggagattgcctaggggcagcacttcaggctgggcactcctgccacctcctgacccccctcagatcctggctggaggcttcacccaggttggtgaaggctccagggctgctctctagcgctgggtgccctctgacacacacactgatctcc

SEQ ID NO: 96590 - DNA, 12951 bp, Homo sapiens
gccaaatggcggcccactgtcatccaagaagaagatttgtttcatgtaaaaagagatgtactgcccataatatacttcgtcaaaactagaaaaaaaaacaacaacccatattatattcaattagaatcttaactgtaaacaaaaactgtgaggataaatgtgtatgtgtttccaaatgactttgagtgagtgatcagcaaaggctggatcttttgccccaattgtttcccatccccaaatattaagatgcatacagcatcacccacccacagagacatggggaattcaccaagcacagctggcactcagcatgcctgcccatacagattctgtctctcccttgtgtttgatttaggtggatactatgagccaacctgctgaaagacctcctgggacgcaaggctaatcctgcttacccacctacccaacccccccacccccgcccccaccagcagcacatgtctgtggctagcgatgacccaatgaaacggctgcaagtatgaaaggaaaacgtgggaatcaactgcaataacatgttttcaatcagggagaggtgaagataaccaagaaactgctgtcaatttctcaggcatgataatgcaactgtggttatgtgatttttgtttttaagaatcctcagccaggcacggtggctcacgcctgtaatcccagcactttgggaggccaaggtaggtggatcacaaggtcaggagttcgagatcagcttggccaacatggtgaaaccccttctctactaaaaatacaaaaatgagccaggcgtggtggcaggtgcctgtaatcccaggtactcgggaggctgaagtaggagaatcacgatcgcaccattgcaccacagcctgggcgacagagtaaaactatgtctccaaaaaaaaaaaaaaaaaaatcctcatcttttacagatataccgctgaattatctatgaatactaggatttgctgcaaagtaaaaaccactgcagggaggggcctggctgtgaactgataaggtgaagctgggtaatgaaaatactggtgtgtgtggggggggtcattcattatacttgtctccctgcttttgtatatgtttgacgttttccataataaaaagttaaaaaagaacatgcagcagggcggagtggctcacgcctgtaatcctaacactttgggagacccaggtgggtggatcatgaggtcaggagttcaataccagcctggccaagatggtgaaatcccgtctctactaaaaatacaaaaattagctgggtgtggtggcgggcacctgtaatctcagctactcgggaggctgaggcagagaattgcttgaacccaggaggcagaggttgcagtgagccgagatggcaccactgcactccaacctgggcgacacagcaagactccgtctcaaaaacacacacacacacacacacacacacacacacacacacacacacacacatattaatcagttaataaagagcccttcaataataacagcaatcacttcccattatgacaaaaacacattctaaaaagtgctctcaacagtgaagacttacttccaaatccattaatcctctgccgtccagactttaaaactgttacttaaggctggcaaccagattttcctctactgcacccctttaatgggccaaatttcacctgttacagactcagaaggcaagacctaaaaggtgtactctgctggggctgtcctggggacagactggtctctcctctcactgccaaaaacacctatcaccaagaagccaggatttcactctcccatttatgctattcagtaagggcgcctcctgtcacaaagtacaattctagattcaccctgggaatggagtcatttagcttacaccacagcccgcgggtaggtgagtcgccacagccggctcagtaaccccatcccagtcagggccacaaggctcaagttgatgtcagccgtcaccactacagggcgcttcaaaaatccccacatcttgtagaaaagcgggctcaggcagacgccctagaaaagaagggaggagccgtggtccatgagggctcacgagaggctacagaagggatccccagccacccggctcccggacacacgaggagaaccacagcacagccgggctgctgagaaagaccgaagttcctggagccttggttcaggtagacatgtggggtgaggggcactagcagtgaactcgggtgggaattcaggggatctcaggactggacattcactcctttcaacaactcattccacaaaacctgccgagcacgtcttgggcgcgagaacactgctaaggaacgccagggtttctcccctccctccccgacgaccagaagcccacagtgcggccacagctacctgaccctgggcagctcctgggtgccatctcagctgcttacagcccagggaccccaacctggccgagcctcggggcctcctcatctctcctcaaggatgcatctgcccccagtgcctccctgccttctatcccagcggcacatcatccccgggtgctccctttctcgcctggagggtgcatttgcaccctgcgcccccacgttctcctccaggcttcatcttcccttgagctccgcttctcttgaggctgcatcaggcctgggacaccctgtctcacaccaaagccgcatctggccgttggcgccccgctggtctcctcaggccccatctaccctggacgcgcccttccctccctgagctgcatctgccttgagcgccttcgtcccaaaaggtcccatctgtcctgggagtgcctcctctccccttgcagaccgcatctccctggccggcccttcttccccacaggccgcacctgtcccgtccaccaactcccgaggctgcgtcggccccagctccgtcctcaccctgagactgcacccgcagcacgcccttcctccctagggctgcacgcgccacggagttcttacttcggggctcggccgcccgaacgccgcatctgcccgggcccgaaccccgcccccagctccggaaagacggggacgcccccggccccagcccgtccgcaagccagggacccgcgtccggcactgacggactcccccaagtccgggctgggctctcgtccccggtgtccccaaatgtacccgcgtttctccgagtccacacagagccgcgcccggctcccggcaacgcctcggaaccgtccgactgggccgacggttgggggtgaggccgctcggcactccgcaccacccaccgccctgctcaacgttcgattcaccgagcctgcggggccagacgggcagcagcgcgcgtgcgcactgggagagggtgacgcgcgtgcgcagcgggcgagggcgccggtcccggaggagaggcaggtgtgaaacgcggcgacctcccctctctcgggtgctactgttttgtgtgccaggatttctgtgtactctaagcagacgtgcagattttaaaaagcgcagtgggctcccacccatcttctgctccttgctttttcactccatctggcgtgaagatcttaattctgcgtctgcacaacggcgttctgccgggcgcgccagtttgctcctagtttttttcttttcttttcttttctttttttttgagacggagtttcgctcttgttgcccaggctggagtgcaatggcgcgatctcggctcaccgcaacctccgcttcccgggttcaagcgattctcctgcctcagcctcccgagtagctgagattgaaggcgcacgccaccacgcccggttaatttttgtatttgtagtagagacagggtttcaccatgttggccaggctggtctcgaactcctgacctgaagtgatccgcccacctcggcctcccaaagtgctgggattacaggcgtgagccactgcgtccgaccttaattttttttttaagacacggggtctcgctctgtcgcccaggctggagtacagtggcaggaccacggcttgctgcagcctcgacctctctgcccgaagcgatcctccctcctcggcctccagagcagctgagaccacaggcacgtgcccccacgcccgcgggcgctcctagtttccttgccgaaaaacatcgatgccacgatcctgcttgcacatacatctagcggtgaagtggctgagggtaagggcatttaaaacggacctagggccgggggcggtggctcacgcctgtaaccccagcactttgggtggccgaggtgggaggatccgtgagcccgcttgagtccaggagagcctgggcaacacagcgagaccccgtctctacaaaaaaatacaaaaattagcggggccccttggcgtctgcctgcagtcccagctacaagggaggctgaggcaggagatcacttggggcagagaggtcgaggctgcagtgagccttggtctcaccactgcactccagcctggactacaaagtgagaccgtctcaaaacaaaaaacaaaaccaaaaaaacctggacatcagtgggggctgcatgaccatcagaggctccagtgggggcatctcccctaaactccgtggcagaagactggaggcttcttcctccattcccagggctcctcctcatccatcagcctctccagccccctctgctgagggtcaagagccttcccaaaggcctgctttggagcagacatggtacttttggttgggtcaatgcaccccttcccatgttttccctgaacagtcggcacccagagcagggtaactgacagcaacgcaaccaggctgatggatcactcttctcagcctcgctccttcttgatctcctggtctatttgtatgttaatctatacagaccaaaagggcacactgcaggtttaataaccttcattatggttcttggctgcctgcaagactttttttccatgttgggcaacatagcattagatgacaccagttagaatttcgtggttacttctttatggcttacccttgaggggttatgtgactcacccaagatcccacagagaggcaaggagctggggctcacctgggtttgtggccagagcctgcaggcaactgtatttacagtgggcagggagggttccctgggccccaggagggagtggggctgggctgttaagctttggttcatgccatgctaacagtggtggtgcctcaggacttacagcctccatcttgcaagcccccaaccttaggactagcctctttcagggctggtctccgtttgagattttgtgagccacctgtccctagggagcagtaaatcagggcagtgagtgtggctagttaaagctgagatgcccatggccaggtccccaactctcttccatagtcaaaaggcttagaaggaagttgagggactggggttcctcatggaaacagcgttttatttcttgggggtaatttataagttttcttagctggttctaggcactaagctaaaagctactggtgactttgaatccacactacgccatgaggtcgataccattacaatctgtgttttatgattaaggagactgactcaggtggtgaaacgtctttccccaggtcagtgaggcaatggcaaaaccgagaactgctgcctcagcccattcttaccttttacccttcgctaccccaggcctggcttgctccctccccaccccaaagcacagcataatcctcctccacttcctgcaaaagcaccgctagaagtgacaacacaacacgccacatcaaatgcttacctcctctgaccagctcgtttctcacggcaagtgacggggccacaggcaggcactgtgcacaaccagatgccatccgtgggaagagagtggagtgcttgatgctgccgcatttggaagatgcttcttagccacgggtttcaatcccttctctacccacacagcttctgttaaggcatttcagccgtgccactcctaatttccgtgtgaactctgtaaaattagaattctttgatctgtaggtctctctggtcaaatgaccaagaaacgagggatgtacaacctgagaaagcacgttcagctttatctttttaaactttttttatttaaataaggagaattctttcatatggaaagagctagtacaatcacatatttgaaaggagaaacaataggtactgaaccggagggaaagggcgagggtgagtgtgccagcaccggcctggtgaatccacgattcgatttcccatccaaggtaagtttcccaaaataccgtataaacaagctgcacattacacctctagccatcgtctgccctttcaaatatctggtctacatggaaagacaaagaggaaaggccaaaacataaacaaaaggaaacaaaaacaaaacacaaccctctcaggaaccaaacaaaacccccaaatccttttttactacacaaggcatgaggtcaaaagcttgagtacagtgtcccctttagatcacgggagaaaggcgtccacacagagccttagcaggaatttccactctgaggcttcagaacatgctgaagatggggctctgagggtgccactaccatcctggaggccaccaagtggggtggaaacagtgaagagcaggtctcacatgcccgaagaccaccagccaactacacattggtggccctggtggagcatggctgggcgacagcgtccatccccaacactgagccactcctgtcctggatgacttcctgcttaggtccgtcacatttcagaagagagctggctttctggaagcctvcgtttcccattcatcacagaacacgacagagtgcacacatcctggtatccttggtcttcaaaggccatttccagcagaccctctaacccaggcttgttctgcaggaagtgaaaagggacaaatgaagatttgaggggcagcctgcagctacttggcacaggggaaccaaatggcaagggagaaggctccaccagagctgccatgctgccgtagcaggccagaccacagcatggctgtgcacctgtgtgtgctcagcttccagaagctgtcactgaccatcccgaaggcagatccagaagataggagggtgacagcacggctggagagcactgatgtcaacgtttaacaaggttccccagtgtccctagaagtggctggaaggaccacagctttggaactgaactgattttcttgaatgtgaaataaagtcatcttttgttttcccccttaaggaacctagagccagagtgtctatgaattccaagtttgaaaacaatatgaatgtttaaaaaaaaacaaaaaacgctgtggggagaagccaacagttaagaaaaccaaaccaaatgcagctggcattgaagtccccagtgggtagatgggcatctgagatgtatacccacactctggacttcatcccactctagtggatggtggacaataccgcaaggccactggtggctgagcaacgagccgcatccccagtgaccaaggcagagctgccagcgtcaggagggcaactttaacaggcaaaagtgagtgggttctgaccccccaatccctacctcagcagcaggaaagggaagtgctggtctccacctgttcccactaaggccccgtggtatcctggcagaagcctctgcatgtatctgcgctctgaggatgggggtttgaaaacaaaataagaccctacgtcctactaccttgagcttggctctaaaaccacgggaaaggaagagatatattgcaccttaaaacatctctgcactaagaactgcatttcattagaccaaggaggggttggggcgctgggaggcctgaggcctgccctcagccccccaagtctcatttaaaacctgcatctcagcgaagagactgcagctcaggtcacacacaggtggtgactgcaccgaacttcacatgcaatttcctggcctttcctgcacagaattaattcagacattatatataaatagagcagtgaaacatttacttctttttttttcacctagacctacaacatcaatacatataaataaattctagtgttttttgtttttttatttggggtgggggaggagaaaggaaggaaataccaggtaagagaaaagggctggagaacaggtgacctttttgtttttattttttctcaaacagcaagtactgtgggtctgataccaggttcacctgaagggtacatcttaacagcatccagaaggctttcttttgacaaatcacacgcaccaccgcatcaggtgggaggggtctggccatgcggctcaagtgtccaggtggagatgaatgtgtggctcccgcaggcctgaactcacccaggaatggcttggcaaggagggccggtggggacagagagggctcatcccaggccccacaagcagccgcttgcagtgggagaaggaaaagcagacaagaagctcaggtagggaatgcctggaactgtcgggtgggcagcccctggggaagggactcaagcataaaggcttgggataaagagggaaaagaccaggtgagggcaggaggggagctgctgaaagatgcaggtgaacagtaaagcacctttcagtaaaactgccctttcccaggcagctctggggtgggcgctgttggtaggaggccgttctcccgcttccttagaattgtgagagcagtaagaagttacttcagcagttcctaagatgctccttccccatgttctacactagacacagagcttagagcccaagcctgagcgctgtcctgcacccgtgagacgctgaaggcagcctctggtggggggtgcatccccggccccctcctctaggtgttctgagccagcctcctctggaggaggaggtagacgctcagtgacccctaagaacagctgagaaacctgaactgtccccttccctttccttggaatgacagaatctggagtgatttccttgtttcttacttaaaaacaagcccagcacacgatggctcacacaagcctctggctggagaagctgccctcccggaggctgcgcaggccctttggaccttggtcagccctccacccagcctcaccctggacctgcccccgccgtctgaagacaaacgagactgatgcctactgcttagctcaggccctcctgtcctgacaacctgggtctgctgctgggagtgaagcaaaggaggaaaaggacaaactcccagtggcctcacttggggaccacacacgggtccactccctccatcaccaagtggtgttcacgatgagctgtgtgggaggtggagacaggtccagagaaagcagcaggctccggaagaggaaggaaggaaaatgacaggttacagaaggcttcagggaaagaaatgtgtgaaaaacacagcacccctgcagggcagggtatggagccccagaagcagagcccacggggcctgggatgggcctgtagtatgtcagctcaccccatctgggccaacctgggagccaccagcagccatctccatgatttgtctctggtgcccagcacatccactggctttagaggagcccaggacagggaccctgtgtgattctcatgctaaaactgtcatcaacttcatgggctgcctgtaagcgccctgggctcatcaagccaggagctggaacccaactatgaccccccccctcccccaacctgcctgctgctctgagcaccccatcgcttcccaggcggggagccaggcaccagaatgctcgcaatcggtgccctcaagaacctccttttctttttgcaaataacctcaagggtgaaccagctgaggaatcaggaggggatgcattcttaagagtcacctcttaaggtactgcagtgacgtatcaaactaaacaggacagaggctagagatggaagggagcggaggggctggcaagaaacatataaaagttcagctatacacatggagcttgcgtttttgttttcttttcctttcccctttgtaaaaaccttggctacattttaaaacaaaaagcctcaaagtaaaatgaccctgctgccaaatcactgtgcctagggatgggcggctgggccggaagcactgctgagaaggcgccctggctgcgcggcaggacagggaggaggcagggagggcaaatctgcactgcacaggaggcgtcactccacagtcacggtaggagcagatgggatgaaggagtcgtctgcttttttgtttcgtatcaaagcaagcgggtcaatgccatatatccacgggtgcaagctggttgacaacggagctttcgggagtggagaggagggaggtctctcagtctgggccacgcatttggacggtggatctggtgaggctcccgagtgtcggctgtgtcgaggccgcatggcggcaccgtcctcagtagggagaggcgaggtggcagccaggcactgtcaggccttactctcctccactttgacagcccgaggcttgatcgctccggttcgcttcatctgggaggcagccgagggggcctcctgcagcttcacggctcccaggctgggtttctcatccactcgttgttttgcctttggacagatgaatgggaaaaacaaagtgaccctgacgctgaaacgtgtttggatacatagttcccaccactcccttcctgctcctgagttgcagggaaagctcccctaagttgtcagtcccttggttgaaggaccagacttagaaacccccctcctagtaaggaaagtggcgcgagtgccgtctctgctccctccccataagccctgagtgcagtgattcggagaggcaggaagacaccgggtcctccacaaagaattccgcgatggcacatcccagggcggaagcagttctggtcccaaggccaactggaagaaccttttcaaatcagtgcacctcctgccccacaggcaaaaaaggccccttcaagtagatccaagtgccccctgcacgtctcggagcccccgactgtctgctggggccctaggcagacttggcccccacagatctctggccgcgattcagccaacccccccaccattcccactctgtaacctttccctggggccccattcctagtcagggctcccctggtctgtggctctacacggggagtggggtggggaagtcacagagcagccagcgcatctgccccccaccaggtctgaactctggaagaaagctttagaagctcattccacacaactttcatgacccctaggggaaccaatgagagcaatcacttcccatctctaccagccaggcacagtgactgattaaaaacccacgtctgaggggcttaagctctgagccccagcacgttttagagaatagagaagagaatagtgcgtgcaggaaaagacactgcgatgtccttttcattataaaatgggaaaacttaatttcacctgtgctcccacccagccaagacaaagatgagacacaccactgactagaaccagcgcgcgcaccccggctcctaaagccgacccccaaacctaaccgagtctcccagggcgcctcagccccgacctgccagggctggtccaccttccagcaccacctcctcagaggaatcagcatcctcccttctctgcaggacaaggaaggatccagacgcccgtcaagaggagaaatgccttcgccaggagggacgcgggcggcccagctcccggttctgtgctctaaccgctagggcatggctgtctttagacagggggcgctcagataggttggacagtcccttctcttttggcgcttggagacgggcctaagtgtccagggctgaagggtctggaaagccatcttctacctgttgcacgtagtgtccctgcacagagcccatgttaactgctgatccagagggcttcccactggggctagcagagctaggcctgaaaaaaccaaaggcaggggttgagaatacacaacgtgtcaccacagaaatggagtcaaagcctagcacatggaggaggcacaaggaaggaagggcctgcggccagaggcgctcactcgggacggtccgtggatctcttggatggaaaacaaccacagacctaagacagcccagaacgcagaagggtgagggggtggctgtcactgaccaccctggcacctccaggacagagctcaaggagacgcaccgcaagagagggaggctgaggccctgtacagatgggcatggctgtcctgctgtgcagaaagcgacactggccgtctcagggtctggaccaacacgatgcagtgccccagacaaaaggcctagaagcctgacgctgagccagaactgtgccgagtattgttctagtcttcacttttcagaaaaggggatgggggaaccaaaatgtacaacatgcttctaaatgtgttccactgaccactagttagttcccagggatgttaattaggtgctacgtggaaaaaaaaaacgtctgcggtcaaaaagcctaagtgccgtgtgcagagttcaacaggactctcaacctaggcccgctcagcctgtgtggtgagtaccctccccagcaggccaccctggggacagcactcccccaaggacctgaccagggaacccttgtttttgcagcgcacatctcagcagctctatttccagaacactttggcaaacactgctttatacaattatagcaatttccccaacccccctaaaacaccatagaaacaaagctactagtttaaggcttccactttctaaatatgctccaaagaataatctgctgccattcattcctacaactacatagacacaggcgactcttgtcccgtgaggctctgtctctgggttttgctttttgaggaaggctctgtagccagaggctgctggaatctgcctgtggcagcagcgggacagcgtctgctgagacctgcagccgccttcctccttccagttccgctccatggtcggtgctgtccagctatctttttcacacagtcctgatgttttggtctatgtgacagacatggtaggaaaacgaaacgtactaaaaacagaaataaatgaagccaggagagtgaaaataagaacaga

SEQ ID NO: 96591 - DNA, 19082 bp, Homo sapiens
tcaacaaccgtagggatgcgtggttctgccagttagccagcgcaacatgttctccccgcttacattgcagatcatcagggtcatctgcaatggaaggcgtacccattatgttctttcagaaaagaagttctagtttatccgcccctctccctccctctcaagtcttcacaggtagctggaggcttctcttttgcctccttacctagctcattagagacaaaggcatcagtctgcacacgctcacagaacttgtatgtttcacagcaaaccagcactggtacattatgggctcgagccaccagggctaactgtgctgtccctacccgtgacatcacagacccgttggccaagagtgcatgagctcccaatagcaccttggaaacctgtttcacaggagaagaggaagaaaaaaatgtcattgttgtatcaatgcaaaataaggtcccctacttacaggacagcaacattaagacaagtaataaatctcaacacctgtgaaaagaagggaaagaaacaaaaacagacaacaagtaataaatcttttttttttttttctttgagatgaagttctgctcttgttgcccaggctggagtgcaatggcgcgatctcggctcaccacaacctctgcctcctgggttcaagtgattctcctgcctcagcctcccgagtagctgggattacaggcatgcaccaccactcccagctgatttgttgtatttttatatttttagtagagacggggtttctccacgttggtcaggctggtctcgaactcccaacctcaggtgatctgcccgcctcagccacccaaagtgccaggataacaggcgtgagccactgagtccggcaattaataaatcctttttttttttttttttgagatggagtctcgctctgtcgcccaggctggagtgcagtggcatgatctcggctcactgcaagctctgcctcctgggttcacgccattctcctgactcagcctccagattagctgggactacaggcgcccaccaccacgcccggctaattttttgtatttttagtagagacggggtttcactgtgttagccaggatgattgtgaactcctgacctcgtgaactgccctcctcggcctcccaaagtgctggaattacaggcttgagccactgtgcccggcctaataaatcttaatgatggcttttcttctgtgaaaacacctgaccactgacccaccaaatctcccacaggaaaagtaaactttgaagttacttttgtcttgttccctcttcctggttgctagtttaatgtaatgtttttgcaatagctagactgctgtaatatactgtcagtgtttttccaattaaatagaaacagagctatataattattttttttgacacagggtttcattctgtcacccaggctggagtgcagtggtgcaatgacagctcactgtagcctcaacctcctgggctcaagcagtcctctcacctcagcctcctaagtagctggaactacatgcgcatgccaccatgcccgggtgtgtgtgtgtgtgtgtgtgttcaagcagtcctctcacctcagcctcctaagtagctgtgtgtgtgtgtgtgtgtgtgcgtgcgcgcgcatcaaggtcagtcctctcacctcagcctaagtagctggaactacatgcgcatgccaccatgcccggggtgggggtggggtggggtgtgtgtgtgtgtgtgtgtgtgtgtgtgtgtgtgtgtgtgtgtgtacagggtctcattatgttgagcaggctggtcttgaactcctgggctcaagtgatcctcctgccttagtgctgagattgcaggcattgagccatggcaccaagccagggctatataattctaatatttttaaataattgtggctgggcacagtggctcatgcctatgatcccagtactttgggaggccgagacagggggaactgcttgagcccaggagttccagcctgggcaatgtagcgatatcccatctctacaagaaaaataaaaaactagctgggcatggtggcacacaccagtagtcccagctactcagaggcggaggtgggaagatcacctgagcccaggaggtcaagactgcagtgagctgtgatcacgtcgctgcactccatccttatctcaaaacaaaaacaaaactgtaactttgggaaggtgagattatgtctatactactacaccttttcaccgccaactttggagtccttttcctctgtacttacctctgggagcacataggaggctgcaggaatcagcaggtaggaggctgggacaccagcatggactagagaacgtagtgtgtgccttccttccagccatggccggctgtccaccactaccacccgaaaccgccggccctctgtccaagcctcctgaagaattcgtgataccagagatgagctagagtgaatgaagaggaggattcagttataaatgtcagtaactgatgactaacttattcccaaaggcaagtgggtagtcccttcttcagatcattccaactcccaatctgctcagtcacaaggtctggaccataccatccatataccaggatcacatctccattactgatcttctggtaagcaaagcgtgaaattgcctgagctgctagcacaatcttctcttgcacataccgatcaatggctgctcgaagttctgacttggcctaaatggagtaaaatccttagtgaacaagaaatggacacttttatccctctgatgatcatgccaggtgcttgaatatgtgtatgatgacaagcctatagagggctcagagatggcacaagtcagaatggccaaaccattccttaacccttgactagggcaaaaaaaggcttacgttggccttcccgggagtttttaacatgtttcttaattttacccacaggtgcatgccttccttatttctcatactcatcacctcctcttcccgcttggaactgcccacactggtgatttccttgttaaggaacttgatggcgttgtgcatgctcgctgacaggggacggcactgagtcaggaagctataatacaacagcaataccttatatctgcgcaactcttcacaacttacaaagccttcacatttaaaaaaaaagtctttaaaaagaaaatagaacacaaaatgaaaagagagatagaaaagcaggaaaaagagtacaagacaaagattgggcgagctgggagtggacttatagtgttgtccctacctcatgtagggttttagtttattcactagatccctggagagttcttcattaggcggtgttgtgtaatcctgaatcacctatagggtacacaaggtgatctgcaaaataccccttaataaagatctctgaacgggggctgggggtaagcttcactgaggaaaatgttctgagggtaggagtattccctctgtcccccagagatgaccttgggtgacagaagctggggtagtattgggggaggtggggttggatcataagagagaacaggatgggacatacctgctgcaaggcacgaagcagggcaatacaccgggcattggagccactgaccaggccctgggagtactgcaggccgagtcgcaccatggctgggtggatcacagaggatgggatgctgatgggatggcggtgtcacatactttgaaagggagcttgagcatctactgcccacctgcccctgatgaaaaggaactcccttcactagcagatttccccactcctctacagttctgccttgggttcatactttttcctacagagtccatctcagattactagaaactttcaatactgacttactaaaactcctcagactcaaaagttatgacaatttcataggatcctacctcataaactgggtcagagagttttgtctgctgtactggggtaggtgagagaagagactgactttggatccataatcctttcgtgtaggaaccttgacaaaacaagggaacaggaccaatggcccagagtttaaaaaggatgggataaagctggaaaggaagtgaacagtaagactactctgacccaagcacctatccttctcactttgcacccagcacctttcctccctccagtccatttccctaggctctttctagccaggcaccaaacccacttcctacctgttgacgctctggttttttaacaagccttctcagaagtaggtcatcaacctgagggtactcagggagacgcttcactcctgaaagataatcatcatgttttcaggacactgtaggtcttgaaatgtgtaatttgctcttagggtataaggggcatcaagaaaaacaggatgaggtggagaaaacgggagaatagggtagaaaaggaaatagggataggataatggggttgcaggaacaattcagaactctgggtcccaagaatgagaggggagagctgttttactattgggcagcctgagctggcgttataattaggagtaagggaggtcttaaaatgaagggaagatacctgagggggtttctccagctgtgctggggctggccttaggaggtggtcctccttgttccccttttcttgcctgtttcagggcccgctcggcctcctgcttggctcgacgctcagcccgaagttcggccttactccgaccagctggaactttctcccgaggagtgcccaactgaatgcccgattctggcagttctctggttgggcctactaaaagcattaaaaaaaaaaatgcccaagctgcaggcaggtgatatccgtgccccagctaaaactagcttctctccttgtaaacctctttgctttacacacttgctcaaatcaactttgtcctgtctctcccttatctctcccaccacatccctctaccagctccacaccccagccctttaaaagagacccctcactcaccttgacattgggctgcagatacagcagagccagtctctggttctgcccccttttcttccttccgtttcttcttctgctgtttcttttccttccgaagctgcagcttttcttctttggtcatttccctccccactgcctgagacacagacataggatactgctcttccccaacaattccaaaggggaacaaatactattggatgcttacaagatttccacatggttaaatccctagttcttcctaacttccacaagctacctgttgcaagcttacatccacagaggctgacgtttctcctccagggacagaatcatatatccctagggttgcaagacctctgtaaaatctcctggctttactgagaaataaaccgacacgggatgggagctggggcggaataaagctggcacagcctcctgcgtagcgcttggcaggcggcttgggagggaagcctcacttaccccaggcccagggggaagctccgccttcatcccggatcccgagtctgcatcagaaaacagggcacaaagtgagccagagagactccgggagggtttgggggcacgagtactcggcgcagccggctgctgggttggcatgaccacggatccgccggcaggcgcgaggcgagccagggatccgcgtggggacgcactgcgcggcggatcaaaggaatggaggggtcaccgaccctcctcacagcaaccagccggtgcgcggcgcgggactgcgctcgagactgtgtagaccggagcccagcgtggcgctggaacggagcggcggggcccaaaggcgctcaaggcccggcactagctgtccggagctcgtcggctccgcgtaccagtaggcaggcccggctcttcactcaccctcgcgaacagccacggccacagcagccatcgccctcagtcctaggctccgcccgccgtggtcacggagccgccccgctgcctcgctccgcggctgcagggtccacagcgccacctgggctggaggctgagccgcagaagcgaagcgcgcagccccaatcggactacaatttccgacgggccccgaggccccgccccgcactacgggttgcaatgagggccaactccactttgggctycctatccggacaggtggctcttgccctttagactacagttcccagcatgcccaggcgattgcgtcccagaaccgacgtcccaccgccttcccacatcggatcgcagggctcccaaaatggcgagtgaggctgcggggactcgctgagcagcggagggggagcgtgcagagccgctgcggccctcacagtccggagcccggccgtgccgtgccgtagggaacatgcacttttccattcccgaaaccgagtcccgcagcggggacagcggcggctccgcctacgtggtgaggagcggccggagccgagccgggccgggcaggggcggggataacgggcccgagccatctcggagcggcctctgaggcctgaccgccacccttcgggcctggtcctgggccgccgactcccgacggcctctctgggagcttatctcatgtgtgtgattcgtgcagtggtcgcccgagctcctgtaggcccttaggccgggtcgcttccccgagctaggccgcagctgccctggtgggcgtcactggcctcttgggcagtgagactgcaacacaagcgtccgaatttcccccggactggctcttcagctttgggacttggccctggcgaaaacaagcgaactatccctcgggagattagcgcgttactccggcgagttgccaggcaacttccggccagggttctcaggggggttgcgcagaccgcaaccctaaaatgcttgactacttttgtgtcctcaggcctataacattcacgtgaatggagtcctgcactgtcgggtgcgctacagccagctyctggggctgcacgagcaggtgggactagcacccctgccttgagacagcttcaagcccttccctacacgtggacatcagtgtctccctttacccgctcttcttgttcccgtaggctgtagttcccctttaatcactgccacagggtagggccctggtttatcttgtctgacatttccgggaactccctaagaagcttaatgtccgcgcaacaactgctccttcctgttcttatattctggttttctgtccagtcttactgctctagtagcctttacccctgcatggacaaaccaacccctccccccactacctccacccaggctgtcaaagcacattccttctgtcatctgagcggcaacttgaaattcttttccctgcttatacaaacgattcaccgatttccttttgtgttcttcggctcatttcagtgtgtttagctgtgccaattatcgttatgtatctgtgatgcaatgtttctcctccttccttaccagatcttaaactctatttaactcagtagagctccactgataattagttgtgcaaccctgaacaagttacctgatatctttttttgggacggagtttctctcttgttgcccaggctggagtgcagtggcacgatctcggctcactgcaacctctgcctcctgggttcaagcgattctccttcctcagcctcctgagtagctgggattacaggcggctgcctccacacccagctaatttttgtatttttagtagagaggggtttcactatgttggccaggctggtctcaaactcctgacctcaggtgatccacccaccttgcctcccaaaatgctgagattacaggcatgaggcctgtagaaactgatttctttgggcctcagtttctacaactgaaagatggattctttgatctgcaaagtccctttaagtcctaagatattttgtgaacagacttagctattaactgtgcactttataaagccctttccttcctttaagggttcagtgaacagtcttgctaggtggtcaaggggctccctataggtcctggcccagtacaaatcctccccgtactgtggaggggctgacttgtacacagtaaaatagagcacaacttatatctaggacagctcccttgaggtgctaccgctgtcaaaggaattgtttctcagatgaccagggtagacaggggaacagggactgagggaagggaggggcacccaagagaacattatgagcatatgtagattgcctcatctcattttctgtgtttatgtgaagggttgtatctctttctctaaatagcttcggaaggagtatggggccaatgtgcttcctgcattccccccaaagaagcttttctctctgactcctgctgaggtagaacagaggagagagcagttagagaagtacatgcaagctggtgagtggttgcaggaaactaggttgactatattgaggactatggggagagacttaaaaacagctggttctgtggaagggcctgatttaatttctagatctaggaaggctcttgtttgatcwgttakgcagttagcaaagtaaatagtstacgaggatgtgtaactctgtgtactagcaaaacaatttgggcactaacatctatgagaaatactagtataacactagtcttaatatcagtggagagaacttaatttgtatctgatgtgctttagaktaacatcattgttatttccctagttctatagactggactcacctagatggcagccaagggtggggcaggtgaagaatttatgcaaacagtgagtgaggtgaggccagctgggggatgtggcaggccaccatcagcccaggaaatggggtcgggggaacctactgagaggaggactggggagccaagagtgagtgctaagttcctgtaataatgttctcttgtcctcgtagttcggcaagacccattgcttgggagcagcgagactttcaacagtttcctgcgtcgggcacaacaggtagggctttgggtgggaccaagatttaaggaaaggaccttgctggaaggtcatgtcttttatttttttgagacagagtcttgctcttttgcacaggctggagtgcagtggtgcgatctcagctcactgcaatctccgcctcccggattcaagcgattctcctgcctcagcctcccaagtagctagaattacaggcgcctgccaccatgtccggctcatttttgtatttttagtggagacggggttttgccgtgttggcctggctggtctcgaactcctgacctcaggtgatccacccgccttggcctcccaaagtgctgggattacgggtgtgagccaccacacccagccaggccatgtcatcttaataacagaggagtcatcttttttaatggaatggaacttctattcttatgaaatcaaagaaatcacagcctatatttaagcagctgagaataaagacacacaagggacctagaaatagagttgggcataggtcaaggcaagggacaaggcagtgcttcccatccccatgtgtgctcacaacaggagacacagcaggtccccacagaggaagtgtccttggaagtgctgctcagcaacgggcagaaagttctggtcaacgtgctaacttcagatcagactgaggatgtcctggaggtgaggcrcttgttcagcactgccccttcttcccctacatcctggggtcctgggcttggagaatgattggaaccagccagtatgatgagctgtacttctatccctatccccaggctgtagctgcaaagctggatcttccagatgacttgattggatactttagtctattcttagttcgagaaaaagaggatggagccttttcttgtgagtttctctggacttgactgcagtacaagggtacttcagtagagtttgcagcccccctaactccccacccccacccccagaatgaacattgcctcagggcacttctttcttgatttcccttcctttaaatctcactatattttcatttttttttttttaacctgtagttgtacggaagttgcaagagtttgagctgccttatgtgtctgtcaccagccttcggagtcaagagtataagattgtgctaaggaagaggtcagggctgggcctggaaggggaggggtgggaggtgctgtgctggattggattattgggccacatattgagacagaataatctggacaagggggtgtagtgctgggtgtttctgccaggcctcccaagcttcctcccactataccattagcccctgatagttccagattgctcctgttttgcccattttccattctacctcttgccttaacccagcttagccccattacccctttccaccccttggcctcacagttattgggactctgcctatgatgacgatgtcatggagaaccgggttggcctgaacctgctttatgctcaggtgagcttggagctgcctcagaacccttcccctgaagaaaataacrggtgactcactctcccaagaaaactgctgtcgtgtctttgttcccaatttgtggggaagttcctagaatactatcagtgctgctggcacaatatctactctccctacttttattaagctgacaagatcaaggacttactgcagagaggtcgctcaagtgtggggctaggggtcaggctggacagaggtaatggtagacgctttccttggattgctgactgggacctcctactgcctgccccttgtctctactatagacggtatcagatattgagcgtgggtggatcttggtcaccaaggaacagcaccggcaactcaaatctctgcaagagaaagtctccaagaaggaggtgagccctgcctcctctctgtcttcctctaagggcttgcagtggcgcgatcttggctcactgcaagctctgcctcycagattcatgccattctcccgcctcagcctcccgagtagctgggactacaggcacccrccacgacgcccggctaattttttgtatttttgggagagacagggtttcaccatgttagccaggatggtcttgagctcctgaccttgtgatctgtctgcctctgcytcctaaagtgctgggattataggcatgagccaccgcgcccgaccggggttgctttttctgagctgccccattctccctcctaatctacccccatgtgatgaccatttttcagttcctgagactggcccagacgctgcggcactatggctacttgcgctttgatgcctgtgtggctgacttcccagaaaaggactgtcctgtggtggtgagcgcgggcaacagtgagctcagcctgcagctccgcctgcctggccagcaactccgagaaggctccttccgggtcacccgcatgcgatgctggcgggtcacctcctctgtgagtcgggttaggagggggaagggcctgggttggggrcccggcaagccttgagcttaggtatgggctgcagcgggtcagggagccagacaggttggtcagagtgaactcaaccgaattccccttcctctcccaggtaccattgcccagtggaagcacgagcagcccaggccggggccggggtgaggtgcgcctggaactggcttttgaatacctcatgagcaaggaccggctacagtgggtcaccatcactagcccccaggtgtgaacctaccctcagccctcctctggagcaccttaaagtgtagagtttccagtactcaatatgggaggcattagtggtgctgggctcagagtgaccactctcatcaagctggacactcttcttgccctcaggctatcatgatgagcatctgcttgcagtccatggttgatgaactgatggtgaagaaatctggcggcagtatcaggaaggtaggcagcaagtgtggactgagcagtgagcaggtgtgctccccttgccttttgtcctagatgtgaggcttgtcttgagagrgaggggaagtgatcctgccctcaccggcaccttgtgtctgtccccagatgctgcgccggcgggtggggggtactctgagacgctcagacagccagcaagcagtgaagtccccaccactgcttgtaagtattacctcctggtcagaaccctggctctcagccctgcctcacctctcctagtgagtttctgacacctctgcctcttcttccccaggagtcacctgatgccacccgggagtctatggtcaaactctcagtgagttccagcgttggtgaggttgctgtttgttgggggatcttgcacgcccaagatctctgaccccaccctgcctttgttacagagtaagctgagtgccgtgagcttgcggggaattggcagtcccagcacagatgccagtgccagtgatgtccacggcaatttcgccttcgagggcattggagatgaggatctgtaatctccactgcttggatgtctgccctctaccccagaggaatttacagaaacttgccctgtgcctgtgtcccccatgctaggggcggaggggtcttttccttcttctttcctacctaccccttttytcttggccagggrcctsgtatcctacctttccttgtcccctgkgctggctgcacagaggattgccccttctcttttcagagctggccctcgatgccaaattagcatttagtattttgcacaaagtctaagggaccatggctgcctgccttggggaggaaccatakctccctctgggccgcttytggcctcttggagccatgggccaaaggccaaggggatgggcagaggtmtgtgtttggtctggcccagttccccatcattaaactcagcctgactgctgcctacctctggttccctctcactgcccctgcttcccccatcacagcatggactactatgctaagggtaaggccaaattgcctgccattgccaattcagcatagacatggctttgttagtgtttcctttattataaagcactgaaataagttaaataaacaggtgggaggctgggcagtcccccagccggtttgtccacagcccctgggggcagtggaggtgaatacagggcccttctcactgagctcrtgaagtgcctcagtcaaggcaaggtcccctggtccatatgggcccccccgcccatggggttgggctggtccttatagtgcctacgttagtctgtgtggagcccctggccagcgggggagaaaaaggtggcttctggtccgtctgtataaaacatggggaagaaggacctagttcaggatgagtctgtgtggacagcccggctgccagcagtccccagggctggtgggccccgagagctcaaaacagagggtgggctatgaggtggggcccagccctcagaggcagagagaccaggccctcctgccccaccgtggccatgcaccttctggtggcgcttgtagttgtcccagtggcccgtggtataggcgcaggtggcacagcggaagggcttctcgcctgtgtgccgcagcatgtgacgtttgaggttcatgctctggttgcagctgtagttgcaaaggctacaccgaaaaggtttgtcaccagagtggatgcgaccatgacgcttgaggttggccagattgccacaggcataagggcagagggggcacttgtagggcttctctcctgtatggacgcgctggtgccgtttcaggttatccagatgagcagaggcataaggacagcgggcgcagcggaagggcttctcaccactgtgtgtcttcatgtgccgggccaggtggttgggatagtgagtggcaaaggggcagaggctacaggcaaagcctttgtcactggggccctggggccccccactggcaccccctccagcctctcctcgcatgcagcgcccacacatggcagctcccagccgactaccctcaccctcctccagctcttgtccacagccccggcaggtccaagggaatagcagctctggcagtggttctgatccagtcccgcagaggccctccccttcaccccgcagctgcccacagtctggcaggaaactggcaccacctggtggcacatggaggctcaaatctggaaggagcagagcatctgtggggacaaagacctgggctatgaatccaatccaagcattcctagggtcagccacccatgtcccaagatctttggtccctggtgtgtcttaccttcaggtcgccggggcaccgccccctcctgctctgtgggactgggaggccgggctggtcgtggagtacagcagcggaagccacaggtcgggcagggaggagtggggggccctgcgtgggtacgctgatgccgcctcaggttgcccaggctgctgcaggcaaaggggcagtggggacagcggtagggcttctcgccagtgtgggtgcgggtatgtcgtgtcaggttgacgagctgggctgaggcgtaggggcagcggccacagcggaacggcttctctccgctgtgtgtctgcatgtgccgcttcaggtggctcgagtagtgggacacgaaggtgcagaggcggcatgagtacagtagccgtgggggcagcaggggccccccacccggccctcctgccccacaacacggcccctcacctgtcggccccccacacagctggcaggctgggcctggcctctcacccctggcctcccctggacccctggctggctcctcaacttcactctccgcacttagtgcccggccgcccccagactcatcgtcgctcagcccatagggaagcccaggcctggcccccagagagtctcctggtgaaatagacataagaagagacatcagcatagggtaggatcaggctccaaactctccccttttcacttatggtctccccacttgcttggctccacccttagctttgatgatccctttagttccctcctaggaatcaaggtctcccctgcagtaattccagaaaattcaacatgaattgtctacctcttacactggactaatctagtgatggtagaattgacctgtatctagtttccctcaatggtcaaggatcaagggctcacagtggatcacagactgaaatgaatccataatgaaattaattcttgagacaagaaagtaaaaatacgaaagggagagagcccccaagacctttttctaagctctattgctaaggccccttttagtaaggagctgatataaaataaaacctatctctgaggcaaaatttggagggaagtggagacaatgaaagtaatgcatgtaataccacttgcctgcctaaagaacagatatttacatggatcccctcaatgactttcaaaaaacatcttgcataagtggatgggtagtgcagcaaattagggtagggtgatgctaagatcacagggaagagggacatggaaggataaagacagaaactaaaacctctcaatacaaaaggagcttacgctgcaggtgaaagggagttagattagacctaaatactgggttgaatgatttacagagagtttgcttccctgaacctctcttaaaagtaaatacacataaggaatgggctagggagagagacagggcatttacttttaatcagttgctccatgtgattcacccaccctcctattcctatcacctttgaccaggcctcagaacttcacctcaacaaagtgatggaagtgattggaccattaaacaaatgaagtcatctagctcaaatgtaaactaaaccagccctcggttgtggcaggaaatggtgttctgttcacctaacctgcctcctgaagggctggggtctccagcggccgctaatccttaaccaagacccgaaaacccaccttccgagtctctctcgaagcccatgagctggtcactgttgccgtcgccttcctcctcttcctcttcctcctcaaactccagatcctggcctagtagcaaatcactctccaataccagggccccgggtccttcgtcgagggagtcttcagtatccactgaagaggggagggggcttgtggattctccctcaggaaccagccctcgtggaccacacttcccgtactcgctgacccactctgattcccttagtgcctcggtgggaagctaggagtctggatcgcccacttcatccctcaggagtccccctccaccctgacctgagcccactccactgaccccacccccgctcctctcccctcaaggcccctgacccctgacctttgaccccctcgcatttcacgggctgcgggtggctttgcttccttcggggcatcgtgaccggctccagcccgacgcgcctccggcctgcggccgcccgaccccgcccctcctatctcggcccgcctgtctgcccttcctctcagggcccgcgggccgcccccatgcagcggcgcgggccctgggcagcccccggccctggccccggcgcccagctcaggccgctcccgccgccgccgccgcttccattcatggagccccctacccccctacggagaccagctggtacctccgtactcgcttccgcttccgccgccgcagagacgcacgggacgcgtagtccgtgggaagcggccgcggcgggagcctcaatggcgtgaccgggaagtgattgtgacgaggcggggagcaagccaatcagcggcagcggggagccggccagggagcagcgcaggaggcgtcctgcccgactccaggcttcaggccagccagaccggtcccaacctgtccctgggggaactagatcatttctggctgcaggagggggcgaggggcagccgcgacgcccgccaggccggcctaccagcagctcgctctgggctctcctatacacgcgcaggacacacacgagcacacgcacacactcacatgggggctcgccacatgctacagatgggaccaagtcgggggccacggcagcagaaaaaaaaggacacgatgcgtacgattaggttttggcctttagtctgaaaaagtgttgattgaaagtgtacaacagagagcgggtgcaagcggccgagggccatggagccgccaataaaaaagaatgtccttaaataaagttcacagagtaaaaaccagaaccgccagtccttccctccaacacaacagagcacaggcacagaaccggtgatgagcccgaggagcagaggcggctgggaaggacagcagaggctcccggctgcagtgtggagggagagccctctttggaatgggcggagtgaagccacccagctccccctgcacacctcatacccactgctaaggctaaaggaaaaagacaaaactcagtctcaggtccggagggctcagaaaacagtctaggtgggcaggggtctggatgactgctagtctcgcttggccttcttcttcttgtcgctgttgccattttcttcagccccctcagtagagagcacctcctctagttttcgcttgccactctctggctggagctctgctgtgtttcggggcttgaagcaaatgatgatgcaggtcatgttgtcacaccctgtaccatccccagaagtgtctggtgccaggcactgatccagcagctaagaaagggatgggggtagctcagccacagggtttgaacaccttgccaggaatctacagtcccacaagagggctggcttgctgagtcagggtggtaggagaggaatgggcaagaggtatcacacaacggcccacctgctagtccataaggcataaggctaagtcagggaaatgacagaaggtggaactttggagtcggggtttagcgtctgtcagcaattactgataatgctcccagattgccgacttagctcagattaaaagagtgaaccctggctgtgcagaccagacaccctctcttctccaccctggtactcacctcttccacaatggatgacaataaccgaagctccccattttcatcacgctggctgatctttgattgaatgaaatctacaacttcctggctgctcatcacattcctggggtcaagaacaacagtcagaatcttccagtctcactaaggcagcgtagaggagtatggacagaggtggtggcccaggccagtgtaaataactacagaaattctcagctctgccttagtctgggtgctcttcacccaccaagaggcctaggtctgcctaggctctaatcctagaggtgccctgagtcctataagagaagacatgctgcagaaaggggaatttagggcattctgccagtgctcaccagatgccatcacaggcaatgaccatgaattcatggtcgtcagtgagagtcagcaccttgatgtcaggaagggctgaaatcatctgttcctcaggtggcaggttcttgtttctcttatagaagtggtcccctggagtaaaggaatggttgatgagcagtttggatacttcccacagacttgtgtttgtggcaggtcaaaccttgccattcatttcccttctttacaaagttccataatctagtggaatggggaactgagtcctaagtcctagtttttctagtttcaaccctgccaccagactgctgaaccttaagaaagtcactcactggtctttttattttaagtcttttttgtttttttttttttgagacggagtttcactcttgtagcccaggctggagtgtaatggcacgatctcggctcactacaacctccgcctcccggattcaagcggttctcctgcctcagcctcctgagtagctgggattacaggcttgcactaccatgcccagctaatttttgtatttttttttttttttagtagagatggggtttcaccatgttggccaggctggcctcgaactcctgacctcaggcgatccaccagcctcagcctcccaaagtgctgggattacaggcatgagccaccacgcccggcactcacaggtctttttcatcattcaaatgttacataagatgggtataatgatacctatgtataatgatacctctacccatcttagttatttcacaggaatataagaacagaggtagtagatattaaagtgctttgaaaggcacaagcactaggaagattaaagtttgctactaggtagtctgggacagagagaaagaccctagaagtctttcccagtttcttggcccttaccaatggctctggagaggttgaggcccccgttgactcgcccatccatggtgaccttgccaccagcattcttgatgcgtgctagttctacttcatcctctggtttgtgatcataggacatgtctaaagctttgccagcctcagataccacacagcgagagtctcctgcgttggctacaatcaactgcttccctcgtatcagggccaccaccgctgttgtaccactgtcagagccaggct

SEQ ID NO: 96592 - DNA, 15335 bp, Homo sapiens
aaaaagtgtacccagttgagctgattctttatctttttttcactggagaactaagtatacaggtgagaaaagacgagatatttatacccgagagaattgatggtgaaatccatttttttggatcagaacttccccaaacagtgtccttcaaatagggttcaggggtgctaagatatttatcccctcaacccttggggttcactccagtatggcatataaatattgtatcactttctatgtgtggggagcagtgctccaggtgaccttccttcctttccttctaggggaggaagttgccttgtactgtgccaaatatcttcctgatatcatcaaagatcagaaggcctacaaggaaggcaagctacagaaggtctgtctgcttacaccgcccattcctcacttgtgtaggcttttcccttgttctctagcccttgggcttttcctttctttttgtcctctagctgctgctgcttatttactcttgaagaattctgttcctaaaacgagcttattggccgccttttagacttgccttattattcctaggcctctgagctgtttttatctgtgagtgtctcttagtgtggtggctcacactcttaatttgtattccatccttgtgctcaggattgtatatagggagttcattttgtactagtcttagactattttgcttatattcaggctttagaagatgccttcttggctattgacgccaaattgaccactgaagaagtcattaaagagctggcacagattgcagggcgacccactgaggatgaagatgaaaaagaaaaagtagctgatgaagatgatggtgagtgtggcatcccttgtttgaggggaaatcagcattttaagaaatattctttaatattacttatcaattctaagataggatggctttctagggacctggggagtccttatgttaaagaaacctatgatgttctcctgcattgtatgtggttatgaaaaggagggagagaattatcttcgttgagtggcatctgagctgtaagcattgtatatacattatcttttgtcattgtgatggggtcttcctggttcctgctagtatttatgtgcttttttttcccctcaagactggagcagttattagccccaatagccaatcattaagcctaaatcctaattcacagtagcattgtgggcttcctggatcctcagccagaatagggtttttacaacttaacaataaaaaatgagacgtcagaggggaagtatagtaactagtgttgttttgattaagaaggggatgaaacacaaaaaccaaaagaagtctgtggaggagaaggagctagggcatgttcttctgagacttgagcgagaggaaccttgggagtgggaggttgtggggaagttagaggctgcaagggctgttgaggtagtgagagggacggatcccatgaggagtctggcatgggggctctgatttagcctcttccctgcagtggacaatgaggaggctgcactgctgcatgaagaggctaccatgactattgaagagctgctgacacgctacgggcagaactgtcacaagggccctccccacagcaaatctggaggtgggacaggcgaggaaccagggtcccagggcctcaatggggaggcaggacctgaggactcaactagggaaactccttcacaagaaaatggccccacagccaaggcctacacaggcttttcctccaactcggaacgtgggactgaggcaggccaagttggtgagcctggcattcccactggtgaggctgggccttcctgctcttcagcctctgacaagctgcctcgagttgctaagtccaagttctttgaggacagtgaggatgagtcagatgaggcggaggaagaagaggaagacagtgaggtaagggcctgtgagggcaggcagatgctgaagttgcagagaggtcctgtttggttgccgtctgtagttttcaactctctttccttctcctattttgacatcatcccccaagacccactgtattctaagctttagtcttgaattcattgagctccatcatcacaggtaccatttgcctttttacctcttcctttgttggtactataacaagcagatctagttctggcttttcagagtctgtctcctagagagagaacaaggagatagttgttaccttggctagttgactgttttcttctctggaaaatttattttctggccacagtgcctgaaagatatttttggctggcagcccttgccttgtcctgggctttttgctagtgactgctaagcccagttcaggatgtcagttgtactcatgctagccctttccatccccccaattttcatgaccatatacttgtatctttcagtgttttgaggacctgtgttcagtcaggacctcttgattctgagtatgagctgtggggagggaggggatcatcccagtctcagcagtctgggatcctccccctggcaggaatgcagcgaggaagaggatggctacagcagtgaggaggcagagaatgaggaagatgaggatgacaccgaggaggctgaagaggacgatgaagaagaagaagaagagatgatggtgccagggatggaaggcaaagaggaggtgtgtggggaaggggagcaatgagtcttgaaaagccacaaggcaggtgtgaatcccctaattttgattttgagacaggggatccccctgatactttaggatggaagtaatagtcatggggatttattctgcaaggggaatgagatggtaagcctttggggttgaattatctaaaaacaagggagagggagtgtgctgctgtctctagaaagatgaaatgtgtgcttctcctgtttgttaaagctcttttgggggtcccagtgaaagcaagcataggtgaacgatcaggagcacatcagtgaggaacgcatgttcagaagcccccatgatgctccttttcttcctcttaagcctggctctgacagtggtacaacagcggtggtggccctgatacgagggaagcagttgattgtagccaacgcaggagactctcgctgtgtggtatctgaggctggcaaagctttagacatgtcctatgatcacaaaccagaggatgaagtagaactagcacgcatcaagaatgctggtggcaaggtcaccatggatgggcgagtcaacgggggcctcaacctctccagagccattggtaagggccaagaaactgggaaagacttctagggtctttctctctgtcccagactacctagtagcaaactttaatcttcctagtgcttgtgcctttcaaagcactttaatatctactacctctgttcttatattcctgtgaaataactaagatgggtagaggtatcattatacataggtatcattatacccatcttatgtaacatttgaatgatgaaaaagacctgtgagtgccgggcgtggtggctcatgcctgtaatcccagcactttgggaggctgaggctggtggatcgcctgaggtcaggagttcgaggccagcctggccaacatggtgaaaccccatctctactaaaaaaaaaaaaaaatacaaaaattagctgggcatggtagtgcaagcctgtaatcccagctactcaggaggctgaggcaggagaaccgcttgaatccgggaggcggaggttgtagtgagccgagatcgtgccattacactccagcctgggctacaagagtgaaactccgtctcaaaaaaaaaaaaacaaaaaagacttaaaataaaaagaccagtgagtgactttcttaaggttcagcagtctggtggcagggttgaaactagaaaaactaggacttaggactcagttccccattccactagattatggaactttgtaaagaagggaaatgaatggcaaggtttgacctgccacaaacacaagtctgtgggaagtatccaaactgctcatcaaccattcctttactccaggggaccacttctataagagaaacaagaacctgccacctgaggaacagatgatttcagcccttcctgacatcaaggtgctgactctcactgacgaccatgaattcatggtcattgcctgtgatggcatctggtgagcactggcagaatgccctaaattcccctttctgcagcatgtcttctcttataggactcagggcacctctaggattagagcctaggcagacctaggcctcttggtgggtgaagagcacccagactaaggcagagctgagaatttctgtagttatttacactggcctgggccaccacctctgtccatactcctctacgctgccttagtgagactggaagattctgactgttgttcttgaccccaggaatgtgatgagcagccaggaagttgtagatttcattcaatcaaagatcagccagcgtgatgaaaatggggagcttcggttattgtcatccattgtggaagaggtgagtaccagggtggagaagagagggtgtctggtctgcacagccagggttcactcttttaatctgagctaagtcggcaatctgggagcattatcagtaattgctgacagacgctaaaccccgactccaaagttccaccttctgtcatttccctgacttagccttatgccttatggactagcaggtgggccgttgtgtgatacctcttgcccattcctctcctaccaccctgactcagcaagccagccctcttgtgggactgtagattcctggcaaggtgttcaaaccctgtggctgagctacccccatccctttcttagctgctggatcagtgcctggcaccagacacttctggggatggtacagggtgtgacaacatgacctgcatcatcatttgcttcaagccccgaaacacagcagagctccagccagagagtggcaagcgaaaactagaggaggtgctctctactgagggggctgaagaaaatggcaacagcgacaagaagaagaaggccaagcgagactagcagtcatccagacccctgcccacctagactgttttctgagccctccggacctgagactgagttttgtctttttcctttagccttagcagtgggtatgaggtgtgcagggggagctgggtggcttcactccgcccattccaaagagggctctccctccacactgcagccgggagcctctgctgtccttcccagccgcctctgctcctcgggctcatcaccggttctgtgcctgtgctctgttgtgttggagggaaggactggcggttctggtttttactctgtgaactttatttaaggacattcttttttattggcggctccatggccctcggccgcttgcacccgctctctgttgtacactttcaatcaacactttttcagactaaaggccaaaacctaatcgtacgcatcgtgtccttttttttctgctgccgtggcccccgacttggtcccatctgtagcatgtggcgagcccccatgtgagtgtgtgcgtgtgctcgtgtgtgtcctgcgcgtgtataggagagcccagagcgagctgctggtaggccggcctggcgggcgtcgcggctgcccctcgccccctcctgcagccagaaatgatctagttcccccagggacaggttgggaccggtctggctggcctgaagcctggagtcgggcaggacgcctcctgcgctgctccctggccggctccccgctgccgctgattggcttgctccccgcctcgtcacaatcacttcccggtcacgccattgaggctcccgccgcggccgcttcccacggactacgcgtcccgtgcgtctctgcggcggcggaagcggaagcgagtacggaggtaccagctggtctccgtaggggggtagggggctccatgaatggaagcggcggcggcggcgggagcggcctgagctgggcgccggggccagggccgggggctgcccagggcccgcgccgctgcatgggggcggcccgcgggccctgagaggaagggcagacaggcgggccgagataggaggggcggggtcgggcggccgcaggccggaggcgcgtcgggctggagccggtcacgatgccccgaaggaagcaaagccacccgcagcccgtgaaatgcgagggggtcaaaggtcaggggtcaggggccttgaggggagaggagcgggggtggggtcagtggagtgggctcaggtcagggtggagggggactcctgagggatgaagtgggcgatccagactcctagcttcccaccgaggcactaagggaatcagagtgggtcagcgagtacgggaagtgtggtccacgagggctggttcctgagggagaatccacaagccccctcccctcttcagtggatactgaagactccctcgacgaaggacccggggccctggtattggagagtgatttgctactaggccaggatctggagtttgaggaggaagaggaagaggaggaaggcgacggcaacagtgaccagctcatgggcttcgagagagactcggaaggtgggttttcgggtcttggttaaggattagcggccgctggagaccccagcccttcaggaggcaggttaggtgaacagaacaccatttcctgccacaaccgagggctggtttagtttacatttgagctagatgacttcatttgtttaatggtccaatcacttccatcactttgttgaggtgaagttctgaggcctggtcaaaggtgataggaataggagggtgggtgaatcacatggagcaactgattaaaagtaaatgccctgtctctctccctagcccattccttatgtgtatttacttttaagagaggttcagggaagcaaactctctgtaaatcattcaacccagtatttaggtctaatctaactccctttcacctgcagcgtaagctccttttgtattgagaggttttagtttctgtctttatccttccatgtccctcttccctgtgatcttagcatcaccctaccctaatttgctgcactacccatccacttatgcaagatgttttttgaaagtcattgaggggatccatgtaaatatctgttctttaggcaggcaagtggtattacatgcattactttcattgtctccacttccctccaaattttgcctcagagataggttttattttatatcagctccttactaaaaggggccttagcaatagagcttagaaaaaggtcttgggggctctctccctttcgtatttttactttcttgtctcaagaattaatttcattatggattcatttcagtctgtgatccactgtgagcccttgatccttgaccattgagggaaactagatacaggtcaattctaccatcactagattagtccagtgtaagaggtagacaattcatgttgaattttctggaattactgcaggggagaccttgattcctaggagggaactaaagggatcatcaaagctaagggtggagccaagcaagtggggagaccataagtgaaaaggggagagtttggagcctgatcctaccctatgctgatgtctcttcttatgtctatttcaccaggagactctctgggggccaggcctgggcttccctatgggctgagcgacgatgagtctgggggcggccgggcactaagtgyggagagtgaagttgaggagccagccaggggtccaggggaggccaggggtgagaggccaggcccagcctgccagctgtgtggggggccgacaggtgaggggccgtgttgtggggcaggagggccgggtggggggcccctgctgcccccacggctactgtactcatgccgcctctgcaccttcgtgtcccactactcgagccacctgaagcggcacatgcagacacacagcggagagaagccgttccgctgtggccgctgcccctacgcctcagcccagctcgtcaacctgacacgacatacccgcacccacactggcgagaagccctaccgctgtccccactgcccctttgcctgcagcagcctgggcaacctgaggcggcatcagcgtacccacgcagggccccccactcctccctgcccgacctgtggcttccgctgctgtactccacgaccagcccggcctcccagtcccacagagcaggagggggcgrtgccccggcgacctgaaggtaagacacaccagggaccaaagatcttgggacatgggtggctgaccctaggaatgcttggattggattcatagcccaggtctttgtccccacagatgctctgctccttccagatttgagcctccatgtgccaccaggtggtgccagtttcctgccagactgtgggcagctgcrgggtgaargggagggcctctgcgggactggatcagaaccactgccagagctgctattcccttggacctgccggggctgtggacaagagctggaggagggtgagggtagtcggctgggagctgccatgtgtgggcgctgcatgcgaggagaggctggagggggtgccagtggggggccccagggccccagtgacaaaggctttgcctgtagcctctgcccctttgccactcactatcccaaccacctggcccggcacatgaagacacacagtggtgagaagcccttycgctgcgcccgctgtccttatgcctctgctcatctggataacctgaaacggcaccagcgygtccatacaggagagaagccctacaagtgccccctctgcccttatgcctgtggcaatctggccaacctcaagcgtcatggtcgcatccactctggtgacaaaccttttcggtgtagcctttgcaactacagctgcaaccagagcatgaacctcaaacgtcacatgctgcggcacacaggcgagaagcccttccgctgtgccacctgcgcctataccacgggccactgggacaactacaagcgccaccagaaggtgcatggccayggtggggcaggagggcctggtctctctgcctctgagggctgggccccacctcatagcccaccctctgttttgagctctcggggcccaccagccctggggactgctggcagccgggctgtccacacagactcatcctgaactaggtccttcttccccatgttttatacagacggaccagaagccacctttttctcccccgctggccaggggctccacacagactaacgtaggcactataaggaccagcccaaccccatgggcgggggggcccatatggaccaggggaccttgccttgactgaggcacttcaygagctcagtgagaagggccctgtattcacctccactgcccccaggggctgtggacaaaccggctgggggactgcccagcctcccacctgtttatttaacttatttcagtgctttataataaaggaaacactaacaaagccatgtctatgctgaattggcaatggcaggcaatttggccttacccttagcatagtagtccatgctgtgatgggggaagcaggggcagtgagagggaaccagaggtaggcagcagtcaggctgagtttaatgatggggaactgggccagaccaaacacagacctctgcccatccccttggcctttggcccatggctccaagaggccagaagcggcccagagggagatatggttcctccccaaggcaggcagccatggtcccttagactttgtgcaaaatactaaatgctaatttggcatcgagggccagctctgaaaagagaaggggcaatcctctgtgcagccagcccaggggacaaggaaaggtaggatacgaggcccctggccaagagaaaaggggtaggtaggaaagaagaaggaaaagacccctccgcccctagcatgggggacacaggcacagggcaagtttctgtaaattcctctggggtagagggcagacatccaagcagtggagattacagatcctcatctccaatgccctcgaaggcgaaattgccgtggacatcactggcactggcatctgtgctgggactgccaattccccgcaagctcacggcactcagcttactctgtaacaaaggcagggtggggtcagagatcttgggcgtgcaagatcccccaacaaacagcaacctcaccaacgctggaactcactgagagtttgaccatagactcccgggtggcatcaggtgactcctggggaagaagaggcagaggtgtcagaaactcactaggagaggtgaggcagggctgagagccagggttctgaccaggaggtaatacttacaagcagtggtggggacttcactgcttgctggctgtctgagcgtctcagagtaccccccacccgccggcgcagcatctggggacagacacaaggtgccggtgagggcaggatcacttcccctccctctcaagacaagcctcacatctaggacaaaaggcaaggggagcacacctgctcactgctcagtccacacttgctgcctaccttcctgatactgccgccagatttcttcaccatcagttcatcaaccatggactgcaagcagatgctcatcatgatagcctgagggcaagaagagtgtccagcttgatgagagtggtcactctgagcccagcaccactaatgcctcccatattgagtactggaaactctacactttaaggtgctccagaggagggctgagggtaggttcacacctgggggctagtgatggtgacccactgtagccggtccttgctcatgaggtattcaaaagccagttccaggcgcacctcaccccggccccggcctgggctgctcgtgcttccactgggcaatggtacctgggagaggaaggggaattcggttgagttcactctgaccaacctgtctggctccctgacccgctgcagcccatacctaagctcaaggcttgccgggcccccaacccaggcccttccccctcctaacccgactcacagaggaggtgacccgccagcatcgcatgcgggtgacccggaaggagccttctcggagttgctggccaggcaggcggagctgcaggctgagctcactgttgcccgcgctcaccaccacaggacagtccttttctgggaagtcagccacacaggcatcaaagcgcaagtagccatagtgccgcagcgtctgggccagtctcaggaactgaaaaatggtcatcacatgggggtagattaggagggagaatggggcagctcagaaaaagcaaccccggtcgggcgcggtggctcatgcctataatcccagcactttaggaggcagaggcagacagatcacaaggtcaggagctcaagaccatcctggctaacatggtgaaaccctgtctctcccaaaaatacaaaaaattagccgggcgtcgtggcgggtgcctgtagtcccagctactcgggaggctgaggcgggagaatggcatgaatctgagaggcagagcttgcagtgagccaagatcgcgccactgcaagcccttagaggaagacagagaggaggcagggctcacctccttcttggagactttctcttgcagagatttgagttgccggtgctgttccttggtgaccaagatccacccacgctcaatatctgataccgtctatagtagagacaaggggcaggcagtaggaggtcccagtcagcaatccaaggaaagcgtctaccattacctctgtccagcctgacccctagccccacacttgagcgacctctctgcagtaagtccttgatcttgtcagcttaataaaagtagggagagtagatattgtgccagcagcactgatagtattctaggaacttccccacaaattgggaacaaagacacgacagcagttttcttgggagagtgagtcacccgttattttcttcaggggaagggttctgaggcagctccaagctcacctgagcataaagcaggttcaggccaacccggttctccatgacatcgtcatcataggcagagtcccaataactgtgaggccaaggggtggaaaggggtaatggggctaagctgggttaaggcaagaggtagaatggaaaatgggcaaaacaggagcaatctggaactatcaggggctaatggtatagtgggaggaagcttgggaggcctggcagaaacacccagcactacacccccttgtccagattattctgtctcaatatgtggcccaataatccaatccagcacagcacctcccacccctccccttccaggcccagccctgacctcttccttagcacaatcttatactcttgactccgaaggctggtgacagacacataaggcagctcaaactcttgcaacttccgtacaactacaggttaaaaaaaaaaaaatgaaaatatagtgagatttaaaggaagggaaatcaagaaagaagtgccctgaggcaatgttcattctgggggtgggggtggggagttaggggggctgcaaactctactgaagtacccttgtactgcagtcaagtccagagaaactcacaagaaaaggctccatcctctttttctcgaactaagaatagactaaagtatccaatcaagtcatctggaagatccagctttgcagctacagcctggggatagggatagaagtacagctcatcatactggctggttccaatcattctccaagcccaggaccccaggatgtaggggaagaaggggcagtgctgaacaagcgcctcacctccaggacatcctcagtctgatctgaagttagcacgttgaccagaactttctgcccgttgctgagcagcacttccaaggacacttcctctgtggggacctgctgtgtctcctgttgtgagcacacatggggatgggaagcactgccttgtcccttgccttgacctatgcccaactctatttctaggtcccttgtgtgtctttattctcagctgcttaaatataggctgtgatttctttgatttcataagaatagaagttccattccattaaaaaagatgactcctctgttattaagatgacatggcctggctgggtgtggtggctcacacccgtaatcccagcactttgggaggccaaggcgggtggatcacctgaggtcaggagttcgagaccagccaggccaacacggcaaaaccccgtctccactaaaaatacaaaaatgagccggacatggtggcaggcgcctgtaattctagctacttgggaggctgaggcaggagaatcgcttgaatccgggaggcggagattgcagtgagctgagatcgcaccactgcactccagcctgtgcaaaagagcaagactctgtctcaaaaaaataaaagacatgaccttccagcaaggtcctttccttaaatcttggtcccacccaaagccctacctgttgtgcccgacgcaggaaactgttgaaagtctcgctgctcccaagcaatgggtcttgccgaactacgaggacaagagaacattattacaggaacttagcactcactcttggctccccagtcctcctctcagtaggttcccccgaccccatttcctgggctgatggtggcctgccacatcccccagctggcctcacctcactcactgtttgcataaattcttcacctgccccacccttggctgccatctaggtgagtccagtctatagaactagggaaataacaatgatgttaatctaaagcacatcagatacaaattaagttctctccactgatattaagactagtgttatactagtatttctcatagatgttagtgcccaaattgttttgctagtacacagagttacacatcctcgtacactatttactttgctaactgcataacagatcaaacaagagccttcctagatctagaaattaaatcaggcccttccacagaaccagctgtttttaagtctctccccatagtcctcaatatagtcaacctagtttcctgcaaccactcaccagcttgcatgtacttctctaactgctctctcctctgttctacctcagcaggagtcagagagaaaagcttctttggggggaatgcaggaagcacattggccccatactccttccgaagctatttagagaaagagatacaacccttcacataaacacagaaaatgagatgaggcaatctacatatgctcataatgttctcttgggtgcccctcccttccctcagtccctgttcccctgtctaccctggtcatctgagaaacaattcctttgacagcggtagcacctcaagggagctgtcctagatataagttgtgctctattttactgtgtacaagtcagcccctccacagtacggggaggatttgtactgggccaggacctatagggagccccttgaccacctagcaagactgttcactgaacccttaaaggaaggaaagggctttataaagtgcacagttaatagctaagtctgttcacaaaatatcttaggacttaaagggactttgcagatcaaagaatccatctttcagttgtagaaactgaggcccaaagaaatcagtttctacaggcctcatgcctgtaatctcagcattttgggaggcaaggtgggtggatcacctgaggtcaggagtttgagaccagcctggccaacatagtgaaacccctctctactaaaaatacaaaaattagctgggtgtggaggcagccgcctgtaatcccagctactcaggaggctgaggaaggagaatcgcttgaacccaggaggcagaggttgcagtgagccgagatcgtgccactgcactccagcctgggcaacaagagagaaactccgtcccaaaaaaagatatcaggtaacttgttcagggttgcacaactaattatcagtggagctctactgagttaaatagagtttaagatctggtaaggaaggaggagaaacattgcatcacagatacataacgataattggcacagctaaacacactgaaatgagccgaagaacacaaaaggaaatcggtgaatcgtttgtataagcagggaaaagaatttcaagttgccgctcagatgacagaaggaatgtgctttgacagcctgggtggaggtagtggggggaggggttggtttgtccatgcaggggtaaaggctactagagcagtaagactggacagaaaaccagaatataagaacaggaaggagcagttgttgcgcggacattaagcttcttagggagttcccggaaatgtcagacaagataaaccagggccctaccctgtggcagtgattaaaggggaactacagcctacgggaacaagaagagcgggtaaagggagacactgatgtccacgtgtagggaagggcttgaagctgtctcaaggcaggggtgctagtcccacctgctcgtgcagccccaggagctggctgtagcgcacccgacagtgcaggactccattcacgtgaatgttataggcctgaggacacaaaagtagtcaagcattttagggttgcggt

SEQ ID NO: 96593 - DNA, 65142 bp, Homo sapiens
atgccatgctgctagctgctgtgtggcactgcttgggtgacagtcttctgtatctatccactgtggctgcctcatatcacccagtttctggttcaggccaccgtgatccttctaagcatgggggctcagccagcaatttcatctctcagtgctgagctcagccactggtgccctgggggtttgcggtgcccactcactgccccttccccccaggggaaactctccttttcatcccccagaaacattaagcatgcattctgcccctttctctgacccaaggcttcagggcttatccggaaggttaggaacttagaaatgcaaagggcttgtatactctctttggtagggagggtgcttaagctccccgccgagggtgggatgtcttccattccttcctgagccaaataatctcccctttttgcaatactcagcagctcagattggctcagccaaggggtcttctttctacaacagcgggaaaacaaaacccaagctctctgtgggccagcacagcacccgcagccccttaatccagtccccgtggatccgcctgagagacagggtctatgaatccattttagagatagacgagctctttcatagtgagcaacaccgtcatcagaatggctgttgctggccgggcacggcggctcacgcctgtaatcccagcactttgggaggccgaggcgtggatcactagaggtcaggagttcaagaccagcctggccaacatggtgaaaccctgtctctactaaaagtacaaaaagattagccgggcgtggtggcacatgcctgtaattccagctacccgggaggctgaggcaggagaatcgctggaacccagaaggcagagactgcagtgagccgagatcgcaccatcacactccagcctgggcggcagagtgagactccatttcaaaacaaaataaaaagaccaacctgggcaacacaacgagaccctgtcactctctctctctcttttttttttttcccctgagatggagtctagctctgttgcccaggctggaatgcagtggtgtgatctcggctcactgcaacctccgcctcccgggttcaagcgattctcctgcctcagcctcccaaggagctgggacaacatgcatgagccaccacatctagctaattttttgtatttttagtacagatgcagtttcaccatgttggcttggatggtctcgatctcttgacctcatgatccacctgcctcagcctcccaaagtgctaggattgcaggcgtgagccactgtgcctgacctgaccctgtctcttaaaaacgtaaaaaaagccaggtgtggtggcatgcacctgtcatcccaatactcaagaggctgaggtgggaggatcgcttgagtctgggaggttgaggctacagtgagccaaaatggcgccattgcactccagcctgggcaacagagatcctgtctcaaggaaaaaaaaaaaaaaagaatctgaagctaggtggattatctcaggcttgttctactacatacaaattttatttctaatgcccagaagataacatgcaaactctcgagaagacctggtacgttagcttttttaaatgtgtgttttaaaattgtttttatgtacttaattttaaaaatacataagacattctcatggaacaacaatctgaaagtgtaaaaaggtttacaggtcaggtgtggtggctcatgcctgtaatcccagcactttgggaggccgaggcaggcggatcacaaggtcaggagttcgagaccagcctggccaacatggtgaaaccctgtctctactaaaaatacaaaaattagccaggcatggtagtacctgttgtcccatctactcaggaggataaggcaggagaatcacttgaacccgggaggcagaggttgcagtgagctgagattgctccactgcactccagcctggaaggcagagtaagactccgtctcaagaaaaaaaaaaaaaaggaaaaaatataaaatgcaaacccctggtcttccccttccaagcctccctgctgtgactcctcagctggcctctctggcccaatgtcctcctgcagggatctcacggtccttctcccgtgccagggcacacatacttttccctgccccgcaccccttccaaatgctgtctgttcattccacttcctccaagactctactctcacgttcccttctgcttctccggaccaaccttaccactcctgggaatttctttaaaacacctccccccaggcccccaagacctaggagtttccccacctgcgtggggctgagaagcaagtgagagagctatgggaacaaatcctagctctgcaaatgccaagcttgtgattgtgaggaagtcactgccatctggatctcgtttcctcatctataaattgagggctgggactggccatctctcagggttcctgggctgtgtgtttttctagttctgtggaagttttgcacttcctttatctggtatttctgtgaaaaaggctcatcagactttggggaaatcgatcctccccctgcctcccagctcactgttactgacatttctcttccccaccaagatctcaaggagggcattttccctgccaagaacattctggaagtgcattccaaaccctgcctgccagaggccacctcaccttggtgtttctgacatggagaatctgaggaagaaaggggaggacagagggaggacagggtgagagaggatgggaagaggaaatgcaagaaatgcaagaggtggttatccaagtcactggggagggcctaccagtagtaggctccaggtgggcttaacagaagtgttaggccaggcgtggtggctcaagcctgtaatcacagcactgtgggaggtcaaggtggacagatcacctgaggtcaggagtttgagaccagcctggccaacatggcgaaaccccgtctctactaaaaatgcaaaaattagccaggcatggtggcatacaactataatcccagctactcaggaggctggggcaggagaatcacttgaacccgggaagtggaggttacagtgagctgagatcgagccagtgctctccagcctgggcaacaagagcgaaactccatatcaaaaaaaaaggaagtgttaccggtggagggtgtgtaggttcttggcattctgagcaaagaattggacaaaaatgcagaaacaaagcaaggaaaaaatgaagcaacaaaagcagagatgtaatgaaaatgaaaggcggaggttgcagtgagccaagatcatgccactgcactccagcctgggccatagagcgagactctgtcccaaaggaaaaaaaaaaaaaaagacaacctcagaactgaaatgtgatcctgggaaggctaccaaacatgtaaaaggtttacaaaaatttgcattgtcatgaattattataatcttttataagtcattcaaccagtttgcagagagagagaggggccagaagtccaactggtaggaaattcttaccctaggccagcgcggtggctcacacttgtaatcccagcactttgggaggccgaggtgggtggatcacgaggtcaggagttcaagaccagcctggccaagatggtgaaacccacctctactaaaaactacaaaaagtagccgggtgtggtggcaggtacctgtaatctcagctactccggaggctgaggcaggagaatcacttgaacctaggcggcagaggttgcagtgagccgagatcacaccattgcactccagcctgggtgacagggcgagactccatctcaaaaaaaaaaaaaaaagaaagaaattcttaccctattgttggcatgttaggtttctgggttctttctccttgagcggcccaaatgatgctgctcgactgtatgcaaacaaacacattgccatgaattaagaatattccagtggctcatgcctgtaatcccagcactttgggaggctgaggcaggcagatcacgaggtcaggagattgagaccatcctggctaacacggtgaaaccctgtctctactaaaaataaaagaattaactgggcatggtggcatgtgcctgtagtcccagctactcaggaggctgaggcaggagaatcccttgaacccagtaggtggaggtcaggctggtcttgaactcctgacttcaagtgatccgcccacctcggcttcccaaagtgctgggattacaggcgtgagccactgtgcccggcctaaccatgtttttaatagccagtgagcatcaggtgctcacctaaacataaggaaggatatcaaagttaaatacatagctatttttgccaacaactcagaagatttagctaatagtattaaattaactctcatttgtcaaaaaaaaaaaaaaagcacgcaaaccaagatcattttgttttggctgggtttatagttttataaccttctatgccaaactctgacacctcaaagtatttagcagagacaaatataaagtccagacaaaaatgtatgctgacaattctgaaagcatttctattttaccaataattttaaaaccagcctgtttattaaagttatacttaagtcatatgaacttgaaaattgcttagacttatttagttaatttatgagcactcttttatttatatgccaatttggtaggcacaagatataacagtaagtgtacctacaaataaacacatctagacatgtatataccgacacaaacaaagatccaatagcttggaactgtagccatgagatagcaatacaagctcgctggttttactttgtttgccccaatagataatccaatgaaggctgtgaactaaaattttgggtaaagtagttttcatggcagtttgatttttttgtttgtttgtttgtctattcatttaagactgagtttcgctctgtcacccaggctgcagtgcagtggcgcaatctcggctcacttcaacctccacctcctgggttcaagtgattctcctgcctcaggctcccaagtagctgggattataggcgtgtgccaccatgcccagctaattttttgtatttttagtagagacagggttttaccatgttggccaggctactctcgaactcccgacctcaggtaatccacccatcttggcctcccaaactgctgggattacaagctagaaccacctcgcctggcctggcagtttgatttttatttgtatttattttttcttttttcttttctttctcagtctccagcctcccgagtagctgggattacaggtgcacgccaccaggcctggggaatttttctatattctgtagagacggggtttcgccacgttgcccaagctggtctggaaatcctgagctcaagcaatccgcccacctcggcctcccaaagtgctgggattacaggcgtgagccaccgcgcccggccgaattatttaagaagcgaatttcttagtctatgaaaatgacgttcaacggcaaatggcaaaatgaagttctgacttttccacctgtaaagtagattgatatgagcgggagtgagaagaccttgtcgctatcagtataagacaagagaactgagggcagccagttgtggccacagcaactctctgagtgaattgctgccacactgggcacagaagcgcacactctgaaatcgaatgtttggattcctttctacataattctactaaagagttattccacagcctaggggctgccttagagccccgtttgagacactctgggctcacagatcatgaagtcagtgcgcaaacgcgggcagaccctgaaccaggtgcccaacgcccagccctcacttccagagctcaggactctcgcaagagcgactccagccccggcctgccgctgtctacattcgcgctcttccttcctcgggaaacaaacggtggatcagatctccaaggctctgagtttcccagagtttggccgtgcgccagcgcagcgcagcccctcccagcagcacagcacagaccccaccccatcctccaacgcccggggttcctgctctatcacctacaccaccaccaccacgtgcaggcccgagaaggcaaaagaggcccagccactctcaccggggattttatccgcctccccggcacacacacactctcactcacgcactcgctcgccggccttccagctgtctgtgtccggggcggggaccggcttggcgcagcccgctgtcagcgctcgccggctcctcgcgcccctacccgctgcgctctgcccagagcagaagcccggccggccggcccacgggcgggaggacgcgcctccgctcgggcggaggcggcgcggtggctgatcagagcgcgtagggcttcgccggggccgggagctgggcgcggtcctgctcagcccagctcaccgcgcgccggccctcggcgccctggttctgcggatcaggtgggtcccgcggggagccgcccaggtccccggaggccacgagcaggacacggacggggggctccgcgcttgggagagggtggtgagggagtggaggcgggccgctgctccggcgctgcccggtgtctgccctgcctgtgtccctgcttttgttcttgtcgctacctcggtgccaaatcggacccagtttctgtccctctgtccccatcctgtggccgtccctccctctgtccagccttccaagactggagcctgaagagctgcaagctgaggttcccccacgggtccgcggggttggggtgggggaagagaggggagacgcaggggacacaggatgcgaccaagtaagtcgcagtgagtgaggggtctgtccttgcctgtggggcaggacagaggaatggctcttgcccaggacaagataggaagggcgcgcctctgggaaggggaatctgggagtggggggataaagtgagggtcgcaggaaccccaaggaggaagggaatagagagggagatgtcagagagcttcggagagccgaggactcagtcagacgcccagcatggggaaagtttccgacactaactttggcatccggggtgcctgcagcactggggcgatgggaggcgggagtttcctccaactcttcaaaccttgctcctactcgaaaaggacaccaccccgcgtttggaaatggcaggaaaacggctaaacacaatgattgcacaaactcttgaagaaagtaaaaaaaaaaaaaacagtaaaaagaagaagaaaaaaatgtcagcgcgcaaagagccagagaagcagagggatttgagattcctcgatcttcccgctgtggcggccgggagggactgggaggcgcggagggtgtgagagccgctcctccggcaggaaggaaccgagacccgaggcaggtgttttgaggctttgctcttcctttgcactccttcgggctcctgagcaggccgggctgcctccttcctttacctggaaacaggcgtgtctgaggaagcaggagatgtagggtgcagccctggcctgccgcttgctgccagtaaggaaccaccttcccagacagagcctcagtttccccgattgtgaaataaggatactactggagaccttccttccagtctctgagtaaggaaatgcaagtgcatggcgaaggagggctctgggagtggggggtgtggaggacagggttattctgctgcatttctgtgcttctttgactacatcaggcactttctacctctttcggagttacatctgggtgaattttgcctcctctaccagatgggggcagcatgtggatctaagttatctcatttacatgtaacaggtgctcaatgactgaataaggcagagctgaacgagtccctagggattgcccagtccagaagtttcaactctgtcctgtaaggcccggcatcctgcctcaagggccaccatggtaggggaggggaacctagaggacagggctctggccccttccctatcttatttcagacagaaccagttctgttcttcctttatctcctctatgtattgggaaactcctgagaacgtttttgatgtcagattgctcagatccaacctgatccagtttttggtggagtagctgaggtccagaagtgtgcaacgtgatttgggcaaacttctctagtggccacaccttaccaggagacctgtcccctaaatcataggctaggagctgcctttgtctggccatggtggctctgagcagccatttccccagctcttaccaccagctctcctacactccaactccagggccacagggctgccttctggcccttctgggagaagaagcctgtgaatctcatcctctgagcacttccagacctttagtgggaccatttatgtgagttggtctcacaggttgaggtaaaaaataatgaggttccctggcccaactgagtagactaggtacctgcctgtgtccctgcttttgttcttgttgctacttctatgtcagaacggactcagtctctgtccccattctgcgcccgtccctgccttcgtccagccttctaagactggagcctgaggggctgtgggctgagcagcccctcaggctaacccattttctagttgaggaaaggaaggctgagagagaccaagaaacatatgggcactcagcaactaaatggaagctaggatttgaatgcagttctggctctaaggttggtgctttttccattacatcacctctcatgatggctaaaaaatggctaatggacaaatgtcatggagacggggcagaggtgaggggagaacaaccgaaggagggggcagctttcagtaggggactggacattaatagaggtataaactcataaatataattttatctgaaatgaatgtactctttgccctgtactttccttttattttaggttggatatgtaaaacttattttctttcttttttttgagacagtctccctctgttgcccaggctggagtgcagtgatgctatcttgactcactgcaacctccacctcccagattaaagcaatcctcccacctcagcctcccaagtagctaggattacaggcgtgcaccaccatacccagctaattttttaatttttagtagagacagggtttcaccctgttggccaggctggtctcgaactcctgacctcaggtgatccacccacctccgcctcccaaagtggtaggattacagrtgtgagccaccatgcccagttgtaaaacctacaaatcttacgtgtttgatttgacaactcttttttttgtttgtttgagacagagtctcattctgtctcccaagctggaatggtgggatcttgaatcactgcaatctctgccccctaggttcattcaagcgattctctctctctytytttttttttttttttttttttttgagatggagccttgctctgtcactcaggctggagtgcagtggcatgatcttggctcactgcaacctttgcctcccgggttcaagcgattctcctgcctcagcctcctgagtagctgggattacaggcacctgccaccacactggctaattttcttttgtatttttagtagagttggggtttcaccatgttggccaggctggtctcaaactcctgaccttgtgatctgaccacctcagcctcccaaaatgatgggattgcaggtgtgagccaccacgcccggcctaccttctattttttacgattgaattttaagagtttttggagaaaataacatgagtcagggcagaatagggatatggtgatatggagatggtgatatggagaccattatgggccagggcttgggaaggaaagaaccaaatggtggttggaataatgacctcaggaatagggatttctgggcactaatatgttatgtgaaaaataaatagacttttgtggccaaaagctaagatttgggggttgtttgttatgcagcatggctgcagcaaaagctaactgatacacattatatagatgcaataagtgcagattgtgatgaaactttcatgccatgataaggagttgtgagcaatggggaatcaacagagaagtaaggaaaatcacataacaggttagtctctatgggtcaactgggatttaaagacctggtacttgtactctgtgggccaggcaaattcatccatgttcatggctttaaatgctacttctgtagcattcatcttatctcaaactttgggcatctaattcacatgtttaactgcccaatgggcatctttgttttgaatgtctcaaaggcactgcaaactcaacaagtccaagctagaattatcttatggtggctttccatcacgggtcactgtatgaatgatggtgccactagctgagagagtaagggagaatgaatgtttgggaaggggagagataatgagtttagttccatgctaaatggttcagagcagtccaggaagataaggattagaagttgcattgggtaattaggagattactggaacatactgagagcagttttgatggagtggagggtaggcaagctagattgctgataggtaaggaggacataatgaaaacaatgaggatagtcagctctttctctttttttgagatggagttttgctcttgttgcccaggctggagtgcagtggcatgatctcagctcactgcaacctccgcctcccgggttcaagtgattctcctgcctcaggttcccaagtagctgggattacaggcatccaccaccacgcccagctagttttttgtatttttagtagagatgggatttcaccgtgttgtccaggctggtctcgaactcctgacctcaagtgatccacctgcctcagcctcccaaagtgctgggtttacaggcatgagccaccatgcctggcccaggatagtcaactctttccagaagtttatttgaggtcaggagaggccaggtgtggtggctcacacctgtaatcccagaacttggggaggccaaggtgggcagatcacctgaggtcgggagttcgagaccagcttggccaacaaagtgaaaccccatctctactaaaaatacaaaaattagttgggtgtggtaatcctgtaatcccagctacttgggaggctgaggcatgagaattgcttgaacccgggaggtggagattgcagtgagctgagatggcaccactgcactccagcctgagtgacagagcaaggctctgtctcaaaaaaaaaaaaaaaaaaaaagaatgatgtagatttggtccatgcgctgaaggcaaaggggtcatcacgtagtatgctcaacccaggtttctttcttttctttctttcttcctttatttgtaaaagatgargtcttgctttgttgcccaggctggggtacagtggctattcacagatgtgatctcattaccaatcagcacgggagttttatcctgctccatttccaacctaagtcagtttacccctccttaggcaacctggtggttccccactcccaggagatcaccatattgatgccaaacttagtgcagacacctgatctatctgcatagtacactgcagcccagaactcctgggctcaagtgatcctcccacctcagccccctgagtagctgggatggtaggtgtgagccaccatgcctggcaacccagaattacttctaaaagtcctttcagttctaaaaagaagaagtgaatatctgctgtctaaatctccagccaaagagctgattggctcagcttgtccaaatgtggcgaggagaccacagacctctgtcacgtgcaatcagacccggccatgagagtttccaaggcttgggctttagcagccattatgccagttttcattgccaaacagagtctcaggaggcagaggcagtgatggcagtggggtggagacccattgccttctgttcaaattttgtgccacagggcaaccccacacagacatccacaagagactttgggggtgtgcacgtgcttcctggggttcctctctgaaaccctgtgtggctgacagatatgaatggcagggaaaagcatgggtctaactcagagagtgagtggtctgagatggaggaggagattccagagagagtgagcctagcggctgggtgcggtggttcacgactgtaatcccaggatgctgggaggccaaggcgggcagatcacctgaggtcaggagttcgagaccagcctagtcaacatggcgaaaccccgtctctactgaaaatacaaaaattagctgggcgtggttgtgcgtgcctgtaatctcagctacttgggaggctgaggcagaagaatcacttgaactcgggaggtggaggttgcagtgagctaagattgtgccactgcactccagcctaggcaacaaaacaaggctctgtctcaaaaaaaaaaaaaaaaaaaaaaaaagagagtgagtctaggaagctgaaggaggatggggtatccaggaggatgtggtcaagagggttgaatagtggagaggttgggtagaaaaaaatggatcctggaagacagcggctgacagagatcagaatgggttgacagtaagacccccgagggaaacaaaaataattataaaattattatgataagatttctctacactgatgcatagtttcagaagtaagaccatgtactcatctcacgtgagcctcacaaaagccctgaagttggcagaacagaaatgattttccccattttgcatgtggggaaactgaggcttagagttttaatgtcttgggcgaaaaacctcaaaaattaagtagcagaactgaggcatgaaagccgggtcctgaagccaaacatagggtggcttggagccctcggtgggcacaggtagggaatggaggtagttcacgaggtagcagctgcagtgaccttccctggggcatagcagggctccttcctggctttactcagactgaaatcagccagagagagtgaaaagcaggaaatggaagaggctgggcagagagaggccagatcctgtcctgcaatcagttccttttttttttttctttggagacagagtctcgttccgtcacccaggctggagtgaagtggcgtgattttggctcactgcaacctccacctcccaggttcaagcgattctcctatctcagcctcccaagtacaggcacacgccaccacacccagctaatttttgtatttttagtagagacggggtttccccatgttggccaggctggtctcaaactcgtgacctcaagtgatctgcctgcttcggcctcctaaagtgctgggattacaggtacaagccaccacccggcctcaagattagttcttaataagaatttttcaagccacctctgtctcagtgctctcatcttcaggggggcctgctttaaaagccctgaactcgaccgggcgcggtggctcatgcctgtaatcccagcactttgggaggccgaggcgggcggatcacctgaggtagggagttcaagaccagcctgaccaacatggagaaatccccgtctctactaaaaatataaaattagccaggcgtagtggcccatgcctgtaatcccagctatgagggaggctgaggcaggagaatcacttgaacccgggacgtggaggttgtagtaagccaagatcgtgccattgcactccagcctgggtaacaagagcgaaactccgtctcaaaaataaaataaataaaataaaataaaataaaatacctgaactcggctccccttaggggtgaggcactgaaaagagctctgggctgaatgtgaggtggtcacgtcctaccccgtgctggtgctgctagctatgggtactgtgggaccgtttccccatcagccaaatggtacaaggcccaagtctagccagcttctctctgagcaacgcctgcgatgaaacaaaagcaggaaaaaaaaactctaaacacacaggaaatggatgctccaaccaaaaacctgcaagggaaatgcagctgtttttcccaaagaaatcccaacttgggggcctctcttgccaatttggacaccaggaactgaggcgctagaagaggtacctgttccagagactcatattgtgaatcagatactcattcagcattcactgagctaccacaaatccattcattcatttataaattcacccagaatttactgagcacctactaggtcctgggctagatacctgagatgtcaccatgaacaagatagacacaattcctgcccacatggaggccatagcttagcttgggagacagttgcacatggctgagcatggtggctcacacttgtaatcccactttggaaggcagaggcacgcagatcacttgaggtcaggggttcgagaccaccctggccaacatggtgaaaccccatctctactaaaaatacaaaaattagctagacttggtggtgggagcctgtaatcccagctactcaggaggctgaggcatgagaatcacttgaacccaagaggcagaggttgcagtgagctgagatggcaccactacactctagcctgggtgacagagctagacgccatctcaaaaaaagaaaacaagaaaaaaaaaaaaactaattgcacagtgacagccacaaagaagtgcagagcgtgtataacaggggcctgatcctggccagggaggtggccaggggaaatgacctttccactgagcccttcaggagttatagggggaaccrggtagagagtttcaggcagagggaagaagcaaggagaatcaatcgtcctgctcttcctccagctgttctggaatctagacagccctggtggctggaggggcacagagaaaggagcaagcctagggcgaagggtgatgttggggctggcaacatctgtgagcagagaagcagctgcctgaccttctcctgccccagggaaaccatgagtcctcaagtggcaggccagctgtcctctggaggaattctcctggcatctgtgggaaaagccaagacactttcaaaattaggagtggggtagcttttaaggaggcctggctccccgagagcaaggactgggccggggtttgcttgtggttgcctaaatctctggctgcttatagattggtgtttgatgtagcaaactctgtctgatattggtgtttgatgtagcaaactctgtctgcctatattcaccagagccatgcagagaaagggataattaatatttctatgtgcacatttaatcaagtgcttasgaattcattccagggcatgaaaattcaacataggaagtgctcagaaaatgtttggggcagctacattgagtagcaaatgagaaggcatataggccagaggtcacggttgtatgcaacagagggagatttcagctcactgaggcagaagacacctgtcttggaagggatgttttgttgctgacaacatctttcagaaggctagaaaacaaagctggccagaaccagtaaaggccaggcaataaacacaaggtcttgtataggagctaattctagctcttgctgctgtgagtaacgttgctctagcacctgcctccatgcggcttccttaggttgcagagccactaactggccaggcctaggtcagtcctgcattccaggtgtaagtgaatggacttggggaggatccggcccgttgtgctctggtggtgagtgaggggttgctgatgctaaactgggcagccacaagaccactgatgccaccagagatggggaaccttgtagtgccacagaattctgctggcctaaggagggtcacagggccacagctgagggagggcaaaagccttctggggaggtttcagatgagatcgggtgcattcagagtggtatggccatagactttctggggagctttcagaacagcagcctgacattgagcactttagtgaaactcaaaatccacctgtgtaaaataggttggtttttagagctaagtgtctattgcctggcatgcggtactattgaatggctgtgctgttatcattattattagtagaagtactagtaattccacccagctgttaccacagcagttatgtcctcgagggaaagagaaccaacgcaagaaaatctagagaaattcagcagtaaccacacacattgatacatagaaattcttcgcaagttcctttaaatgtttgcctcctcagtatactgaaacggggatttgatttaccaaaaataatcaaatacgtgaatgagtcaccatcttacagacccttgatacctactgttaaagaaagtagttcttttgcaggagcagacagagcttcttagagatcccagacttccttcactaaggaaggcttagcagaggaagaagaaagttcacactcctgtgactgggggcaaccccaccccacccccaacaaacacacacacatccccaggagagttgggcttcaccaccatactcttccctgccacccgaagaatgcagcttcccacaaacacagaacgcctgctggcagtgttgtgctaggaagtgtttcatgaccagttctttgaaaaatggaagctctggtatgtggtctttgccaatttctatagtgtcaatatttccaccaaggccaatttcaagttaccaccacttgaggagctgggagtaggtgcacagtagcacattgatgtatagtattttccactctgactagatacaatagatgtaagtaacttcaagagtatcaaatgaggctggccacagtggctcacacctgtaatcccagcactttgggaggggatggtttgtgtacgggagtttgagaccagactgggcaacatagtaagacctcacctctaaagaaaataaaggattagctgggcatggtaatgtgcacctgtagtcccagctactggggaggctaaggtgggaggatcgcttgagctcaggagacagaggctgcagtgagcagtgatcatgccactgccctcagcctaggcaacagagtgagaccctgtctcaaaaaaatatatataaaatataataaagtaattaggaagtgatgagtttttatgattacctttgttcctaatacagttcatttaattgtaagtttacataattaaattttttaataaggcctatgtttaacaactgggttaccaaattcttgaaaatttaacatgcaagccagcatgaaccaactccatcacactgctggcttgggggatcccagaaagaggtcagcacaaagaggtcatccctaaatagtgacccctacccctccttatcactttcaagatgtcaacatccttgttttgttttgttttgagacagactctggctctgttgcccaggctgcagtgcagtggtatgatctcagctcactgcaacctctgcctcctgggttcaagcgattctcctgcctcagcctccccagtagctgagattacaggcatgcaccaccatgcctggctaatttttttgctttttgagacagaggctaatttttttgctttttgagacggagtttcactcttgttgcccaggctggaatgcaatggagagaccttggctcactgcaacttccgcctcccgggttcaagcgattctcctgcctcagcctcccaagtagctgggattacaggtgtccaccaccacctggctaattttttgtatttatatgagccaagacagggtttcaccatgttgggcaggctggtctcgaactcctgacctcaggtgatccacctaccttggcctcccaaagtgctgggattacaggtgtgagccaccatgcccaggcccaatatcctttatttgtcttataacccttgcgtttggttcagagctgaatccccagggtttagaacggtgctagcctgcatgtagtaggccctcaatgaacatgaattgattaaatgaagagaggcagaacatggagacttcaagagttcacatcctaacaggctaaggcgggaggattgcttgaggccaggagcttgagactacagtgtgctatgatcatgtctgaatagccactgcactccagcctgagcaatgcagtgagaccctgcctctaaaagaaaactttaaacacacacacacacacatgcacgcacacacgcacacacacacacatccacaacctgcctctggttgagcctgtttctgcatctgtaaaattaggttcccttcagctataaaaagtctatacctggtaggcctggcgcggtggctcacgcctgtaatcccagcactttgggaggctgaggcaggcggatcatctgaggtcaggagttcaagaccagcctcgccaacatggtgaaacaccatctctgctaaaaatacaaaaattagctgggcgtggtggcacgcacctgtaatcccagctacgtgggaggctgaggcaggagaatcgctttaacccaggatgtggaggttgtagtgagctgggatcatgccactgcactccagcctgggtgacagaacgagattccacctcaaaaaaagaaaaaagtctataccttgtaaagacatcctttctgcacagcacggccaaacagagatcctcagtggagcattttcaagggtgggcgctagtgcgctggttcttaggactgtaggtttgattctttagctttttttttttttttttttttttgagacagagtctcactctgtcgccaggctggagtgcagtggcgcgatctcgggtcactgcaacctctgcctcccgggttcaaacgattctcctgactcagcctcctgagtagctgggattacaggtgcgcaccaccaagcccggctaatttttgtatttttagtaaagacaaggtttcatcatgttggtcaggctggtctcgaactcctgacctcatgatctgcccacctcggcctcccaaagtgctgggattaaggtgtgagtcaccgcgcgcagcctgagcctcatctttaactcgtgaggctcaggggcagaggtgggaacagagatcaacccaggacaaacatcttctcctgcatctcactgctgtcctctctgaaaagtcgtcccctctggggcaaactgggaatgggctgaggactcttcctttgctagtgaatctgggtgcagctggtggccttctctgtgtgcccgacaacctggggcaagagccaacccccaaatccatctgctttggggcagcatcgaggatttcctgtctcttcccccagagttttctttcctggctgtgggtggctcaggctggtcttcagattcgttttctgagacgtgtggtgtggacctggtccgaagagcaaataggggtacctgagttctgctcacctcttctgcagatgggcaaaccgggaaaggaaagtcatccagacaccagattaaacaaataatgagacaattatagctcatgtgtactggccatttgtttttactcatgctggacatattctagccactttataaaagccctgccttttatgcagctagaaaagccaggtggtagggattgttatctttctagttttacaagggaggaaactgaggcacaaaaagattaagacatttgtagggccacatggtatgggagagacttgggactgagacacaggcaatgagatggtgcccttcatcacagcagcgtgccacccgcacaaaacaacctcacagagagcagggagccagccccstgtgcagccccctcacccaacagatgggaaaccctggcccagagggttgtggggccttccctaggctcactgggtccagactggagcccaggagtcctgactgctgtcttagtgctctctgcacaccacctggggtccaccatccccaatcaccaggggacctcctgagactgggaacctgttcattgtgcactgcggacctcctacgaatagacccacgtgggcgtggtgtaggtggtccagccagatagcaacagtgtcctcctcccacactgagaaaggtcttggggcatggagttctggcttcagctgtaaagttcaaaaacactgttctcctgtcagatagcccttgcagcagagaaatgggccactcatcagcctctgtcacatttcctgtttgtgagcctggactcaagtggagttttaggtgaagggcaaagggcatggaagcagagccttccttactggaatacaattatcagaggggaaaagagcctagaagtttccacctaaacctttgttttgtggatgtggaaaccgaggcctagagaatgcaagaatctatcctagttcatggtgtgcgcaggaatcacaaatgggtttttggtggtggtggtgttgttgttttgagattatataatcttagaatgggtgagctagcagaaacccaagctgttcctcagtccacttccccatgttccacagatgtgatctgaggaagtgggtgtatgtgggtgcagaggggaggggaccttccccacttccctccttctttgagcctctgtatcttcatgtgtaaaataaagcccaaggccctgctctgctgatcccatacagacatccaccaaaggtctttgtgtgtgctaatcagcgtggatgctagcactgagcgggagtgggctgctggttgtctcccatttttctccagagcccggcctgagtcccaggtttggggaaccttgtcttcaccccactgctttcctatacaccgccatccactcagcactgactacattttggcaactccctctatcccatcaactcaggaagacacgtatttcaaaggaatataatgctagacactttacacgtgacaacacttaaccttcacaacaaccttgcaaaatcctgttcgttcactagttaggacgggatactgaagttctgaaggaggctgcctggggactctgtcacatagccagtggggtgggggactctcgggggattgtcccagctcctcacggttttcctggaggctccattctgtctgcctgccttgtagccagcactgagcagagggcaagggagccagagaaggtaggcccatgtggcctgggaccaaggacaccctggcaggcagacccgttggctgcccttcgaactcgtattcttttaagatttgttcagcatttatctggggtgggaaaatggatttgcaatgaatacaaatcatgagcctcttccagattccaaattccattctacaccggactattttccagaagcagaaggaacagaaattcacagacagagtcactttcccaggggcagtgagttaatgtcctggagaaacactggctgttccttgcttttctgtagctctctgtttctctttagtttgtgtttgagcttttccaagccagacggcttctggggaggctcattagagggtttattttggttctggttttgttttaagttgccttaaatatagacaagaacagctagtcttagagaggaggatcactctgcgtgtcatttattttgactgagcagcttggtgtgtacttcagttggcatccttgaacttagttccttgtattaaataaggaaagtatcgctcacatttacataatagcaacaatgaattatttcagactgtcagtgtcagagaaccaccagatttatttacttaaataactttctgtctggttacaaaagtaatatgttctcattgtagaacatttgaaaaatgtagacagcggygggacctataatcccagtactttgggaggctgaggcaggtggatcacctgaggtcaggagttcgagaccagcctgaccaacatggtgaaaccccgtctctactaaaaatacaaaaattagctgggcatggtagtgggcacctgtaatcccagctacttcagcctgggcgacagagcgagactccatctcaaaaaaaaaagaaaaatgcagaggtagaagagaaaaacagatgactctcccacaatctccttgcctggtgttcaccactgttgccatgtgaatctagttctggccagaatgttttctttttttaattgtcataaaatatacataacatgaaatttactattttaaccctttttacaattttttaatagattcagtgggtacaaatgcagttttgttacatggatatactgcatagtggtgaggtctgggcttttagtgtatccgtcacccaaatagtgaacattgcacccaataggcacaatgagcccaagtctatgctcataaccaccacgttctgcagcccctcaaccaccctgagaggtggggattatgattatcccctttacacagatcaggaagccaaccaaattgctctcttatttgcaagcatcgtcaagtaggactttttctacctctctaaacatgtttaggattaaatgaatagcaacaacttgcaacctttgtgtctgtagcattctttgccaagaacacttaatcctcacacctccacagaggtaagcaggttggagatcgtgaccttcaagtttcccagcaggaagtgacctgggacatgaagccagggctctttacatttggtctgcagctgcctctacaacagtgaggccctataattctccaactcaggatgtggaagatggacagatactgaatgctggctgttatctgatagatccatgggctgttcgggctgtaatgatgagattaatcaactcggggctggacacggtaccaagctcttacctgggcagcctctggacagctttgatcagcaggactccagcccgaggctcatttgctacggttctctggctttcaattaaggaatgaccctaaatgtgtgctcctttgttttgagagtttgaggatgaaagtgtgtcagggaaggaggagggccgtgtttgaattttctagaaattgaattgtctgccttccaggtttgcacactctctgccaagctgtggctgaccagccaggagccttattcatctgatcagtagtgttccctggaggcgcctgggtaggaagaacagcattggctccaacgaaaagaggtcccagctggtgacctcgaatgagtcactgagactctcagagcctctgtatgttgacctttgaaaatagtgaagggccctgtcctaccacttcacaggtgattgtgaygatccattgagataaaagagagaggctgctctgtaaactgtaaagtgggaggcacatgagaccggggatcactgcttgctcatggagaggaccactttatctcatcctagctctttaggtttcgaaatcaattttccttcccttccccactgaccatacataggtccatgaatggcttttaaaattatttttcttttcttttttttgagatagaatctcrctctgtcacccatgctggagtgcagtggagcgatcttggctcactgcaacctcctccccgcctcccggattccaatgattctcctgcctcagcctccagaataactgggactacaacacgtgccaccacacccagctaattttgtaatttttttaaatttatttttttgagatggagttttgctctattgcccgggctggagtgcagtggcacaatcttggctcaccgcaaactccacctcccaggttcaagcaattctcctgcctcagcctcctgagtagctgggattgcaggcgcccactaccatgccctgctaatttttatatttttagtagagacaaagtttcaccatgttggccaggctggtcttgaactcccaacctcaggagatccacccgcctcagcctctcaaagtgctgggattacagacatgagccactgtgcccagccgattttttaattatttttttgagacagggtctcattctgtctcccaggccggagtgcaatggtgcaatattgattccctgcaacctccgcctcctggtctcaagtgatcctctcacctcagtcttctgagtagctggactacaggcacatgccactatgcccagctcatttttacattttttgtggagatgggctgtcactgtattgcctagactggtctccatctcctgggctcaagggatccttctgcctcagcctcccaaagtgctgggattacaggtgtgagccactgtgcctggcctcctagattgttttagcacaacagattgtccctgagcccctcctgaggtgtttgtggtgcctgggattggggaggcagggcccatccaggtcctgtggccctagcggggaaagacagtgcccaggagagctcagctcccagcaggaagatttctgatttctgttactttttattcttttttttttttttgagacagagttccgcttttgttgcccaggctggagtgcaatggcatgatctcggctcactgcaacctctgcctcccaggttcaaggaactctcctgcctcagcctcctgagtagctgggattacaggcatgcaccaccacgcccagctaattttgtatttttagtagagacggggtttctccatgttggtcaggctggtctcgaactcctgacctcaggtgatccaccmgcctcagcctcccaaagtgctgggattacaagtgtgagccaccgtgcctggccactttttattctttttttttttttttttttttttgagacagagtctcactctatctccaggctggagagcagtggcgcaatcttggctcactgcaacctccacctctaggttaaagcaattctcctgtctcagcctcctgagtagctgggattacaagcacatgccaccacacccagctaatttttgtatttttagtagagacggcgtttcaccatgttaggctggtctcaaactgctgacttcaggtgatccacctgcctcagcctcccaaagtgctgggattacaggcatgagccaccgccccctgccagtttggcctatttttgaactttaaataaatggaatcatccagtgtgtaccttttatgctgggtttctttcactcagtgctgtgtgtgtgagattttccttgacgtgagtagctgtagctcgctcattctcattgctctaggtagaatcccattgtgggactaggtgayaatttacctgttctgatgatacgccttgggagagcatctagtttggggtgtgctatgaattttttttttttttttttttttttgagatggtgtcttgctctgtcgcccaggctggagtgcagtggcgcgatctcggctcactgcaagctccgcctcctgggttcaagtgattctcctgcctcagcctcccgagttgctgggactacaggtgcctgccaccacacctgrctaattttctgtatttttagtagagatgggatttcaccgtgttagccaggatgatctcgatctcctgacctcatggtccacccgcctcggcctcccaaagtgctgggattacaggcctgagccactgcacccggccaactatgaatattctaatgcctgtgtcttggtgaacatccacacactttcgtttgggtgtggaactgggagcagaacaataggataggcaggtgggcatctgtttggcttaaatagttagccacaggaaggatttaagcaaggtattaggaagacttctggaccctaaaggttgtggccaaataactcatccccttaagaggcggaagctgtgaaatttccttctggggaacgggaggaagaggctggattaggcactactgagcgaccggggggccagtccttgattccttcctgtctggctttggtcccctgtctttagtctggggtttccagactgtactccctggagatgtctcagccacgtgggaggatgaggaaggggctttgagcatcatttccctgctttagccaaaggactcygtgtgctctgtttcaggtcgtggggattctgagaatgattttgtttgctttttgaaaaagttttagctgtttcgacattggaaaatctaytgcccaccgggcatggtggctcacacctgtaatcccagcactttgggaggctgaggcgggcggatcacgaggtcaagagatcgagaccatcctggccaacgtggtgaaaccctatctctactaaaaatacaaaaaaatcagctgggcgtggtggcatgtgcctgtagtcccagctactcgggaggctgaggcaggagaatcacttgaacccgggaggcggagcttgcagtgagccgagatcacgccactgtactccgccctgggcgacagagtgagactccatctcaaaaaaaaaaaagaaaagaaaagaaaaaaagaaagaaagaaaatccactgcccctaggtcccttccagctgcaagattctattttgggagcaggaggtgggtatgggaagggttaagcattattcagccaaagagcggagttgagccttggtgaccttttaaagttcttgtagtgtgctttgtgctgtgggagatcccgtaacattctataaaaatgtagtgttcaaaccaaacagcgacttctgaagcctaaaagatgtagaggaaggacttaactttgaggaacatttaggtagaatttccaccagtcttgaggactctcaagatagccctttrtccactcctctgtggtgtgtgtgtgtttgtgtgtgtgttttaacgtctccattggctggtggctggtcctaggagcagtcacttgaagttgtttgggtccagaatggtttccatttttatccagtagtgtgtgatgtgggcccccttggtgtccctctcaagggtgggtggtggcctttcctcctcccatactaggcccagtttggaccatggttttgcttggcaaggaggctgggccgctcatggatccagagaggaacatttctgccttggcacacagctctgagtcaacaggcctgataaacagctcgtttcccaaaggcctgcaaggaacaaagcccctggctgctgagggctctgtctactccccatctcctgaaacagctgtttattctttcgacaggagttgaaascagcaccttccctttctctgagtcctgcctccttctgcagaagggagctcaaaagaactttgttgttttgccttttactctggggtgaaagcggcaggaggtatgtgagatggtgaaatgatttgcttctgccatgctggggtcacgggtggatcgccctaaactctcggtggccccctcagtagttttggaagaggaccaagtccttgtctctccagcagtggacctggaagmaggatgccggctcagggacttcactgtaagttcagctttattttgctcccctggyaggacctcacagggctgcagccaagctgcagcctggagtttttcctgaaggatttaagttgttaatgcaggagcagggggcaagtcttggggctcagggtgaagttatggatggaggcagagccctctcagaattgtgtagcatctttcatttatcttactttggttctctgggaaaaacccttgcagtgatttccagaccaggcagcatggaaaagctggctggattcagcctttagatttcccaaaggggattcgagagaaagcactgtaagatatacttcagagaacaggtcgttccatttgagatggctggagcgacagtgggccatgtattcagtctgagacctgtctcttattttcttgtgtctgtttactctgacccttataatgaaaaacaaaactggagacaaccttccatgcacttcccctgcttccccgtgaattgtatcgtggaagcatttccttgtaaracccaccagctcactgaggttttaggataataaggcactcttcctccttacacccagcaccatccctatgccaagggctgggcctgggaggcaggcattttaaatctggcaccaagacttctgggcatgcccagtgatctctggcaagctatgcccctttgctaaagctcagtttcctcagctaaaaaagccacactaaggccaccgcactgaccattgtgaggaataaacaagatgctgtgagtgaggacaccccacaacacgcacacagaaggtgcctggaaatgctaggagagttgagctgatgctcaccagctggtccaaggaagagctggccccacagcaattaacccatgcagaagacttcatgttttctagagcaacagagtggttaaaagagagggcactagagcctggctccctggatttgaaccccaactccaccaccttatgctatgtgacactaggcaagttacttcacctttctgagcctctgttttcatatctgtgaaatggggataataatagagtaacttcactgggttgtcatggggcttaactaagagactcctgaaaaggggtttagcccagggtctggcctggcctggcttgactggggaaaatacaggtgttgcagggtttgaagctgattccatttggggagccctctttaagaagaagaatgggctggccgtggtggttcatgcctgtaaatcccagcactttgggaggctgaggcgagcagatcacgaggtcaggaaatcgagaccatcatggccaacatggtgaaaccccgtctctactaaaaattaaaaaaaaaattagctgggcgtggtggcgggtgcctgtagtcccagctactcgggtggctgaggcaggagaatggcatgaacctgggaggcggagcttgcagtgagctgggattgtgccactgcactccagcctgggtgacagagcaagactccgtctcaaaaaaaaaaaaaaaaaaaaagcaaggttgcaaatgcaatgttaggtatgaaagtaagtatctggaatatgagaagtgatatcacaacaaataacaaagactgacaaacattccaaatataacaaaatccagaaaacaacgacataagaaaatgatgtaaaactaatacaaaaatgattagtattacttaactgtctgatacacctgtcatgtttgggctacatactctttgactgccacattatctgacaacagttttctagaatcatttccaataaaagagaaaagacagataaatcagttttgcctgtggcatggttaatcaatgggtgctttttattactgagagtttagagcaatttattttagcttcccaatttgttattggcgatgccacttctctaagtcatttgacagtttctcaggtggctccagccagatcatgagaaaactcagccctggatccttgctaggcacagtgaggcagacgaacctgggtggagcacgaggtggctgtgagacctggatcatagtgacccctgagcagggagcagagagagtagtgtgtagttcatctccttcttcttgaggccaaaggaggaggggcccaggtgctcaacaaggtccacctgggaccggttgtttctgggacctaggtgggtgtgcaggtaatgggtcagcaccccagctcagcctgcagcccctggacaggcactgaggctagagagtgactctcccaggcaaggcaacactctacctctgggaagcatttggggctttctcatgctcaccctaatgggaaatcaggcccagtcttgcaaaggggcttgtgcacatgaggaccctgacacctaagcgtcattagctcctggtaagtcagcctctgcattcagcgcatattggttggtggttcctatgcatgatctgagccaaaaggctgagaagtgatagttgatgaatcctatcatttgatcatcacaccaaggggcccgtgtaggtcactgcagcagggtgagctctatgtggctaaaagaactgccctcaaaaaatgaggtttacatccctgaggctgatttctcatgcacatcctgggttcatcagagaagaactggggattactggggaatcttagctccaaaggacttgtttctgggccaaggagtctgaggccagagaaactcgtgacgccagtttrgaaagctggcactgtgttggtgctggggctgacctgcaggactatgacaaggctggggacagggtgaggcaggggtggagcaaggaggtggggtggggtgcaaatggaggtgcagctggtctggtcagagccgtgttcctgggatagagcagggcatggagctgactttatcacaacatgcagttggcgtgtggactcgctcctgactgttctgagagatgctgcccatcaagattcccctctcagatgaactcacagccctgctttcacaccaagctctgagccatgcatttctgaatttctcccattaaaaagcatcatcattattataggtactgtgtggggggcattaacagaccatgggcacagtatgctttcaagaaccctttgaggagggtgttagaatctccattttgtatatgtaaatagaggctcagagtgttaaagtaactggcctaaggtgtacatctaggactctgctgatttaagagtctttgctcttagcctaatttttacctggaatgctggagctgaacactctcctttataatcaaggatctggaggactwaagactagagtcttgtccaaggtcagtaatacccagttaattactgcacccttccccattcccttacctgttttccttctctttgttcactgtcactacctgacattatatatcctgttgagtctcttgactcccattggaacagaagctctatgataatcttgttcagtaaagcatctccagttccaaaaaccatctggagcacagtagcctagtccatgtttgttaatgaatccatggcagagcagaactggagtgcctcagaactctccttactcatttgttcaccccaaacacttgtgttacaggaagggggtctggatccagaccccaagagagggttcttggatttcactcaagaaagaattgagggtgaatctgtaaagtgaaagcaagtttattaggagagtagaggaataaaagaatggctgctccataggcagagcagccctgaggactgctggttgcccatttttatggttatttcttgatgacatgctaaacaaggggtggattattcatggctcccctttttagaccatatagggtaacttcctgacattgccatggtatttgtaaactgtcatggtgctggtgggagtgtagcagtgaggaggaccagaggtcactctcatcgccatcttggtttggtgggtttcagccggcttctttaccgcaaactgttttaccagcaaggtctttatgacatgtatcttgtgctggtttccggtttcatcctgtgacttagaatgccttaaccatctgggaatgcagcccagtgggtctcagccttattttacccagctcccattcaagatggagttgctgtggttcaaacggctctgacacttgggatgctcctactgggagccagggcctgtgccagtctggacccatcacaatagcctgaaagtgattaaggctcaagcggaggacgggtgggctctaggggcctgatgtaggaatctcaggctgggaggagaattctttagcctgcagagaggtggagcctgcggagaaggcttggtttctcctgccaccactttcaccctgccggattcctgctctctgagataatggcttttccatggcatctgagtgcatggcattcagctgagaggttcaccttttcccctggcacgagatggagaagataggatctgctagaattcctttcagagtggaattctgtttggaacgaattaccttgacttcgccctgttggggtggaactgtgagattctcagagggtgtgtgtgttgttctgtgtgagaaggattggaggtgggtggtagggaagaattcacttataggccatatggaaaagtctgtctgacactacaaggaaacagaagcggaaaaggaggagggtgagggtagagtgaggaaggtggagaaatgacaggctgtacaatgtgaccctgccttgcaaaatgcctctatatttttagcataatctgcacacgttccaggaatgggggtgagagtgcttgcatttgggaagcagtgcaggcgctgagttctggttaactgagttctacaaatggtctggggccataggatggattcagagagaaagtataagagtattaaggcagagggtctgagagatggcaggagggctctggaccattgcaggctgtgcaactggggctggccaagttcacccagtcctctgaggggtgggacccaggggacatcagggttccactctcccacttaagacagggtgttaatacttggaaggtcctaattctgtgctccaccccttgaaaggagaattttagaactttcttttcttttctttctttctttcctttcttttctttctttccttgtttctttctttctttcttttctctctctctctctctccctccctccctccctctctctctctctctctccttctctctttctctctttctttcttgcaggatctcactctgtcgcccaggctgcagtgcagtggcttgatcacggctcactgcagcctggaccttcccaagctctagtgatcctcctacctcagcttccccaatagctgggactacaggtatgcaccatcacacccagctactttttgtagagagggggtttccccatgttgcccaggctrgtctcgaactcctgggctcaagcaatctgcccatcttggcctcccaaagtgctgggattacaagcatgagctactgtgmctggcccaaacccatgtttcttactggtgggtaggacagtgaaccaccagtcttcagaattacacagttgaaaattcagagagacaaacacacaagggaagaacttttagaccacaatggctgccaaatgcctcatttttttgtccagagagaaaaataaaaatgttttaaaagacccattggccaccctgccaacctttcctccctggaggcttggattccagattccaggaagcatgtcaccgcctatttgtagtgctttgctgaaggatgcaaaattggctcgttcggacggcttccaattctaagtcttttttttttttttttttgagatggagtcttgctctgtcacctaggccggagtgcagtggcatgatctttgctcactgcagcctctgcctcccgggttcaagtgattctcctgcctcagcctcccaagtagccggtattacaggcatgtgccgcaacacccagctaatttttgtatttttagtagagaaggggttttgccatgttggccaggctggtctcgaactcctgacctcaagtgatccgcccacctcagcctcccaaagtgctgagattacaggtttgcacccggtcatccaattgtaagtcttaaacaagagtaacgattgaccacagcaaaaaagcaggcagattcaagccatagataagctccagaaagaagtgggcttcaagagttgcttctgatgctaatttttggaataaaaaaaaatcataaacatctctgtatttggagcggggatttggaggtatgtctgattcgggctatccctgatgtaagcgcyaatgtttccaaccgtgagagttttcacctttctctgcctaacgttccttacaatttgcatttgatcctcagcaggtggggttggcaaggcttgggacacacagccagcctctctgttgcctcctcggcacacatagggggttgtagcagcgcctgaggcttgatcaaagagaatcaaagtcacatcccacttctgaggcatccttaatcaggctatgacacagaacagatgggtaaacctttagagtccttcatttgcatttatttgcacttcattgtataacatgttcttattccaaatccctcctttctttccttcaaatctgttttgagcacttgctaaataccaggcactgtgctatctcattgcatcctcccaacagcctgttttatggctatcagtaataagaactagtggacttttttttttcttctgcatttatacgatgccaggcacagtgctaagtattttatgggcaacattatctcttgtaatcatcactattaatttaatgtgatccagtagaggtccacaatcccttatctgaaaccctggggccagatgtgttggaattcagaattttttggacatggattatgtatcatatataacattcctggtgcagcagcaccacataataaaatacatcaatatttatgcatagaaatgtttaaacagcctcactcagtgggataaagattataaatggcctcatgtcagttagggccttgatgccaattgaattacaaaaaggtgttgggttttcagagctttctggagttgttgatgagggccactgctcagggttacccagcttcatttgtcaaagttgagactcacatccccacatcactccaaagcctgtggctaccaccatccccacttctctggaagtgaggacatcggcacagagaggtggccacagccttaggtttttgcacccgaaactaagacttttccagcactcaatgctggtgcttcggatgcagactctagtgacttttctcagcagtgggggatgagttgcctgcagccatctgccttttctgactttgccacgggtctggggctgtatgtgctggctcatatggtayttagagggaagaggcctgagactatctttacccagcaaactcgtcatctcagggtctgtggaatactgcccatcacagttgtgtggaaagctggaagttgggttataacattgaattcagcccagcttttttgtttccaaacagagctcactttctgaagatcccactctttctcttctttaactggatttcataataaagggtttgtaagatatgagatctgagtctggaatcatctaagaaatctctttgaaaagaattggaaaatgacctgtgtccagagaacaaatttaagtatcattcttatttgatttcattcactcagcaaacattaatggagtgcctcgtgtactctatgtgaggcactggggattcagggttgaataaaacacacctcctgcactcaggaagctcacagactaactgataccggaggcagagccacctccaaaaacaacatgtacagcaacgtgaatagacagggggagcccaagaagagaagggggactcagctgctgggtgggcaggggtgggatgtggtttcacaaagcaatgacatttggtgtgtggctggccactgtctcctcttagcttccagaggtccacagtcttggttttcttcctccctcccgggtttcttctcaatcctacttcaaaatgttgacattttcaggcttcagcccagggccggcttctttccttttcctctctctacattctctcacaaggtaaccttgtaaccgcccaaggggttcaccttgcccgctgcctagacagagctgatttatcaagacaggggaattgcaaaggagaaaagagtaattcacacagagcccgctatgcgggagactgaagttttattattactcaaatcagtctccctgaaaatcttatgacctccagaataatggctggtaatatttagaattccagcccctctcattctaacttggtggctggtggccttcattcattttacaagaacagtttagcttttgggaagggctattatttaaactataaactaaatyccttcccaaggctaattaagcctacrcccaggaatggatgacaggttagaggttaggagcaagatggaattggttaggtctgatgtctttcactgtcataatttatttagttataattttgcaaagacagttacagcctcattcatttccttcacattaactaccttccatatgtgaacaactcttccaactgcatgtctagcccatatctctgttgaacttcagacttgaatgtctgtttgcctcttgtcatctccatttaggagtgtgtagacacctcaaaattaacatattcaagtgggaactcatgattcttacccctcaaaccaattcctsttccatccaacacatctcagaaaatkytacaattgtccacctgactgcttagacagaaaccttgtttctttcttctcccttgtccctgacacctacatgaccagccaaatcctatcaattctcttgccaaggtatattttgattaatctaccactttccatctctctacctactttttaacacaggccactgttatgtattcttttatgtgatggtcagtccagtgtgatcacaagaggagacacaggaaaagctcaggaaaaaacaatgtttattatgctcacgggtcccaaagacaggaggcatagcacaccatatgggaccacatgggaccacatgggaaagacacaagggtggtcaggagacagaagacaggcagcaaggggaagactgaggccagagcccttattgaggtttccatgggaaagacagtgcagggtgaacagtttaggatggrctagtttgagtaatttcagagggctttaggctgtagggatggcccctagttgtccsgtacctggccctgatgggatgcttaaggccaagtcatattgcctcctggggtgtgcagggcaggtgaagatctacagctcaggattggttcatttgtatatcaaaggcatgcttctagctgagccctggctatctctaagaactggctagtcatagaagaggacattatctcctcagccagagaggtttttgaagatgtgaaaacatcataacatatagccaagaaaaaaacatgtatgcaatacagccaccccttcgttttggccatcagagtagtctgccacctcattctccacgctgctgtcagctctgatcyaccctccacaccccagcacacaggcaggcatctctgcatgaagttaaatctggttattctctggcttccaaggtgcttgtggctccctttcctccctcccatgcctttcatcgtctatttgccctgtccgccatcctgttgccaactagcacccctccttggatccagccatgctgaggtgacagtatttttcttctttaatgctgtctgtttaaatacaagaagttttttcacctgtcagcctgttacatatgctgctcccaaaatagtctcattccttcttatggtgcttttcatccttttccatccctctttatcccttgggactcgactttacttttacctacacagtgagccttccctgatcacccacattaaagtacttcctggcctgttattcttcacacagcacccctgcttttttaagcagtttcacgcagcgatcagggaatatctatgcacctgctgtgtaccattttttttgcttgcctgtgagtgtgatgaggctacgctgggggtagctgggaagtggatggggcctagcttgtaaacccagggtcattttctcctctgagcaagggaatgtgttatcactataccaagggcatggaggttggggatggggtggctcctcacagtcacgagataaaaggtggggcgatcagacttgggaggcaactggagtccctgggaaccatgtacagctacttccattgtctcctacatccatggcagatagggatacctcccctctgagccccagtgtggccttagcacccttgccaatgsaggcagcctcctctattaaccaaattggcatgatctgccactgcaggtctatgcaatttaaggtagaacagactcctcagctctagttagatcatcctaaatgtatccttttagaaagaattaggtgggcatgtaaattagttcaaccattgtggaagacagtgtggcgattcctcagggatctagaaccagaaataccagttgacttagcaatcctattactgggtatatacctaaaggattataaatcattctattataaagatacatgcacacatgtgtttattgcagcactattcactatagcaaagacttgaaatcaacccaaatgcccatcaatgatagactggataaagaaaatgtggcacatatacaccatagaatactatgcagccataaaaaaggatgagttcatgtcctttgctgggacatggatgaagctggaaaccatcattctcagcaaactaacacaggaacagaaaaccaaacacckcatgttctcactcgtaagtgggaggtgaactatgagaacacctggacacagggaggggaacatcgcacaccrgggcctgtcaggggatggggggctaggggagggatatcattaggagaaatacctaatgtagatgatgggttgctgggtgcaccaccatggcacgtgtatacctatgtaacaaacctgcacgttctgcacatgtatcccagaacttaaagtatagtagtaattttaaaaaagaacggggtaaaagcattttttaaaaactgcctcttgaagttcattgatttaatctgttctctttttttctcccctcttcttttttcctaggagaaaataatgaatgtcaaaggaaaagtaattctgtcaatgctggttgtctcaactgtgatcattgtgttttgggaatttatcaacaggtaattatgaaacatgatgaagtgatgtggatgaaaatactgctttgattctatcctactagtatcatccaagttgccaggctgaattgaaattaggattaactaaaaccataaataagggattccacccttcctgaattcctaagccctggactgtctttaaaatcattagctctcccaagtgacttctggctaactacttatcttccttcctgccttgttcctaatatcataatttttgtaacagtaggctagatccagagaaaatgagatcaaaytaggcccaatgtaattttaaataacttggataatcaaatatggaaattaccttaagaaatttcagacaggaattccatgagaaatccaccctgaattttgaaatcctgaaatatttgcagagtttaaaggagcaacttaagttgttgaattttgctgcaaaatacatactgaattgctagtgattcatttgtgcctggctaaaatctttgagagagagagagagtgtgtgtgggtgtgtgtgtgtgtttaactttgaaaagcaaaatgaattaagcatttctaagttttcaaattcatctatggattcaccccaaatatatgagctacctctgtgccttttgaaactacaatgcctggccattccagctggagaggcttctgactgaagtcttcacaagcagccacagaaatgcctgatgcctttgactcaaaagactggaaaagctcagccttaaggttcaaaaaatctactgtacaattgagttgtacagagctattttggtaccattaatattttcatagcggagtgtttcagtggcccccaagttcaagatggtagcctggattaacattcgaatatctcttttgattcttttttttttttttttttgagacagagtctctctcttgtcacctaggctggaacacagtggcatgatctcgactcactgcaacatctgccttccaggttcaagcaattctcctgcctcagcctcctgagtagctgtgattacaggcgtgtattaccacgcccagctaatttttgtatttttagtggagacagggtttcaccatgttggccaggctggtcttgaactcctgacctcaaatgatccacctgcctcggcctcccaaagtgctgggattacaggcgtgagccaccatgcccggcctcttttgattcttaaattctaagatttgatgatctaggaggactgtcttggttactaaaaatggaaccgtgcctttaggtgcatcagtagcagaagaactctccgaatgctggagccattagtccctgtggtgctgcacagatgtaaccatttctggaatgttgctttgtttcattctgcacaactcattttaagaaaaacatgacaaactagagtgtgaccaagttaaaagggtctggaaactaggtcttttgaattgagaaaactgaggggatttagttcaaagaagagatgactcagagttttgtgtggggaccctggaactctcttaggcaactgagggctgaggacgtttcccactcagactctagagctaggctgctccttgggcaagttgctcagccactctgttcttgtttagtttccctatctttaaaaattggggataataggctgggcatggtggctcacacctgtaatcccaacactttgggaggccaaggaggacagattgcttgaacccaggagttcaagaccagccctggcaaaatcgcaagaccctgtctctacaaaagtaaaattaaaaagttagccaggcatggtggtgcgcacctgtagtctcagctacttacgacgctgaggtgggaggatcacttgagcctgrgaggttgaggctgcagtgagctgtggtcctgccactgcactccagcctgggtgacagagtaaggcactgtctcaaaaaaaaagttgggggaggkattataatagtacctgcctcatagggttgttgggagaattaaataagttattgtgtataaagcactgggaagcaatgcctagggcttaataaacaataaatgctagctgtcatcctcctcctcctcttcctcatcatcattttagttcaggccactataacaaagtaccacaaggtggtttaagcaacaggaatttaattctttcagttctagaggctggggagtccaagatccccagtgagggctcttcctggctggcagatggccacctcctccctgtatccacacgtgatggagagcaagtaagctactgcctcttcctcttcttgtaaggacactaattccttcatgggggtcctactcccacgacctcatctaaacctaattacgtcccaaaagccccacctccaaatatcatcgcactgagggcagggcctccacatacgaattttgaagagatacaacattcacttcgtaacagtcatcatcatcatgatctgctccagagggcagaacaagaaagattttggtaaatagaagagctctagcagttggaagagtccaacagaagaacaagtaccctttgggkttcctgcctggagtcggaatgtctgcttggataaccttcaagctctgagtttgaacacttgatcagataactttggtgtttggaattgtagccagagttgtacgtgcataactgagccaaaggctgaaacgtgcatgtatataccagcctctctgggcacactctctctgcatggtagccagagcaggttctggctgctcttcaggctaatcgtctggcacctggactctggccacaacatcctctgatgtgcagaatccacttgaacatctgcaaaaaacttcaaggggaggagttgttttttgtttttttgtttttgtttgttttgtttttttgccactttacgaattggccacatgataggttgaggtgagccgaggacacaaaccttacacaggtaggcagcactaagctaaaatggattaaaaataactaactcaagcatgtcaaccaattagtaaatagaagaattgtcagtaaagcgtattgaaagaatatcatctaggatagcatttgatttcaggctggatgaaaaaataatcttcgaattttagagaattagaggaagccttcaaaattatgatgaaatattcatgatagtggtgatcatgatgggaactacaagttattgagggcatgtgccaggacccttgctatgcattacctccgattctttttgttttgttttgtttttgtttttgtttttgttttgagatggagtctcagtactttggaaggctgatgcaggcacatcacttgaggtcaggagttcgagatcagcctgaccaacgtggtgaaaccccgtctctactaaaaatacaaaaattagccaggcatggtggtgtgtgcctgtagccccagctactcaggaggcttaggcaggagaattgcttgaacccaggaggcagaggttgctgtgagccaagatcgtgccactgcactttagcctgggcaacagagcaagactccatctcaaaaaaaaaaaaaaaaaaaaaacctcaaggaggcaaaaattatgtttggcttggaggaggatccattgttctgcatccattcacaaatatttattgagtatccactatgtaccaggcactgtgctaggatcatatcaagcaaggcattgaaaaggtggcatttgagtggaggcttaaagcatgaatacatgtttaaaagccactgcaatgtggatattgctgtgaccattgtgctgttgaaggattctggagaggagggtaaggagaagggttgttgaggagatatgaaaagttggtgaacctgaatctataaatccatggcctgagtgccaggtagggttatgcgtgctaggctgcagcacttgtaggggcttaagagtctcactgccttcattagttaaagaaatgcttttgggggctgttctatagaaggctctgagttggccatggcattaggctctgcagttgatgctttttttttctggaggaagataaatcctgggggaaggatgtctgggccacggcatttccgtcctttcagggccttcgtcatcaccaggcacctgagtaggtggcaggagaggacccatctctgcaatggagagctgtcttctttttaaaagagcaaacaaacaaacaaaaacaaaacagaatttgaggccaggagtgatgactcacacctgtaatcccagcactttgggaggccaacgggggtggatctcttgactcaggagtttgagaccagcctgggcaacgtgacaaaaccccgtctctacaatacacacacacaaacacacaatttgagattttgcagaaaactgtttccccttgagatcctgaagtggaaatttccatcctcctgatgtcattggttatgtctcaaaggaaggtagaaaccaggaagcagctaaaacccaggctcttagctcagccccgggctcagtgataatggttacaaaatcgcctttctcagaattaaaagtaacatgatatgtttttatttcttttttgcttttagcacagaaggctctttcttgtggatatatcactcaaagtaagtgctttgaattctagatttctaggggatgtttcccacagccactctggcaccccctacagtccattcttcacacggcagccagccayggtgttcggccaaagtcggaggggtgggtgggtggattcctggggatctggaatgttatttctgcagcttccgtagacttawctgtatagaaccatggcttgtatcttgccctcagttctcctcaaagttctcttaagcagtgtcatttggggaacattcctgtcttgctgataaaaagtatccggggagatattgtctattattctgccctttaaatgttatataaagacccatataagaaattgctctaagaataaaaatcaggaaaaaaatttgagcctcttgagaaactagtgtgtatcattaaaattttctttttgtattttttgaaaagaaaatgagagccatgtaaacctttatatttccaatggttgggttggttgtcagaaagctcagaacaaagtattgcacttaactgcttgtacttaccccagccttcatttctgatatactttatcccctggtgtgaaatcccggcttttgtgcccacatgtcatgtgcccttggaaatttgctgaaatccacccagccagtatctcagctctgaaatgaaagtaaaggtgaaacttttctttgggatgactgaggtcatgtgaaaatatatacctgggtgacgaaatcaatgtatctctttctgttctctcttgtgttttttattcttgtgttgtttttctgtttattgtacctacgtattggaagccatctcaaacacttccaagagttaataggctttaaaacagatttcataatattatgcctgttcatgagttagctcaccaccgtatttgtccatcggactttcctctttccccatcctccagaaggcacccaccttttcttttctttcttttctttttatttttttttaattttctgagacggagtcttgctctgttgcccaggctggagtgcagtggtgccatcttggctcacggcaacctccttctcctgggttcaagcaatcctcccgcctcagcctcttgagtagctgggattataggcacctgccaccacgcccggctaattttttgtgtttttggtagagatggggtttcactgtgttggccaggctggtcttgaacgcctgacctcaggtgaccagctggcctttgcctcccaaagtattgggattacaggcgtgagccaccgtgcccgaccccccaccttgaagagactttcacaatgaatgagtgtggaaactttctcaaatgggtggctacagtggcttctaagtagtttcctgaacttcttgctcagtgaccctcagatttcctgaggctgttactgctaacctttgggcaacccaaatttttctctagacttttacaacaatctgaattctgctggttttagctaaagaaacatggaaacatgcatcggtttttcatgaagcgtataacttgttacagtcattttcaactcataaagctcttatatgtatgctatttcattcagtcttcaaaattaccttcatggtaggtctgttattagtactattaactatactttttggaggagaaagtcaaaattcagagagggaaaatgtcctatcacagtcacacagctagtaagtggcagatctagaactcaggtttatgcattaataccacccccactccagcccccttttcccttctcttcctctagggcccccaggatgagctgagggctgggggctacccaagggaggagagattgagggagtctcaggtctgttctctctcattcagctagagtgtctcatttctgtctgttttataaattggcattttaagkttttttatttttttaaagtaatctcggctatagaaagaatttggaaaccctaagtttggggacaccacattttctaaaaatatttgtaaactttttcatttcttagaaacccagaagttgatgacagcagtgctcagaagggctggtggtttctgagctggtttaacaatgggtaaggcgatcagacagcagtcggtgtttgcccacccgcctggtgcttgcagagggtccacacacaatggtttcatgttcatgaccttctcagtcactcatctttcttgcttattgaaattatatgaagaatattttgtgagtgggactaggacatttgagggttggttttgtttttgagacagggtctcactgtcactcaggctggagtgcagtggtgcaaacatagctcactgcagcttcaaactcttgggctcaagtgatcctcctgcctcagcctcacgagtagctagactacagacatgcactaccacatccagataaataagtcttttgttttgttttgtttcagttaacttgggggctgaggcttgggctgaagtttatttatttatttttatttttttgagatgcagttttgctcttattgcccaggctggagtgcagtggcgtggtctcggctcactacaacctccacctccttggttcaagtgatcctcctgcctcagcctcccaagtagctgggattacaggcgcccgccaccacactcggctaatttttgtatttttagtagagacagggtttcaccacgttggccaggctggtctctaactcctgacaggtgatctgcccaccttggcctcccaaattgctgagattataggcgtgatccaccatgcctggcctgggctaaagtttagattgcaggaaagacaatcataaactaaaatgttcttagaagaattgtcttatcaagtttccctcaccccccctgaaataacctgagggttgctgggtcattaaattgttaactgtggtgacttggaagggtaatgagttgagtactgcatcttttcatcaaaaatatgtctttatgaataaacgcttagtgcctagagcctttttctggtcagttcacttagtgcatgcataatctgccttggaacacatttccacaagatattcaccagttctctgaccaccgcaatcaccttccctgccttacctggtttactttccctttgtacttaggatccacaattatcaacaaggggaagaagacatagacaaagaaaaaggaagagaggagaccaaaggaaggaaaatgacacaacagagcttcggctatgggactggtttaatccaaagtaagaaaagcggcgtcactccctgtgcagcaaatccatggccctgcagggggtggtgtggcagtggaggcaacagtgccattgagaacattcctgatttaggagaaagagcctyagcatattagacctttaacagtagacatatgtatatgtgcatctatttgattgtgatgtaaagtatatttctcactgtgagttatggtcaaaaacactgtgctaggcattgtgttagggagaggagacaggagaaatcaatcaacatggttgtatttgagaagttcatggtctcacaggggtcgttactgtgaaactattatttgcctagattggtaggaggcaggatcaactrgaaggatgtggttctgggagtgaggagatgggagctgtccagggtgactttgagacctgagagactggtgggtgatggtgccattggccagaaaggggactggaggaggagacacaggcctcagagctgggggaggtggggacctccattaggaatgcatgtggatgcaggtgcttatgggacatctggacagagtcacagggtgctcctgagcttagcagatggtatgtgctggagatgtgcaatgaggtatcatcagagtaatcaggagagaatggaatccttttttttcatttgatttttaatttttattcattttgagacaggatcttgctctgtcacccaggctggagcgcagtggtgcaatcgtggctcactgcagccttgacctcccaggcttagcctcctgagtaaggaggcttggtgtgcgccaccacggccagctaatttttaattcttttgtagagacagggtcttactatgttgtccaggttgctcttgaactcctgggcttaagtgatcctcccaccttggcctcccaaagtgctgggattacaggtgtgagccaccaygcccagcctgaaaatagcatctatcccattgtgaaggagcttgggctctggaaagactgaatatgttctggcaacttctcttattgtttggggataagggatccatgccagtgtggagggatgggaattttggcttcccatatgtcatttgatgatctgcacaacagggtaggcatctctgaaatgctaaaccactcatagaaatgtgagaagatggaagcattgttgctttgataaagccccttagatggggcaatgagactccgccagggacaggctagatgggccagagatggtccccaaagtcccttctaaggagaatggggcaattttactgtggtacttgttctttgctgagcaggacttgggaggtggggctggggctgaatgactgggggcagagaggagggacagaccatagtcaccagctttcaccctcttcactcttccccttgcatggcttcatctccaaatgagtagggagcagatatttatttttaatttatcttatcttatcctttatttatttatttatttatttatttatttatttatttgagacagggtctcattctgccaccaggctggagggcagtggcacaatcatggctcactgtagcctccacctcccaggctcaagtgatcctcccgcctcagcctcccaagcagctgggactacaggcatgcgccaccacgcctggctaatttttgtattttttgtagaaacggggtcttgccatgttgcccaggctggtcttgaactcctggtttcaagtgatcccctgcctcggcctcccaaagtgctaggattacaggcatgagccactgcttctggacacaagcagattatttaaagaatgttggtttgaagtggcaccaaatttaagtcttctcagggcatctaagtctatttcttgcataaatgaatgattggatgaaggaatggatgagcaaataaacatactttgtataaatgtatcctttttggctcacgcctgtaatcctagcactttgggaggccgagacaggtggattgcctgagctcaggagttcaagaacagcctgggcaacatggtgaaaccccgtctctactgcaaaacaaaaaatcagctgggagtggttgtgggtgcctgtaatctcagctactcaggaggctgaggtatgagaattgcttgaacccaggaggcagaggttgcagtgagccaagatcatgccactgcactccagcctgggcaacaaagcgaaactctgtctcaaaaaaaaaaaaaaaagtatccttttctgtaaactacctaaaaccacagtatattgtgcatatttccatatcaaggtcgctttgcttccatgacaccacatcctcatttgtgaccgtctcccgagaggggcagctccctcttcccagctgtcagggattagagtttatgggagctaagtccagcaacctcttctctgttctttatatactgtttttttttttttttttaagatggattctcgctttgttgcccaggctggagtgcagtggcgcaatctcggctcactgcaagctctgcctcccgggttcatgccattctcctgcctcagcctcccgagtagctgggactacaggcgcccgccactgcacccggctaatttttttgtatttttattagagacggggtttcatcgtgttagccagggcggtctcaatctcctgacctggtgatccacctgcctcagcctcccaaagtgctgggattacgggcgtgagccaccacgcccggcttatacaccattttccaatgtgctctcatccattttcatggcattaggtaccattagtgagattagataccatcctacatttaaatctttagcccagattttgcctttgagctgtgacttgtgtctacctgtctgcctgacatctctgcatgtctcacatggccagaatggatttctcaattccaccccacccttgttctcctcatttcccatcccagtaaatggctcaagacacacagtctgggagaccttttcctctgtctacctcatggtctaatgcattagcatgttctgtcaattcctcctccgaaatcctttctacttcatccccttctctccactcgacagccgctatgccatccctgttcatgttgccatcagcttttctctgtgtccttgtttagccaacctactcctgcttagagggaattcagtcaataatgagttgtgttggacgcagtggctcatgcctgtaattccagcactttgggaggctgaggcaggaggattgcttgtgtccagaagttcaagactagcctgggcaacttagtgaaaccctgtctcttcaaaaaaataaaaaattagctagatgcagtggcgcatgtctgtagtcccagctactcaggaggctaaggtgggaggatcacctatattccacatctttttttaacctactccatgattcatagaattttaatgcttccggctgggcatggtagctcacgcctgtaatcccagcactttgggaggccaaggtgggtggatcacctgaggtcgggagttcgagaccagcctgaccaacgtgccaaacccagtctttactaaaaatacaaaattagccaggtgtggtgacccatgcctgtaatcccagctactcaggaggctgaggcaggagaatcacttgaacccaggaggcagaggttgcagtaagccaagatctcaccattgcactccagctgggcaacaagagccaaactccgtctgaaaaaaaaaaagaattttaactcttcttctacccaccccttgggtaccaaaatgtgccataaataaatatataaaatttaaaagctgccaataacctaggaaggtgtgtgctttggttagggggcccttttattttgggggaagcttttgtggaacttctcacactggcatcacaccattgcatgtcctacgtggaaggaaagcatctgagcagctctttcctggcactttttcctttctttttagtgccccatctttgtgatcttggacttctctggcagttgacattatcaaagactagcttttcacatgtgtgagctgccctccgtcacttcttttttggggggttttgtgggttttgatgactaagactccttgatgcagcggttcatccaggaagctgatcttgatctcattctccctccgcccccatctccccagctgcctgcattttcaggctgttgtgtggctttgtagtcagggtcactgacctgttggaattgtcagtggaatcaaataattaacagctgggaaatagaatattttaatttttaattcaacataaatttttaatgttgctrttttttcttccagcttgaaggaatccgaataactaaactggactctggttttctgactcagtccttctagaagacctggactgagagatcatgcggttaaggagtgtgtaacaggcggaccacctgttgggactgcgagattctcaaggggaaggactgggtctcatttctcccatctcagcgcttagcaggatgacctggtatagagcagggaactgggaaatgtgggtcaggggatcagacactccagttgggtcttttatataaattaaatggcaaaaggctccatacccttctccttctttcctaccctccactttatctgcaaaatgggaatgatgataacacccacttcatagaatggtcatgaagatcaaatgagagaataaaagtcaagcacttagcctctggtgcacaataagtattaaataagtatacctattcctccttttccttttttaaaaataatattaccaaatgtccagcttatacacatttacaagacttagctagtgggctatgttagagctactaaaagatctttgacaagctaaaactaagatgcaatgaatgaggtgtaacgaacaagagagttttaagttcagaaatggttacagaagtataagacagctgtgtgggtgttttttgrtttttggtttctggtttacaatctcgtcattcaacaaagatgggagttttatagaactaaaagcaccatgtaagctactaaaaacaacaacaaaaaaggctcatcatttctcagtctgaattgacaaaaatgccaatgcaaataaaaatgattactttttattttatattgtttgtttatttatttatttcgagatggagtttcactcttgttgccctggctggagtgcagtggcgcgatcttggctcactgcaacctccgcctcctgggttcaagcaattctcctgcctcagcctcccaagtagctgggattacaggtgtgcaccaccacgcctggctaattttgtatttttttagtagagacagggtttcaccatgttggctaggctggtcttgaactcctgatctcaaatgatccacccgccttggcctcctaaaatgctgggattgcaggcatgagccaccgcgccyggcttattttttaagtggaaatagggttacctttagatctggacaaacctgggttttaaccccaacttcatcagcagaggaatgaaaaggcatataagaaatagtgtacgtggtagctcagctcagagcatggactccagagtcagcagatcttgtttaaatcccagctttaacccctaccagctgtgcaacctcaggcaagttgtttgacttatctgtgctagtttcttcattgataaaatgggaatcaaaatagcacctacctcagaagggtgagtgagccctttgcacagtgcgtggtcccaaaggaattgctcagtgtgtgttagcttgcatcattagtgaccaggtgtttggccttggacaagataataagctgctctgagacttggttttcttacctggaccatggacatgatacattgcagggctgttgcagagactaaatgagaaagtgtacgtggtgggtgcctggcacaggttggtgcagagtgcacagtagcttctttcatgattgaaggaaaccaagggcaactgtgtcctccatgcagcaggcgtacctggggtgctgagggcagagctaagtcttagagtttgagactccagacaagatgtggtgaaccaggagagcaccctgaaagtgtttcccctgtctgccatctggacaaacctggagcaatttcagcawtgggggtgaaatgtaggaagcaggccagttccagctgtggtggaatctgggaagcagaccagatgtcatgcctgcggctggggtgggagggcagagtcagctcaagaactacagggtgcagcgtttggggacaagggacgggaggcccgagaggagagtctactgaggccccttttccactctgaggctgggatgaggcaggggatgacccagctgtactatcagcctcgctgtgggaaaaacccaactttgctgatgggtagggcggttctgtgaaaacccaggcctccactggccatgctggcccgacgtatttgctaacgtctccttgacagcctcaccaggaccacggcagtgcagccagtagggatcaccaggactttgccccaatcacttgccttcctggggttgaactaagatgctgcccacagtgaatccagtaaagtacaagcaaatgccaagcagggtgccaggcccatactggggtttgaatctaaatgacctgtgccagtctctgcttcccaacggggaaaatgcagccacctcctgagccaatagggagtcagagcctccccctgcctggagctttcaccctcatgctggggcccctgcggctctgtgctttctgcatttacccttcaggacttcagggttttgtgctttgttatagcttcctgttttgctttggccttgccaagtcccattccagctctctgagcacagcacagagccctccctctcaccccttttgtgttcctagtaaagatgctcctggtctaaggagaaggtccttgccagagccctaggctccagtcttggccttgctgggcctccatcaaatgccttcctttctggcgcctttgtctcctggtttgtaaagtaagcagtaacatcagaatccctttaatctggggccctttttgtccaatgaccaggttcccacccagatatctcttctagcaaaaggcaaatggaaacagctttttctctttctaatctaatgtcactctctcatccgcctttatcaaggcttaggatctccttaggctcagatgacatccacagggataaataacacccaaaggtgctactagtagcttaggaaggggctgggaaagtagggaaagggatttagaagtaggaagagaaaaaataaagtagaagaggtaagaaggtatgagatgtagagataagagcctcataagggccccccaaaatagccctgagagggctaggcccagtggctcacgcctgtaatcctggcactttggtaggctgaagctggcggatcacctgaggtcaggagttcaagagcagcctggccaacatggtgaaaccccatctctactaaaattacaaaaattagccaggagtggtggggcacgcttataatcccagctacttgagaggctgaggcaggaggatcacttgaacctgggaggcagagactacagtgagccaagatcctgccactgcactccagcctgggtgacagagcgagatctgtcttaaaaaaaaataaaaaataaaaataaaaaaaaaagatagccctcagaggcacctgagccaaagcctcatcttccttacccagaagatgctacccctgcaaatggcatacctcccagccaagtgtttggcgttaagctacagtcaggattcaaggacagtccctgcagatcatagctgaccccccttatccttggacagtctctgccccacaatggcaaagctgccctgactcagggaactctacgttttatcaccaggaaacacccagaggttgtgacagtgaccagatggaaggcgccggttgtgtgggaaggcactttcaacaaagccatcctaggaaattattatgccaaacagaaaattaccgtgcggttgatggtttttgctattggaaggtagatgtcactgataaaactgtccttgactgtctcttgttccactgtcaaaacatttgtgtggagactcctgaactgatggaagccagtcatgattttttgatttattagataggagaatgttttcatggaactggttcagtctcctttctgctgaggccctaaaatgctgagaacaaaataatagtaggtaagtccactcattcctacctcaaaatgagggacttgggttgcaggaaaacatgtctgttccacccaccaagcccagggtcaacagcatacccacaaccacctcctccctgaccaccatggcttcctttagaaattccacaagtgctagctgctagacagcccagagtgcatcattctttttcctatgctctacggcccaggaccaactacagagagatttatagcaagttctaggtgctgagtgacctaagcacagtggctttccacrctggaacacagctgaccactcttccatgggttcctcagatcacttctactttttctctcatggaggatttggccctagaagatttgctggtcagagcttgctcttccaaaggttggataggttccagtttcaactcccttgttcagaacatatgacgcagaaaaactacgatcattcttacttgaaagttctagctctaggccaggtgcggtggctcacatctgtaatcccagcactttgggaggccgaggtgggtggatcacgaggtcaggagatcgagaccatcctagctaacacrgtgaaaccccgtctctatgaaaaatacaaaaaattagctgggcgtggtggcacatgcctgtagtctcagctacttgggaggctgaggcaggagaatctcttgaacctgggaggcggaggttgcagtgagctgagatcacgcccctgggtgacagagcagactctgtctcaaaacaaaaagaagaaaagaaaagaaagaaagttctagctctaatgttagttattaaagataatccattttgctttttttggagaattttcctttttttttcaaaataaaactaaaagtccaattttcctatttttttttctgccctctgggcctttccctctatatctcttctgaagaagcttcatggaaagtcgattcctttgccttgtataaagagacttgaaggctcaggttgatctgagctttgccaaggtggggcttaaaagagagctctgtaaagatctgatagttctccaaagataaccttccccaacccagagcccagcagctattactgttccrtcattaacaataccaatcaagttctaatgtcactgaatgtgctgatcctagggacctatgtggtctctctaacagagaaaggtgactgtggagttttgacatgtttaccagaagaatctctactcatataggttgggagccacctaattagattaggtgaaccacccagctcacctaatcctttggcacaaaaggggataacccagccacgttgcagattgatttgatcctggtgtttccaaaaagaacaaaacgttgcccaatgccccacaatggcttcagccatccagttccaactctgcacaactaaactgtaaattgcacatcctggtgaaagcattctgccctcagctctgagacaagggaggactgtttgtactcagcagcaataaatctttacaagtggatttggacttttaggaggtgtaatgtttggtttgttttcaagcaacaatgcatggagccaactgcagtgctttaatctctaaacaatgtgaaacctcaaaatgaatctctcctgtactaaaccacccccccgccaccccaccccagtattgtttcccaagcttcagggcacaatagatttttctcgaagtcccagaatactgaaggatttcctggccactagccacagagccacactgaagtccctttttatattcctcagatatattctcttcatttaaagaatcaatactataaacccttggattaccacatgccaacattaaaagcacactttattttggtaacaaataaagggaatccaagcagcaacaaaaagcgaaaagaagtgccattcactttactcacaaaacaccatgattggccagtagtgtgatcagcacattaaattcagtccacgtgtgtttagggtttggtcaagttgtattaagccaactggcttattcttcctcttcctggtaatctccatagcatagcttcacaaatagtctatagcttaggcttacagaagacaccaataaaatgtttttcttttcttcttcttcttctttttttttttttttttttttgagatggagtcttgctctgtcacccaggctggagtgcagtggcaccatctcagctcactgcaacttctgcctcccaggttccggcaattctcctgccttagcctcccaagcagctgggactacaagtgtaagccaccacacccagctaatttttgtatttttagtagagatggggtttcatcatattggccaggctggtctcaaactcctgaccttgtgatccacccgcctcggcctcccaaagtgctgggattacaggcgtgagccaccgtgcccggcaatgggagacggcgtgcaatgcttttcaaatgaatagatgaatagttaaaataccactaaatacctactagaatggccaaaattcaaaacactgacaacaccaaatgctgacaaggatgtggagcaacaggaacacttattcattgctggtaggaatgcaaaayggtacagccactttggaagacaatttggcagtttcttacaaaactaaatatattcttaccacacgatccagcaatcgtactccttggtattcacccaaatgagttaaaaacttatgtctacaaaaaaacctgcacatggatatttacagaagctttatttcataattgccaaaacttgagagcaaccacaatgtcctttggtaggtgaatagaaaaatgaactaagtcacattcagacaatggactattattccatgctaaaaataaatgagctatcaagtcatgaaaagatatgttactaagtaaaagaagccacactgaaaaggctacatgctgtgtgcttatatgacattctggaaaaggtaaaactatggagacagtaaaaaggtcagtgattgttcagggttgttcagggaggcagggattaatgagcaaagctcagagaatttttagggcagtgatgctattttgtatgatactataatggtggatacatgtcattatacttttgttaaacccttagaatgtaccacaccaagagtgaaccctaatgtaaactatggatgttgggtgatagtgatatgtcagtgtagcttcatcgattgtaacaaatgtatcactctggtgcagggatgttgatagtggaggggtggggctgtgcaaatgtgggagcaggaggtatatgagaactctgtacttttggcgcaatttttctgtgaacataaaacttctctaaaaaaatagtccttatttttccttttttaaatttcttttaatttttttatcttctcttttcatctacatttactcagccaccgaatgtggcttactgctaacatagtcctttttttaagataaagtagttaaaataaggttaaatcagaagttgctcattctagtattcggatggactagtattttggatgatggtgtgtggacaatggattggtgttttaagtgactagtgggaggctcataggatgactatgtaacatgaaggcagatctagatctcataactcattctctgtatcacagaggacaagagagtgctgctgtttgggcttaatgcatccccagtggatccaagggtcacatcacccttgtatctggtctggcagtagcaacattggggtttatgttagggcttttgaatggagatcaagaactagtaccccctttgactgtccaaaatctgaaccaattggtaaattggacaaaggggtaaggaaggcagagggtggtaaatattactttcattatagttaaagctgatattggagaatgtggcttatatctgcaaaccctgggcctcctaaatatgtaacccccagagttagaaagacttaagcatccaggcacctacaggcctctggatgtgagaatagatcctgtactaagcttcctgtaaaacccagagcagttgagaacacatgctctcttggactggctggctcctaagagccagaggagaggaaggatagggtagtgcatrtctagttctagttgctcttccaaaattggcagtgagataagtcattccagctccccacggactgagtgactgaatggtggagagtagccggggtattacactaacwtgaaaacacacctggggtaggagaaatcattctcctactaaccataaaatatagacaagatgattttacatcacgtggtttctttcaggaatcccagcatgtggtttctttcaggaaacccacatgtgggttttttcagcttgtggtttctttcaggaatcccagaggataaatgttttgcttttcttctttgtttcagatataatgatcattacttggaggagttcataacatctgctaataggtacttcatggttggccacaaagtcatattttacatcatggtggatgatgtctccaagctgccgtttatagagctgggtcctctgcattccttcaaaatgtttgaggtcaagccagagaagaggtggcaagacatcagcatgatgcgtatgaagatcactggggagcacatcttggcccacatccaacacgaggtcgacttcctcttctgcatggatgtggaccaggtcttccaagaccattttggggtggagaccctaggccagtcagtggctcagctacaggctggcggtacaaggcagatccctatgactttacctaggagaggtggaaagagtcagcaggatacattccatttggccaggggatttttattaccatgcagccatttctggaggaacacccattcaggttctcaacatcacccaggagtgctttaagggaatcctcctggacaagaaaaatgacatagaagccaagtggcatgatgaaagccacctaaacaagtatttccttctcaataaaccctctaaaatcttatccctaaaatactgctgggattatcatataggcctgccttcagatattaaaactgtcaagtgatcgtggcagacaaaagagtataatttggttagaaataatgtctgacttcaaattgtgccagtagatttctgaatttaagagagaaatattctggctacttcctcagaaaagtaacacttaattttaacttcaaaaaatactaatgaaacaccaacagggcaaaaacataccattcctccttgtaacttggggctttgtaatgtggaagaatgaatctagggcaatcagatataaattcccagtgatttcttatctattctgggtttgggggaaatactatcaactgaaccaaaaataacttgtcataggcagagataaagccagaaacactctacacatgccagatgacatctggagaaaagggtgctaagggaagcgtttggcagcaagatatgattgtaaggggttgtcccttgagttcaatgtctgcctatttctgatgggtctaaagcaacatggagttactgtgcagcagaactctcagtaaagacaccatttgccttggcaatcctcaaaaagcttcaatagcagattgcttcagaccatctgtagtccgtccttttctcatctggatgttgtttggcttctgtgcgaaagattggtggagtgtcccagtagatatcatggtggtgtgtgatcagagtcccaaggaacctgaatgagccaaggtgcccagcatgaagtcaaaacaaagccttgacatgagtttgccatgaaatagcgaagagagagtggaagagaggagccaatcactgtggggcagtgccaccctgagggcacttagggtatggggttggtgcttaaatacatcacagatccaggtactgaatgggaggaagtgtgggtgatttccaatctcattgaccctatgttcagggacttgaacggaagatgtttcttgtgttgcctaagtggtattcagtctaccagactctgcaacttgcatcttcaaatccttggtaaagagatgtggatggtgtcagagaaggcaaaggcctgcagtggattgaagaggcttgcaagcagttctgtttctaggatgtgggcttcatcagaagacactcggtcaccacttagctagtctaaacctcagggttcctcagcccatcataccccaacttggaggactgacatcaaggagtagactggagaaacagccctcccatcaagtaacctcttgttctctcctgctccatctgcactatagaagtgtaataattagacatacttggcaaaatggctaattgatttggtaacagaagcatgagccataacaatggaagatctagttatcatgactgaacagcttaacattcaattcccttctctaagagaagctgtgaaatcctacatattatttaaagttaaccaaatcaatgtaaagggagttaggagacagtgtgtacctatgcacgtatatttatgttttgcttgtgttccagtctcggtcatttgtttccattttcaagcaatttatttgaagagccattgcactagcctgatgtatactgcaatgagcttctttgataaaatgaaacttagatttttctcgaccatttcaccgtgcctcctacttcattttttgccagaaaatctcacatccaacaaaacaaaacaaaaaccctgaattagtgggctttgaaaaggaaaaagcagggctttgaaaaagtagatcacacatcagttaagactcctgcttctctattagtcaggttgtcttggattcagtctggagtaggcagagcttaagggtttttaagtcctgacccaaagaaatgatctagcctgaaagtttagagcaaaggactaatgtttacttttaaaggaatttcttgatttttttaaaaaacttcattaaagtttaaatccccaatggacaaattcataatcttgttaatcgttattactaaactttttaaaaaatgtcccaatttacaattaaataaattactttctcagtatattctggtctggtcatggattgtgcatttcctcccaaagatattcaaaattgtcaattagagaattttaggttttcagactcagaaaagtcctcacgcccttctgaaaatgtgtccactattacagaaatagaacagacttgggattcccaaatttttgtttgtttttgagacagagtctcactctgtcacccatgctggagttcagtggtgtgatcatggttcactgcagccccgacctcctgggctcaagtgatcctctcacctcagcctcctgaatagctgggactacaggcaccaccacgccccactaattaagaaaaaaacgtttttatagaaatgtggtctcactatgttgcctaggctggtctcaaactcctgggcttaagtgatcctcctgccttggcctcccaaaacgctgggattacaggcgtgagccaccatgcccgtccaagggattccccaacttttaagcaacaaatacttatatagagctttccacagcaatgcgctgaaataatgaactgccagtgaaagaatcattagggaaaggcttgcccctgaagctcagggtggggcatcagggcagaggaagaaaacaatgccatcaccatatctggggattattagtcctgacctctggggaatatatctggtcaagtgggaaagtctggatttccagcaggtgtacttatactaaaaaatttaaagatgaccaggctaatttagtgagatgcactgaatatgcaacagggcatgattacctcatagtggagaattagtctcatttcataaaagaggaagatgaggtccagaaagcttttagactcgggaaagtcctcatgcccttctgaaaatgtgtccactattacaaaaatagaacagacttgggattcccaaatttttgtttgtttttgagacagggtctcactctgtcgcccacgccggagtgtggtggtgtaattatggctcatgtggccgcaacctcgaactcggctcaagtggtaagtggtaggtgactgatgtgggcttcatcagaggacagtcggtcatcagctggtcccactgcttagctagtgtaaacctcagcgttcctcagcccatcataccccaacttggagggttgacatcaaggagtagactggagaaatagctctcccatcaagtaactttttgtaagtggtaagtgactgaactgaggctcaaagcagggaaactcacaggacagatgtgttgacagtgcattcagagggccatgtttcatatcatggaaagcacaactatatatcttcccaggcctctaccatctcccactttttatgcatgaaacctgccccaaatgcattaagtaagtttaaaagcaccatgttaaaaaaaatcggttaggcacggtggcttaacccccataatcccaacacattgggaggccaaggcaggtggatcatttgactccaggagtttgagatcagccttggcaacagggcgaaaccccgtctctataaaaaatacaaaaattagccaggtgtggtggtgtgtgcctgtagtcttagctactcaggaggttgaagtgggaagatcacttgaacccaggaggtggaggttacgtgagccgagatcgtgccactgcactccagcctgggcaacagagaccctgtttcaaaaaataaaacattgttatcattcttatctttacattgtgcatggagggctgatgtaagcaccatggccgtgcactgagcggttatatcagggcggggcttcaggaggtgtgatcaggcagaggagtaggtggaaggaacaaaccatacttgctccttccactccacctcaaatctgggaaccacattcagccaaaaggggaaaaatgtgttcaaggcctgaaggatttctctttgtccctctttgctctctcttagccaaagccaccactatcaggaacctcaactatggcagtacttacaagcacttattttaatgtactgtttgttaaatgtgcctaacataaacaaataacactggcatgattgcatattaacaagcgtgaaaagtcatagaaagtgaatgtgtaacacactatacataccttttaaggaaagaaaagagtcaagtagggatccactggtgaatgtctgagatctgaaagagtgctgatccaggatttaaacccaggactgtctgcctatagattatcttactataaatcctgtgctctttccacagctccacacttctttctcacactgttttacacacacacacacacacacacacactttaaccatcttattgttgaaattggagataccaaagaaatcaacatcaatgctctcaatgcttttgttaggcattaaagagaggggatttaggagaccccaaactctttaaaggcaaaatgtaagtctaaaattggagaaagaggaacatgaaacctgaccaggtatgaggcataggtagtaccagggctaagggagtatgaaagaaggatggctcagggaggtggaagaagcctcagataatctgactctgaactgagctttgaaaggagagaaagggtcactgtgaagagtggatggaatgaggtttcagagaggcaagcagcaggtgtgaagcccaaagtgctacaataagaccttcatggaaatccacaggaatggtgctttgggaccggatgaaatcacctggcagagcctgtgtgaaaagagctggctgaccaccccatattcacccagcatttctggtgctctctctcccttctcagcaatccctgatctccttcagggaatttatgtgatttctatggaaactggtgccatgcttgaagcaagtacccttggctaaatcaatccatcaggactttccatttctctggtgacaactattgattcaagggtgggcaggtgacctaaagtagtcaaagtgaatttcaagtcttctactagaaataaggacacgtgtaaaaataggggctgctggaaaagggaagtccaccttaggataaaattgacaataggaaaggaggagcagagacactggaggaaacccaggccctggtgacaactttgagccattggatccagccttacctaaggtctgcactgtctgtgggcttttcaaatgcatgggccagtaaagtcccatgattgtttaagccagctggaattggactctctcttacttataactgacagtatctccattgaacccctctaggatgattagctccttaaaggcagggccatagtctgacattgcatcagctctagcacctactgcatcacgtatttcagaagtactccttaacaaatatttactgaacaaatgaatgaatgcaccaacatccattccgatcatgccttgatatgttttgctttagttggaaggttttacatttttgattatagactgtgtgtcctattaaaaagcaagtgtttggatatctggcacctggaacttttcctcctgtagtatacagtatgggaactcaggagttacagcctgggctgtaggcttaagctccaacttggtgccataagctggtggattcagtgctacttcaaggtcagcaatgtgtaaaataaatttgcttcatcagcataaagcagtggttctcagcctgggaatcactctcctctccatcccacgggacatttggcaatggcaatgtctggaggtatttttggttgtcacagttggtggaggggtgggtgctatctacatactgggtagaggccaggaatgttgctaaacatcctgggcaacatggcaaaaccctgtctctacacaaattacaaaaagaaaaagaaaaaaattagccaggcatggtggcgtgtgcctgtagtcccaggtactcgggaggctgaggtgagaggatcacctgaccccaggggttcaaagctgcagtgagctatgattgtaccactgctctcccacgtggacaacaagtgagaccctgtcttaaaaacagaacaaaacaaaaccagccaggcacaatggctcctgcctgtaatcacagcactttgggaggccaaggcaggtgcaccacttgaggtcaggagttcaagaccagcctggccatcatgg

SEQ ID NO: 96594 - DNA, 22135 bp, Homo sapiens
acatttaattctctaataaaaagtaatgtgtcatggcgggcacctttaatcccagctacttgggaggctgaggcaggagaatcgcttgaactcgggaggcggaggttgcagtgagctgagattgcatcactgcacttcagcctgggcaacagagtgagactccatctcagggaagaaaaaaaaaaaccaagaggtaatgtgtattgagcatggcatacccatttacctttagaccagctcttttaggtgaaacatttgaagcccagagaggttaggtcacttgttcaagatcacacaggaagtgtaagccgatgatttttttttttctgctaaagtattgttttaaacattttaactttcattacacacgttttcaagcatatacaaaggtagagggattgctgtaatgaacctctgtgaacccaccacccagctttgttgatagtacagtgaagccgtggttgggaccgtacctgaccccagaccgcaaagccccctttctctccctgatgaccacgggcaccagaggactcaccagcgccccctcttggaccagtgggacattacaggagtgctttggcagcccactctgagaagggcagtggatggcagagtgaacaacaaactcacagactcacaaactcacagacggcacagacttttgtgaaggaagagtcaatgttccaaatcaatttgtggagaaagcttaaaggaaatagtttttgcttttatttttaaattctttatctgagatttagaaagtctgaaataaacaaaaggactcttgggactgcgggggaagggtgggagggggtgaggggtaaaaggctacacattgggtgccgtgtacactgcttaaaggagcctaggaatatgtgcctgccttctagtgttgtcatgggcttccgtgggctgataaagctgagctacccagcatggcgcctggcacctagggaacaccagcagccaccgccacagcacccatccaccacgacaccaattacccgggcatagaagagccacaggagttagaacccacacttcggctcacagtccccaccctgctgccacaggagttagaacctacacttgggctcgcagacccccccgctgccactggtggttatgagacctttgggtgtcaccaccacattggaaatgagtttttttttaacctgtaaaactaggctgattttgaattccagggctagtcctgagaattaagtgagagaatacatgtaaagtcgtgtaactggagaagttatatgcacttgctgggtatgactacaggactggcatttacggattgtttatagaggtctgggcattgggttatggtttgggatttgactgtcacttgacagccacggccgctgtgaatgacagaaatgaggttcttgacccttccttaccggtcagctgtatgcagtgtggtggtattgtcctagatgttttgcataacagacctgtcatcatacagatgaggaaactgaggctcagaaaggctaagccgcttaaccagaagtcacatagctactaagaccaagttaggttttgaatctagacttctgactcctaagctcaccagatcttaacctacttggaacccactgcttggtagtgaattataataaaatattaactgtgtttctaaccaaatcagtgcttgagatttaaaaattcatacacacgcctcaaacctacagattctgaaacgacttctttgggattaaagaagtgtatgtttctagaagactgcggaaaacatcatttctttggctgtgactttcttggagcaggcagtggtgagcaaggagtgtgtccccgtggaccagttcatggagcacctgcttcccagcctcctgagcctcgcatcagatcctgtgcccaacgtgagggttctgctagccaaggccctaaggcagatgctgttggaaaagggtaggtggagcacttttcagaacttacacatttcgggtagactccaccagttgttaaaggccacaactagatttcctctaggaaactgaggcaggttgtgtgacagcacgcgtaaggtttattatgtaaatgattatgttaactttgatgcatcattttatgttatttataaaacgaccaaggaaatgaatgtaatttggtcttcatacttaataaacatatgctaaaatgtaaattattacatagctttccagaaatgagggaaattgataaattttgagttatgacatgaaagattatgaaaggtagcaaacgtaagccttaactgctattatgttttaatggtattattttgtggtcagttagaaaagatttgtaacccaactagtggattatttacacctggacaggactcaataaaagctttgtgtttcttggatagtttatttctacaccacacatataggaaaatatcttgaactctgccctacatgtacatttcttgccacctcaccccctgccccaccctacctacaacctgctcctgctctgcacattgccatttcttttgtattgcagggaaaaaagatagttactataattttaaaaatatgcataactgttgggagtccatctttaacattttagaaatactctttgatttattgtcctgacatgtggctaacaaaaaacaaaaccgagtgtgttttgaacactgttcatggcttacctgattcagactcatggtttctctctttagcgtattttagaaatgctggtaaccctcatcttgaagtcattgaagagaccatcttagcattgcagtcagaccgggaccaagatgtttccttttttgcagccctagaaccaaagcggcggaatatcatagacactgctgtactagaaaaacagaattaactacttccgtgatgagttgcaatctgattatttcatgcttggcacatatggcttaccataacttgaaggggaactgattgtattataccagctgggggagattttggaacctttcatactgtgcactcagtgattgacgccttttccatctgtaccccgaagggactgaacctgatgggggctttttctggatggctgggccatcctgatcaagcctgatcagtaagtctgtggaaagattgcagaccaggtggctaactgggcactggagcctctgaaccatcaggctgtctgccagcaagttcttttctccatggcagactgtatgatctgaagtccccccaaccctctccaagtaaagtagtttattagaagctcttaagtctttaatagacctgcatatttccttcccttatgatttcctataaaatatagtttatggtgttatatttttaactgaaatactgtacatatgtaaataactcttgacaggaagaaaatatattaatgtagtatttgccccctatcagtgagctgaacaaatacatcatttaaatctatgctgcactttgagttgctacaaatatggttcgatttgtttatttttgaaaaatgtgataaagaaatctaaagaatgattgatggcagtctttctaatattgtgcctttgttataaactacttggaacttttcctcaggcactcactcctccctgcctgacaggaactgtttccatgaagatatgtgttggcctttgatagaggcataaagctgaaagatttttcatttttatatggatatgctgtcatatgtttaagaacttgagagggaaatggataactgaggtttttccatttttatatggatatgctatatgtttaaacttgggagggaaattgataactgagatgcatggatattgactttatatctaatgctttagaatcttaaccaaaaaaaggaaaacctagttctgatcataacctgcccacaagttctacgcacctgtgactttgggggtcaaattatatactcttcaaattgacttaagtacacaccgcttagatttcatgcgtttcaaatttagactaagagaaagatgctctagaatttaaccaggttttttaaatcagtaatttaagattttctaaccatttgaacaaattttacttacatgtatgcacatgtcatttttcgtgtttctatttttatgttctcaaaggtaggataagggaaggaaggaggaaacagcccatttggggttcaagagctagctctgctaagggcttgtaagctatttctattctgccctttggtctttttcttgtttgtcttgtctttatttttaaatgaaattcttgaagctatgtattgaattttctagtatagaggatgtgacttccacctccaaattccatttaactgattcttttaaaagaaagataggcgtatatacaccacgccaaaataataataaggtacctatgtgagaattgcaaattataccccagggtagcatttaggcagcgtcggcaaaaagtgagttaataaatcagaagctacatattaaaaaaaaaatcagtcaatccgtcgtgtgtttaattcttgcctaaagtaaatggagatattgttttgctttggtaaccagcaatttttaatttttttttattgcccgcaaattgagattgttttgttaaaatctgttgatctagcagcaagtagaattattcaactggaatcttgtattctattcagagcttaattttccgttaaggaaaaaaatgagcttcagtttgtgttgtgatgtgtataatttgcatgctgaatcacaacatgcttggagagattgtagagactctttggtaaataatctaacctttacaatttccgtttatatgttaacatttttctataatatgagtgcctttccaatgcacagatattttttatggctgtaatttctctgtaaaaataatttttaagcatacattttattctttttttgcaacaaccgagatttttccaagattgttctgtttcccctcgccctcctagctcccgcccccgtcacttcggcgcttgtattttctaattattcatgggtgccatgttgagtgtttgtaatttgaccaccacaggtaagcttcctgtttacttgaacactcagcctcatctccggtgaatgaagggaaaagcacagatgggtttctcccaggcacagctcactccaaaggtgtcttcatagagccaacccagcctttctcaagggagcatttccccacttaatgtgtttatcagcatctttcttccgccaagaattcaagagcattttcaaaattgatagattttggtgcagttttgcaagtttccgtggaaggctgtctcccgcttctgggatccacccccatgtcgggaccagatcggctgcagggagtcatgtttatgaaatgttggtggttttttttttttttcattcatactagaagtgtttttataacgaaaatctgcactttacaactctgcaggccatgcatgcaatggtgatttacagccttgtttacgtgtaattcctccaggtgatttatcccaatttatgcaaagatcctattttaaacagacacggagaagtggtaaccgtttcctaacagcagcaagaatgccccttccgtttgcctggtgaaaagaactgacattaacagcagcttggaggcttcgaggaggtggggacgtggcctgagctcgggacgggggcccagtgcgggttgtcggagcgtggctgcccggcgatgtctctgtatttatcaataaatctcccggttgctctgggaagcacttatgtcctgttccattatttaagaaccgtctcccgcggccgcgtgaaactgcggctttgttcatcgcggagcgggaaaggactgcgggaccttggggggccgcccgcccatcggtctccctggaggctcgggcggcaggcagggaggggcctcgccttgcgtctggagggggcggtcctggcggggcctgggcgtcacagtggggcggggggcgcatgggcccgccttggggcgtcagggcgggggcggcgatgacgcgtggccaccgcactcgagccgcggatgacgcgcggccgcgcctgggggatgcggcgggcggcggcgggggcgggcggagcgcgggcggcggggccaactgggggcgcctctcgcctgcaccccaatgcgggacgcaggagcggtgcgcgggccggggctcaggggtgcggcgggcccagggtgggctcggcggactcgcgggccctccccgcgcagcccctggcctgtgcccgcggccggagccagcggctcgtctgtgacccgaaggccgcgagtgccttgcccgacttggcccctgacgtcttcgtcctgcgggtgcggctggaggagacgggggagatgttccgagtggcaaactgccgcggcgacatgaccgtgcgrgagctcaaagaggagctggacctgatggtcggcatccccttcaacctccagcggctccagtacctcgacgaaggtggctcctgccctgactccttccctggccacatgcaagggcaccctgtccacttctgaagtggattcccaaagggaagcctgcttacgtgagaaaccccagatgtcaaagcaaamcccygaaacccaaccaccctgaaacccagatggaagggccacttagggtcctggccacagagggacttcccaatctcaaacacacggcgttcaaattggactcccaatcaaggcaaaccttgtccacagcaggaccctaatccacaagcaggtcctgcctggatcgggctgcatctgccaaccctgagcaaatcctgtccaagccaggaccccccagaagccagaccctcaggctccccatgtcttcataaggaacccaggtcccaaagccamctctgttcatgtaagacttgtctgaaacaaggcctgtcctcagcagaacccccaaacccaaggcaagcctgcccatgtcagtaccccaaactcaaagcaaaccccaagtcctcctccatgctggtcttgagaacattagaaccccaaatcctctagccaaccatgtccacgcaagcatgccaaacctgaaacaaaccctgctgacctcaggacccacaaatccagaataaaattgcccaacaccgaaccccaaatctctaggctaaccatgactacttcagaaccccaaatcctccagctaccacatcccccccaggatgccagggcttgaacaaaccttgaccacctcaggaccccaaaatccagagcacacatgcccaactgaaccccaaatctccaggctacccatgactacctcagaaccccagattttccagccacttttgtcttgcaaggatgccaaatcaaaacaaaccctgtccatctcaggaccccaaaatcaacaaaccagcccaagactcaacccctaatctccaggctaaccatgactacctcagaaccccagatccttcaacaactgtgtccaggcaaagaggtcaaagctgaaacaaaytctgtccagtttaggaccccaaaaccaagaacaaacctggctaaatctgaaatcccaaattgccagactaattatgtgactattagaaccccgaatcctccacaaccatgtccacacaaggatgccaagatccgaaacaaacgytgcctgcctcaagaccccatatatctctatgcaacttctgcccatgtttsagcctcaaaccctgaagctatgcctggccataacagaaccctaaatcccagagcagactctacccacgtcatgaccctcaattgcccaattctggacccccggcctccaactaaccatttgtgcatctgaaccccaatccattagccacttctgtctacataaggatgacagagcccaaaatgaaccctgcccacatatggaccccaaaattcaaagctaactctgctcacatctaaaaggcagtcaccgagctcaccatgaccataccagaacccaaatcccctcaaagtatcttcataagggctccaaagaatgaagcaaactctgtccacagcaggaccccaaagctcaagtcaaacccacacatatctgaacccccagatacgaaaccgtgtctacatcagcactccaaggttgaagctggccatgtccatgtcaggaagtcaaggttcaaacaaaaccttgcctccatgagtaccccaaaactcaaagcaaacttttcttgtatatgtaacccaaatccttcagccaaccttatttataccagaaccccaaattccagaccaaaccctgcatatagcaggagcccaaattttgagcagattttatcaccatgaagacccccaaatctcagggcagatgtgctcgattcctaccctccaaatgctacactactcggggctacatcagatccccacatcccaaaacaagtcctgcccatacgaggactccaaatcccagaacagaccttttcacatcaggaccccaaacagacagcaaaccttactttaatcagaaccccaaatccagagtaaactgccctcacaggaacccgagtctcaaagcaaatgctgctatctacgtttgaaccccaaatagtggcaactaacccagtacatatcagaaccccaaattccaagctgtgtccttgttcacatcgggagctcaaagctagcccagctggaatcagaacccagaaccgaaagttccctgtgactgaattaggaccccaagggccccactccagacaagtcccatgtggcagatacccagtggaggccaggcaccctagagcccatctctccttccatcagtctccttccctgacccgaaggcgtggctttccctatcccgattccctacaatatttaggatatgagaacaggatcaaagtccctgggctccatcatctccccacctggttgaaatcaacgcaacacacttcaagaaaatgaagatatagaaaaaatctctgagctgctgctgcacagagaatgtgaacagctgatattgcagagagactgcagctgtactgcaggggctggggagcgatggagacagatctgaaagcagcctgcctccacgggcttggtgctgccagacactgcccttctgggctcagtttcctaatccgtaacacagagaaaccagctctggaattctcggagccgtttcccyctctggacagaaatgacgcaggaaactcaaaatgcacagtgaaggccaaaataccttccttttctctctttaaaataggttaagcacttttcctgacgtatttattttcctataggagtgtttggaagatgctctcgagcatttttgaggctttatttggaaagaaatgtgttttgagcctactctgtatttaacatattaaaagtgaggagagttgttgaaggacttagtaagagttcccaaacaagtaatttgaaaattatgtatcctcaactacaaatgcctggcaccccttctgttcatttgttttcactgatgagctatgcggggctattaatccaagagagctaagagggagcgcgagagagggggtgacttaacactgatgtcacagggctatcactcaacaggcacttagcaactgttagaagctcgacctctctctgctgttgtagtccttgctgtgggtggcaaacaagaaagacagaaagtgctactcattattagaagaaatttgggctactgcctataaataatcctctgaggcctctcctacccacctcaaaatttggggcggggggagatcaaatgagatcatgtgtgaaaaccttgagtttcacaaatctaaaaggggtgagcaaatccatgggccagggttgcccttacacgtctgttgtcaactgtgataatttatttagctggtgataattagtatttgtctaagtccaaggcagtggctgcctgtctataaaaagagaatgtactccgatctctacaggggctgttcagcatgtgggagttttactcttgcccgtctcagcaaaacacagctttactcaatattttcaaagttgtagggagtcaagttgtcttacttagactaattaccggttatcctctgtgtctgaaccacaaataggacactaattaacagatttgctgatcactattccctcttgacatctaccatcctgagtttctggtagcaaattggtgctcatagagccaagagtgagaagtcagtggccctggagggaagcaggtctggtgccagcactggggtggctgttcacaggctatgtgagcctcagtctgctcatcagcagatggagwtaacaaacctaccttggagggctgtcctaaggatgaaagaatataggtactcggtctgggaaccaagtaatcactaagtacctagtacataagcacaaagccatgaatcatgaaaccagaaaactcatgaatcccactcagttggactctagactgtgtcacctgggcggagctgagactcgatgttggtggcattgctcataaagaaagcatgaggcctaaggagctctggtactccaagtccaaattggggtggatgtcagcattagctcctcacatcacgtcggctcttagctagggagattttgtcccccagagcccatttggtaatgtctggagccttttttttttttggagacagggtttcactctattgcccaggctggaatgcagtggtgtaatcttggctcactgcaacctctgtctcctaggctcaggtgatcctcccacctcagcctcctgagtagctgggaccacaggtgtgagccatcgggcccagataatttttgtattttttgtagagacgggtttttgccatgtggcccaggctggtctcgaactcctgggctcaaagtctgcccacctcagcctcccaaagtgctgagatgacaggtgtgagccactgtgctgggcctggaggcatgtttgattgtcttgatttggtgaacgtgctgctagcatctagtgggtagaggccgggaagctgtgaacaccagacaacgaggaggggcccctgccacaaggagttacccagtctaaactgtcagcagtgccaaggtggaaaaatccctcccacgcttcaatttgaaagatccaacattttttttgtcattgtcacctctttagccaggtaatgacattatccaagagtattttggtttaccctatatgatttgtataaccacattgtgctgtgtgtctaatgactggttacttcaggtttaagtcattctatttgtagagtttgcctcataaaatgactttactgactcatgtgccttttcacaataggacaagttataattacagaattttataaatcgttggcattgtgattttgttcggcttccatctgagctgaaccaaatttattttctgaaaagcattaccaacaacagacagacccacgcgacaccatcaaatgagatttgtattcgatatttctaaaattatctttgtggcactcaagrtcagataatctcttaacttaaccaatgtagtagtttatctttaatacccaattttttaaaagaaaaaaaatttttccctgcaggagttttgatggatgacactaccctgaagttccatgatgttgttcctgragggattatttcattatgtatctggcatcatgacggatggacagaacttgttttggcggctgtggaaggggatcccagcaaggtgttttcaagcttctttaaatggatattatacgttacgaagcaaccgtaaattgtggggggaaaattagtctttaatacgratatgtgartaacagtttcagagcagggaagagagaacgatgagccgtgtcataattatgaaataccgcactgagggtttgccttcactccttgggtttaccattttgctgggtttatcgatttgtgatttataacccacttaccgccccacccctccccgcaaaggagtcgaggcagcacgtttctattcatgtttataagtgataaggttggaaatctaatttaatactgagaggagaactccagataactgagaagcgtacagctcagagctcggggctgtggtacaggcctccgccaggtgctgcctggttccggagggagaggcccctcgttcccggggtgagcggcgggcgctctgtcctccagggctcctgctggcctctcagctgggctctaggggtgggcagtggggggcaggaggatagaaaccagatgtgtacccaacagggaagatgaatcactgtgacacgaggggcaatgctatattcttcctagaaaagaaattcggatggaaagctatgtgctcctggagaagaagagatggagtttctttgctcagaaaggggtcagggaaggctgggtgtagcaggggctgggattggcgctcttggaagagtgcgtgggctcggggcaggtgcggcaggaggcagccttggcagggagggtaggcaggatggggccctgtcccagccctgacacatctcctagtccctcccgctcctcctcctccacactctcctctgccccttctgtctccctgccctttgtcaccagcagtgtggtccatgcttggttttctggctcttactctggctgcaggggtcacctccctgctgtttgaggctgtcagaattgccatcatcctcgtctcgattctgatcctcccactgccccagtcctgactcccatatcagggcagagtatcctccctgggggaacccgtagccttcctcccaggctcaaagacttaattcaccacgaggtggttacgtgaccgggctgttcacctgtgcatgttcagcttgctctgaaacctaatggagacagtgggcacacaaatagacgggaaagccagatccggtctccaagagatgactgtcaccctctgggaggccatttatattggctggtgtcttcctcagtggcttcaaccaccttcctgtggacacctggcaaagctattttctctcttcaaaacattgacaggaagaccttcctgtgttccgagcctgactgayggcgaattcgtatttcctgaacatatataaagcattaaatcatggcctccccatgctgtcctgggtgtttctcagcttttcatgagggtttgcacctctcttttcccatcatgagccttaatttgacattcaagcaagccttcccctgagcatgccccatcagccgtccagcaaaatgtagccacgcttttgagaataactcaaactcctcttgtcttgcccagctatcttgtctcgggcttactgaagattcctwctaccgaaccgcaaattcagaacattttgagggtgagaagtggaagcactggacgtctcagagggcgtttgtggcgttgtatgtggcctcacacagaggccactttgatgctgtgcagtaccttctagaacacggtaattckggtagaaagcttgctatattcatgagttgggattttttgcaggtagaaaggacagagtgtcttgtgttcccagtccttccagcagtggtttcctggacctgtgtcttgtcagccaccartcagggtccccatggtgccactcactccctgtctaggcaagtgtcttagggcacgccagtcagaggctgccctccttctcttcaccaggtctcgagaagattctttctgcttcagtgaggcagaaatttcaggacccaagacacaggcggcagctataaaggatccctggttcatttctcaccagacacattgctgggaatattcgcatgctgtctgtgtgatttccagcctygcatgaaattaggatgctgcaatggtccgaaatggtctagcctctggccaggcacggtggctcatgcctgtaatctcagcactttggaaggctgaggcgggcagatcacatgaggtcaggagttcacaaccagcctggccaaccagcctggtgaaaccccgtctctactaaaaatacaaaaattagctgggtgtggtggcacgtacctgtagtcccagctactcaggaggctgagataggagactacaacacacacacacacacacacacacacacacacacacacacacacactagaaaaaaccccaaaatagtccaccttccagccagcacagctctgtggtggatggcaggatcaccattctcccttctccaagcctcgttattattttctcacaagacattcatgctgaactctcttttcaacccacctccacttaagggcctccttccactctctctctctctctctctctctctctctctctggctctcttgatagatagaaacagaagccttagccaacattgtctccaaattaaagagctttacatagtattccataggtgtacactctatcctccctggatgtgggatatttttgggaaaagatgcccattgatggagatgcagaccactcaatgyggagtggagaacaatggagaacagctgttaacagcctagaccctcaagaacaatggagaacagctgtaacagcccagaccaccagcttccttggaaaaagggagaacatgttacgtggtgtttggtcaatggtttgggctcaggaggggcctttcccatgggtctcctgtatcaacttgcctccaaattagacccctttctttcctactcacagccttggctccagcctctgtcagctcagtcattgctatttttcccacttacaccaagcaaagtggaaaacatcttggacttcctgggccggatgattgggccgtgcatcgggtgtacaaacctctgtgatgggtaaaggttacctcaacaatattctccttccttccttcactgcctgtctgctctttgcttgttgtaaaatgaaatatgggctttgcgcagcccagcagtcctttaagctcataaaaagtcatttttgctctgatrgaactgtgatgtatttgaaggcaccagttaaaaaattacagccagctttgcaaagttttctgtcctctgcagacagctgctggggggaggtgtcatggtcgacactggtgttctaagagcctatttaaaactttacctcaccaaccagccggagctcataaaaactggctactgaaatgtcagctgaatttaattgaattgccttgttttctgtgtcatatttgttatccagaatttgattcaattcaacaactccatattggacacctgtcattagcccatccatctgcaggaggcggtggggaatttaatcgaagtgaaatctgtccatgagtcaggctgcccattgcgtcatttccygagtgcctgtcttctgcaggcactgagctaygtgctcgggatgagaacagcaacaagccagatgtgtgtattttctgccctcctggagtttatgaggggaagtcagtagattattacaaataattccatagtcaatgatgtacacagtgttgtgaagatgtagagtgtctattgagcttacacaggaggtttcatggggtgggagaactaaggaagattttcccaaggaaagaaatgaaacctaaagaaaggtcagatttagcccagaataaaatgggtgagaatgttgtgaatgggcctggggcaggatgcagagcagggtgtgttttagggatgaaggtggaaggtaggtataattggtgccttggtggtggggtgggggaggagagtatggcaggagggaatgctggaagagtaatgggaaggtagggtgagagtgagcgggaaagacctagaacatcaccccacagccggtgggatggcagtgatggatctgagcaggagtttgatatgggcattctggaaagatcactggctgctgccaggggagtggactgggggcagggcagtactggagctgggccaggcagcaggacctccctgaggagcactcccttcacagccctggacccctcctgtgttccccctcygcatgtcttccttctggccaatgttcttattttacaggagccagctgcctcagcagatcccccctgggcaggacacccctgcatgtggctgcagctatgggccggtcagactgtataatcctcctgctccagcayggggcctccatccacgacagagatgccaagggggagaccyccatctccattgcacacygcctgaaccacacactgagygagaggcagatggtcctcctccaccggatagcaaagtcggggataagggatctgaatgacttggtcatgaagaatgctttgcagagggtcaagtctgggtttaggtctgagaagatgacgatgacccctcattagctcccggtgggaacgtttgcccgctgaggctggtttgggcaactttgcagagttcaatcccatgggggcccttggtgagcagggaggcaggaaaacagggcaattaacctgaatcagatacgaaattatctgtcctgtttgcaaatgatttctggagggtgttgatggcagtaggtaagcctgtgctcatttagtaatccattacagactgaacaggctctaatgccagcctttaattttaagctatttgcacattgtacccaatagcgctgctcagggtgatgggagccaattaccttctctcccttctggggaccgtctaatgcactggcataataggagtaataacaataatgataatagcactattgttattgtataaaacaagtgccagcaaatgtcaggaggtcgtgtgtagtgtgggctgtgaatttcagtctgtaaagccatggaactaaatgctcccacagctaatgttccaggtttcctgagccatctttgaggggtctgcttcttgagtcgggggcagaagggaagctgggtgagcttggctgtccacacacactctccagaagggatggcttattactcttgttgaaaggtaacacgttggtgctagatggggaggaaacagtgtaaaagaagatgagaatcaggctggtcacattttctcttttgtcccatctccagtggtccatgcagtctcctcttgccagagttctccttttcctgccagcactgggatagcccttccttctttcctttgagcaaaccaccttggagtgtctatgctcaactctcaggtctttgcattgcaaaaccttataccgcattgcaggatgtgcctggtgttcctacagggtcccagcctgccgagtgcacgagtgagctgggcgtgggaaataagaaggaaagacaaggatggcgccagctgtctgaagagagcaccgagacttgactcctgcagaaatgaaaggcagaggccactagatctttctagaactctccagacctggaaatctagctttttgaaaggatctcccttgatttttttttttctttttttgagacagagtcttgctctattgcccaggctggagtgcagtggtgccatctcggctcactgcaacctctgcctcctgggttcaagcgattctcctgcctcagcctcttgagtagctaagattacaggcacctgccaccatgcctggctaatttttgtatttttagtagagatggggtttcaccacgttggccaggttggtctcgaactcctgacctcatgatctgcccccctcggcctcccaaagtgttggatttacaggcatgagccaccacacccggccagatctctcttgatttttaaaatttggcttgaatttttgaagaacgtggtctgctacaaaaggagtgagaagatgtggggcacacccatgtgactgcctctcactgtcaaactctaattcatttcatggagaaacgtgatagaaacaaccaaaatctctctggagcaatccaagactctgatgccacagtgaaggagtagccacgggtcttactgggtggcgtgtgtggtccactctcccacctcccacagaccatttatgttctctaaagctctaccttctaagcaacttttggaatcaaaatgtgtggcagtagtcttgtgaccattgcagttttcctgggaatgggaaatggcgctgtatcctggccaccctttcccacttccatcccaagaactggagtcagcttttaaattaactggctgcatttcctgctgtcatagcaagtaagatctgtgttgatgatgtggttttacactcagtgtacgtggctgtacccagctcagcactctgttagacaaataatagtcgaggaaaaaaatagctcagcatcaactatgtcaaaactgagatcttgttcttggcagacgttctgcaaagtcaataggcagatattaagcaaccccaacccaatggggcaatccatttagctaatgaagtgttaggggggtgatgcaggcactcttttaacttaacaagtggcattactcaaagttgtgcatttgccaggagctctgcccagctgccttcgttgtttggagagccaactgcttgactcctatatgtaaaattctgggggcaagcattctatcttcatctacccccaattcaattaagcacttggccagacattgggcaggtcccaaactcttcatggtgacattttgctcagtctgtggtagggtcatctgaacactcgtaggtcctggggagcgcttcattttagacaatcctgacattctatttatattcaacaagtctgtatcacttacgaaataaaatatatccagagccatagaaggattgagttgccattgggtgatatgttacattttgtagatatttcattaaacgttattttgaaggtttttttccccacattttgggagccaacaaagttttttttgagtgtgtgttggggggtcaatctcaagcatttttgttggaccctggaggtgggccggcatggtggtcaggcacatctctgctctgtgtagggcagacacgagcttcctctggtcttccaggccctgacatccagttcctttgcctcgtctggcatccccaggtagggctgggcttgcagtcaccagaggggaagagctgcctgtgcggaggtggggatacaggctttggggtcagcacagatcttggcttgcatcttactggctctgccatgtggccttgggtgaattccccactgctctgagccaagagtcctctgtagaggaggaaggagggtaatcctggtcactgagcttgctgggaaggcctgggaggtgggaagcactcagtagatgccaactattatggtctcagagttcaactggaaaatcttgctgaagtcatgggtgaaattattgacactggtgagaggggagataggagacccccatttggtgcctttcctgggctcccaagttttgatcaccaaaaaaattgatgatctgaccctttgagcttagtggccccatggaaatgccattgtgtatccttggatttcttggaggccacataaaggcggagtcttcttcctcccctcgttactgtcagggacattgctcacccatgagccttacgccagcctgtcaggccggagcccactggagagatgcacatacttgtcatgagcagatgatgatggcagctgagtgagccatcatgtttccacttgccttggctgccaggaggctcagagccaaggttaatgcccacctggggcaaatatccaatgtccccacccccgtcttgccttttatctttccttgaatgagttatctctctttctaaaaatgtaactgctggccaggcgcggtggctcacacctgtaatcccagcactttgggaggccaaggcgggcggatcacaaggtcaggagatcgagaccaacctggctaacacggcgaaagcccgtctctactaaaaatacaaaacattagctgggcgtagtggcagatgcctgtagtcccagcgactcgggaggctgaggcaggagaatggcgtgaacccgggaggcggagcttgcagtgagccgagactgagccactgcactccagcctggatgacagagcgagactccgtctcaaaaaaaaaaaaaaaaaaaaaaaaaagtaactgcctcatacaggtgttgaattgtaagttgcttcctttctggaagtcaatgcagtagaaattgtaaaagagatgccaccaactgtggtgttggaaggtgacttgaacttctcgcccaggactggcttagcagacccggctacctggccatccagccttccaggtggtgaaacaaagatgctgagcttttcttctgcactccagtctattggtggaacctccagcagcctctgcagccgggaggtgggtgttggggctgcccctctgggcttctgtacatcctgggtctctggggctctgccctagtcctcagcactttgctttctccctccgaagatgactcggcggggccttcagctgcatgctgggctctcgccactgtctcctcactccatctcagactggggcactcccttgcctgaagcatattcactaacccaggggttcccagaaagcagggagggcatctcactggtggcgcctcaggggacttcaggtggtccctgtctctgtattaagtgacactgaaacactgggtgggaaaggcaatcccttttgacattgctctcgatcctttcagtatccacaaggataaagtttcctttttgtgctagtacagatccagcacctccctgaccctcgctaatctccctcctaaaaacacatcaatggagcgcagtgttttgctggtagcagtattttgctgggatgtaacggcactgtcttgttttcagtgcactgcaggccagcgttctatccctttctctcctccttcccagttgtgtgaccttggaccaaatggtcacttcccaagagcctcagagtctttatccatcatgtgggcctcgtcaccagcatccccacctggtttgcattggtgaaaggagactgccagtgtggattgtgccctcaagacccaaggcccttgtcagcgtgaccccgaggtgcagtgggagggtcctgggcttgcagtctggcagatccagtttagaattttcctccaccacaagctgtgtggcattgggccaaacaatggcacctctcagagcatcagtttaaaacctggcccctgtcattggagggattaaatgcctggcacggagcagatgcttgaaaaatggtagccattattattattattattgctacaaccacttaatttgcttaaaatgtttactcactgggattcaatacacccccctccacccgtctccagatagcctcatacattttcagcaaaccttatacagtaagagtctctgtccagaactaataatccccaaagtgggagataaataatttcccttaaatttgctgatttgggtgtgaggcagagggctttctcagcaacttggaaaaagtgcgtactgaacttgaaactccagggccagttctgcaggagaggaaaacagctctaaggcaagaggaaaattccagtcactgggctctgcctccgcagtggcgcactgactgcagatgcttccagcagagggcacagaaacccattaacatttagacaaacactcgtgtttgtgttcatcggaaatgtcagaaacgccgcagtctgcgccactttgaaaaaggggcctcacagatgggcttttctgcctgaatccctggaattgtctgcaaaatgtgcatgtctgtacacattttctggggagaacctcattatatcctgaaagggtctgtggaccacccccttccccaaggtaccaaaacctgctcacaaaacaaggaactcaaccatagcaattgtcaaagtaatcaaaccgacgctcatttgactggctttcattaccaatttacaattggaaaaatgataaatactcataacatctggggctgtggggtgtgtgtgtgtgtgtgtgtgtgtgtgtgtgcacgtgtgtgcgcctgggaaacatgtcagcgccgcacgggggagcttgccgattcccatcttcctgcaggattgatcgctgtctgacaatacgtattcagaatgcccacgacagcacagcgcctcacctctgtaaatccatcctacagagaggaaacccctgtacaaaatgagacccggtcacaaatgttcgtgactgctgtttatggtagcaggtgcctggaaacactctacatgctcacacgcgggagggatggtggcacattttgcagctacgaaaacctgacttgatctgtatgtacaggccaggggacagtcatgaggagtatctgggatgtatcactaagtgaaaaacagcaagtggcccaagaaatgtggatgagcacggttctaaaaagagacaactctagtgtctatatatgtttatttgagcacaaag

SEQ ID NO: 96595 - DNA, 101598 bp, Homo sapiens
  misc_feature (1)...(101598): n = A,T,C or G
ggacgggtggtgggaaggcaggagcctgggtccttaggctgggggcctctctccatccacccacctttccctcattccctctcttggagcagcagccgcccaggcctttagggagggagggtttctggggcccttgggttggagtggggtcgcgttgcattgtgttcatgaccatgtagctcatgttgaaattaaagtttttggcttttctaacctggctcgttcatgctttgtgttgagacagccctatctgggaagccaggggaagtggctgagtgccacggggtgccaggatgccacacctcgggctttgtctctgcccccttatggtgcaggggcctgttccagaaagtcctgccagagatgcgtaagagggagcagggttctggatgaaccccgtcattctacagatgtggaaactgaggccctgggagaggatgcgattctccaaggtcatattgctggtgattgacaggacccggaagagagctcgtcccatggcattctgctgtgtccaagtggccccagtgacatggtgggtgggtgacagcaaggcctccctcatcctgaagtggggctggccagggacaaagagcatcagctgtctgggggaaagaggccatcattcacacatgggctgattccactctatacactgggcagagaatgagatcgtttagcgcaagagattgacccccttgtcaacactggactgtacacggtcccatttggtccacctttgttccccatgcttctcgtagtgtgagcatctgacctcactaattgcagcgaagattccagtgttgaaagttgcacatttcaaccgttactcagaaaaccagcctcttcacaacagaaaagttgctctggagggtcggctctgaggtggacctgtgcagagcctctcctaagtgctgatgtggccacgccctcatacaatttggactacaaggaatttgctcctacagggtgaccctggagcctggtttgtgcttatggtgtgactgtaatatatttttggaaaggagggaggggacttagccacagacagtaatgagaaactgctcgtggcagaagaccgcctagaggcccgtcatccgtttccaatccctggggagggtgccctgatagctgaagccagaccctcccattccagattcgaccctggcctgggtggggttgtcagatggacttccaccgggccccaagcctgggagcctgcccgccacgcacgacccccgggctcgaggggggcgaaaagcccaggttgtcgcgggcgcacctctccagcttgtgcacgtggcagaagacagaggcggagcccacggagcgggccgggcggcggggcagccagaggccacggctctcgggcgcccccggggggcgcgggctgggggtgcgggcagcgcgctcgggccagtcggcgctggcaacgaggaagcgcaggaccaccaggttgaggaaggcgccaatgaccgtgagccccaggaggatgtagaggaagctgaaggccacgtaggggagcttcctctgcagcgcctcgccgctctgcagtgccacgaagtcgccgaagccgatggtggtgagggtgatgaagcagtagtagtaggcgtggaagaaggtccagccctcgaagtgcgagaaggcgacggccccgagggccagggtggcggcacacgccagcagcccggccaccaccaggttctccgtggacacgcacgtccaccgcaggcccaggcagcacttggccgccaacaggaggcgccgcaccaccgcgttcagccgttcgcccaggctctggaaagtgaccagcgtcagcgggatgcccaggagcgcgtagaacatgcagaagaccttgccggagtccgtacccggcgcggcgtggccgtaccctatgcagggagagcggaggggagggctgtgagcgcccagctccagctgacaacagtcccgcccgcagcctgcctgcccggcgtgtccctccccgtccccggggctggaagggcatctccaaatactagtcctaactaggtcattcatcaccccaaacttcagacaacccaagtgtccctcgactggggaatggataaacaacctgtggggcatccaaacaccaatttttttcagcaactgaatgaactcctgtaacttgcggcaaccaaggatggatctcaaatgtctaagctgagtagaggaagacgagctcgaaagcctacagaccgcatggttccctataaatgacactctggaaatgacaaaactgtggcaacagagaacagatctgtggttgcttgccagtagctggggttgggggcaggcttaactacagaaggcatggtagaattttgggggttgatggcaatgttccgtcttgaccgtggctgcagttacgcggcaggtgttcatctgtcaggagtgtacacaggaaaatggtgagttctactgtatgtaaattatgccttgatgaaaaaaaagcaaaactttccccactttccagctacaccccgagctgcttccccagtcagcatgtcctctccacatgccttttctcctgactacctccccctccactgctcagcctgcccgcactgaacaccttttggttctgattgtctggcgtggcgattcttactgggtcccttcaactactatagggaatctaaacacgactgggcaatcttgagtcctggaacaccgcgccattgcaggggaatgaatgggtatctcattgtgtgtcttttcctggaaagaggagcagttgctttcatggtattctcaaaggagcctgtacgccaggaagagtcaggaggccaagaagaatgcgcctcctctaacagattggccctacctgccaaaaagtaaaaaatacaaatcctttgaccaaggtagttccacagttaggaagttagcccttcaatatacacacatgagcaaaaatatgtgtgcacttgggtcgtcattgcagcattgtcggtcatagcgaaaatgagaaacaatgtaagtgtccatccaaaggggcctggttaaataaattatagtgccatccaaaccatgggatactacagagtagcagttctcaatcgagggtggttttgcctttgaggggacacttggcaacatctggagacattctggttgtcacaaatgggggtgaggagtggggatggctgtgtgctactggcatctagagagtagaggccagggacactgctaaacatcttgcaatgcacaggacagtccccacagccccaaatgtcagtagttccaatgctgagaaaccctacaaacaagatgacgcagctctttagagactgacataaaaacatcaacatatattctataagtgaaaaaagtaagagacaaaactgtgtgtataacgtctatacaatgtgtgtgttttaaaggaatatataggcagagaatatatccagaaggacacacaagaaactggcaactgtatttgacccaggaagaggaatttatgagctgagagacagggtgggagggagaattccttttcattccatacccttttgtgccctgtgaagtgtgtactgtgtgcatatataacttattcagaatatcagcactacatacatttaaaggcctgtggctgcacttccacatttctgttgcatagccctatcactttgcctctctgttacttttgggagaaagggggtctgctcatcactagactttgagctctttgagggcggggacgatggtggtgtagtccccatcaccaaggtcctgcacagagcctgacgtagaccagaagctcaatgagagtttattgaatcaaaccaagctgaagggggtgctggtgagaaacagaagagtctctttaggaataaaaggcttccagctgtttgggactgtgccaggttttggcagagagtgaaatgaataatgataataactaataatgacagtaactaacccatgtatgtactctgcatggattatcagatttaaccctcccaatgactatatgacatgttgttattcccattttatagataagaaaactaggttcagagggacaaaactgcccaaaggccacaggcctgagctattaaccagcaccctccacaggcctgagctattaaccagcaccctccatgggcctgaactattaaccagcaccctccacgggcctgagctattaaccagcaccctccacaggcctgagctattaaccagcaccctccattgcttcagtgcctctctcccatccaagcaaagcccaaattcctggggcctggcacctggctctctgcaaggctggcttcagcggactagaccacagagggtggtggtgcccccaagtggccagaaaaggcaaaattcctcctgtttccacttgagtctcttacatcagcctcccagacgtacctcagaggtaaagaaccagggtaagaggccaaaaccacatggcaagcctccaaagaatgtagataaaggcagagagaacaagttgatggcatcccagaccagtgggcacggtaaccaggagggtctcaggtgtaccaagataggaagcaggggtgtccatgtggacaggagggggcaaaagagctgaataagagctggagccacgttggcaaataatgaattattacaaatgaatagtgcctacttggcttcaggcactgtgccaagcatgttacatgcttgacctcactgaaacctggcagtcacccagtgaggtaggaacaattgcattttgcctttggggaaaccagggcttggacaggtggaatcaattgccagagaaggcaggtggcaatagagatgagaccagaactccagtctctgtgattccagaactcatacttttaactccactgcaaaaaccacagctcatattcacttgcaagagcattatggggaaactttctccaaggcactggctttcggactggtgatccaagccccagggggggtgccgggacgttcacagctggagcctggggagtggctggcaccaagcctggagccctgcagagcccacttctctccttcctgttcccccaggtttaggctcagcaggtaccagccagatggtagtcatggcaacagctggtggtccagatgctccaaaggaactgctctgcatccctgagggcagagtccagagcctgtggttatcagtcattcctttaacaagtatttattgatcatctactgcatgctaggcacgggtcatacagcagtccctaagacagactgggtccccattctcatggggtaacaataacaattgcaataataaaaaaatgatcttttctttgtagtgctctgtatgtgtcatgttttagcacaggccttgtctgtgcatagtctgtctcctgaataataactctcaccacagccctgagataaggccgattagcgacactattttacagaagagaaaactctggctcagagaggttgagcaactcgtctaaggtcacacagcaagtgtgaggcaaccaggcaaggaaaagcaaatccagccacttggtctcccagccccgcttcacctatctccaagccccttggacgttttctgagcactcctgggtcagccttttggcaaactcgatttactgattcctcccgtccctgcctgcgtgggctgacagctccattcagcagaggggggcaaaggagaccagggagacgagggaggcgaaggagatgagggaggctcggtgagccgaaatgacccgtccaaagtagctcagctgggcgggggcagaggtgggaccgaaacccagaggcgccccgggacggctggggctggagcgggcgcggagggaggctccgggcggctcaccgatggtagtgatgacggtgatggcgaagtagaaggagccggggaacttccactggcggccggcgcggtggggctcagcctggagcgccaggcgctccagctcgcggtagtcctcggccgagaagccgaacttcctccggagagcgccccgcttctggaccagcagtcgctggcggccgctttccgcctcggactcgagcgcgtcgaagacagcagcgcccaccagcaggtaacacagggtgcacaggaccagcccggccgcgcgcacgctcggcctccgcatggcgccccggccccggtacccgccgcggtcccaacctgctccgtgtgcccggaccgcgcgctccgccccctccaaccccggccccacgcggcagggttgtgacgggcgaggcggggcgactgccgggaacctggaggctgggatcgccacgggtgggggccggaagaaccgctcccctgtccgcctcccactcgcctgcccggggttcatgtgtctgtgaatagtgagatctgaagcaaaggcccaaaccccgggcctgcagaagtcctgttcccgccactaactcatgttgtgacctcgtgccagtcttccgtccttccttccgtccttccttccttcctttttccctccctcccctcccccctcccctcccttcctccctccctccctcctttccttccttccttcctttcactcctttccccatccctccctcccttcttccctcccatccttcctccctccgtccctcccttcctccctccgtccctcccttcctccctccgtccctcccttcctcccttcgtcccttcatctcttcttcccttccttctctccttccttccttctttcattcagtcagtcaatcctctgacaaatatttaccaagcacctactggtgcaaacaacattcctgttgtaagtaaaagtgatatcctagtgaggagggccagctaacaaacaagaaactaatttaagacaggagtgagaaagaaggaaaagggatagtttcttggggaaggtgaaccccaccatctaaggtggtgcttaaaacagaactgagcatgacttggcagccagaatagcagaggagccggtgtcgctggagcccagagaactggggggcagatactttgggggagcagaaggaaggcaaagaggcaacttcacacagggtcttacaagcccttatgtgggtttattgaaagccatggaaaggctgtattacaaacacaggcaaacaaacacacacgcaacaccaccacaatgatctgattcatattttttaaagagcccctggctgtcatggggaaaagggatggtggctaggagtggaggccagttcgaaggctagtgtagtccaaatgtgtgaagatggagagaaatgaggggatccgggatgcaccggggaggtggagttgggcgcccagctggccacattgcccagcctttcttgcacttagcagggtctatgtgaccaagctttagctcatggaacatgggcagaagtgacatatgccacttccaggcctggcccataaaaccctgccctacacgtgctccatctctttcccccaccagacggctgaatgcagagaactaaagtctttagaagagagggagcccacaaggtgggaaaaacctggggctgaatgacacattgcaaggttgtcccccaacccccaatcaggagccccagttttgagcttctgttgtattaagtcgctgacgtatgttaagcccctgaggcccagcctgccgcctaggccctccaggtcccagaggaggacatacttccatatggaagccgctagaaaggaactcagtcctgccaataccttgatttgagcccagtgagacctgtgtagccctccaccctacagaactagaagataatacatttgccttaagccactaagtttgtaataacttattgcagtggcaacagggaactaatacagtgggtgtgaggattaaatgaaccagtagatgtggagccggagagctgagcttggccctgaggatttgtttagaagtgtgagccactgttacagatatcacaagtgagcagacgcccgggcctgtagggatgtccaacccagtgcctgtccgactcagttcccaggcagaattgggccccagtacctggtagagagggcctggaccccttcttctcccgagaagcaggatgaagctcagtgggctggaagcagcgtgctggtgccactacctcagcctgatttttagcaacagcatcagtaagtttaatattccgatttctgctcagacttcagaggagcagaaacctgggctgaagtctcagagtcggagtgagtggggctccaaggacccacagcccaacaagagcccgaaaagagtttgtggagacagtgggatgtggggaatggcctgatcttaggggaagggcagggcccactcaggggagagttaatgagggcatggttgtggacacagctggagtcaataagacctgagtttgaattccagctcctccacttcctagctgggtgtattagtctgttgtcacacgaccatgaagaactacctgagactgggtaatttatgaaggaaagaggtttcattgactcacagttccacatgcctgaggaggcctcaggaaacttacaatcatggcagagaccaaagggaagcaagctatgtcttacatagcagcgggagagagagagaggagggggactgccaaacacttttaaaccatcagatctcgtgagaactcactcaccatcacgagaacagcatggggaaaactgcctccataagtcaatcacttcctaccaagtccttccttcaacacgcagggattacaattggagatgcaatttgggtggaaacacagagccaaaccataccactaggtgtccataaacagaacacttgtacttccctgtgccttggttttctcatctgagaaacgggggtagtaatgaccctcaccccataggaccatgtagaggattatagaagctgttttgtgtcactatccaggtgccccttagccagtagctgcttctcctcctttttcacaactgtctgtgtgcagatgtcgaaaattctttttccagaagcagggacagggccaaacactctgcctgtgcgaggcataatcacagacatcactcacaggactctcaccttacagcccaggacacagaggcacttaacctgccaagagatacttaacctgccaagtcctcccagccaggctgtggctgagccaggattgaactcagggctgtcyggttccccaggtcatgatccttgtcaggccagatgctgctggctttatccccctcccatcgcctctctggctctcacttgccttgtctccgggatggggccgaggatccgtggctggctttgcttgcccactgttgtgagggccccatgatgcgcagctgagaggcgcttggtcaggtgtgcccactgsgggtggatgttactggggccatgggggagctgtctggctccrtcaggcagatgactctgccctgtgcttggcatttttggttcagtggctctattttaagccagaggaggttagactttgtgtatgtgtgtttctcaggttggaaagctgtcagctgagcagtcaccaaaaacagcaacacccgaggcacctcccccttcagcttacctccctctgcctcctctcctccttcctcctttggagacctgagggaacccagtgattttcctctgtcccatcgccccagaggcacacccgcgtccctcagcggggccttggattttcttctttcagagctccaaggttgtcagctttgaggatgacaaaaaaggcaatcccagtcccaggctgggtgctgggcatgcttctaagcacttaggagtctagatccttccaaagcctctgtgagccaggcaagccattcccatctcagggagaggaaactgatgctcagaaggagagagagagactcacctaaggccacacagggtagggcagtggcaaagaagaacatgggtgttagagttagccagaccttggttgtgtcttgggcaagtaacttcacctctctgagcytcagtttccttgtctgtgacctggggctaggaatatctgcctgacagtgttcccrtgaggattaaatggagtgtatgaagaactgctcagcacagagtatgcccagcaaatgttagtactgtcctccacccaattaatttcttctttgcccttttccacactgcctattccccagggctactgggatcttaagggattgatttctaatagttagactatagcccagtmattttccagaaagccagaagayctggcacgttccctaataacatctctctcttgtctctctcctgaaagaatggattattttaacctcagggaacagtaggtgccagctccttagaggtggccgctgtggcttttctgtagcctgactgtcatttagggatctgggttacaagaaattaaaagctgtctcttgctaatttaagcaacgttactggtaggagtttggggtctctcataattttctgggcactgaaagacaaaacatacggtttgggggacccagagagatggaatcttgagtatcaccagaaaaacacatagccacacccagtgggggaaaccactgctcccaggccgatgaggatattatttgggggacaaatgacaattgtctgaacaagactctgtctctracgggttttaggcagggctgctcagagaggtcctaacatgtgtttgtgaccatttccttggagccactgagagtttgttcttcagcctcatgaggatccatatctctgagttaatggagttattaaaacccttacgctgggctgagtgtggtggctcatgcctgtaatcccagcactttgagaggctgaggtgggtagatcacttgaacccaggaattcaagaccagcttgggtcacatgacgaaaccttgtctctacaaaaaatacaaaaaaattagctggcatggtggtgcacacctatagtcccagctactcgggaggctgaggtgggaggattacttgagcctgggaggtcgaggcttcagtgagccgtgatcacatcacctgagcctggggaggtcggtccatcagccactgcacttcagcctgggtgacagcrtgagaccctgcctcaacaaacagaaacaaaacaaaaaaacctttactgtggtttgttttagatttgaaaatctaagtgataggagtatagaggtttgctaaaccattctctctactttcatgtatatttgagaattttcacaataaaacacttttttttttttttttgagatggagttttgttcttgttgcccaggctggagtgcaatggcacgatctcggctcactgtaaccccagcctcctggattcaagcgattctcctgcctcagcctcccgagtagctgggactacaggcacacaccaccatgcacagctaattttttttgtattgtgagtagagatggggtttcaccatgttggccaggctgatctcaaacacctgacttcaggtgatccaccctccttggcctcccaaagtgctgggattacaggtgtgagccactgtgcctggccaataaaacactttttaaaagaacattttctctctgtccatcccaccctattttttcccctgctgtttatttggtctgagtggaaggtgactctgagagttagagtaaacgagaacattgattgagtagttagtatgatccaagcacaaagcaggcctcacttcatttaatcctcagaacaacagtaggcattgttaattccaccctatagatggggaaattgaggctcagaagtatgcagagatttttttcaaagtcacaattccaaggagagggggaaccagctgctgagctcttgctcttgacagcagcccttccctgccagtgaggagcttagcatggcagtgttacaggtggcagttgctgccatatggcaatttgagcccagttgctacagacagaggcctgtcccttttcctcctgccaaggaccacccctccctttcccagtcagcataatatgttggaatcaagagctgtctgtctgaatcaacgggggcaggacttgcatttcacaagacatcatgggctagaaagagtcaaggcaaagaaagagcctgagacgtgaagaaatacatgtgctaatgttagtgtaacacagagcttccctacccaatgccttagccagtaaccatatgtggccatttatagttaaattaattaaaattgaattaagttgaaatttcaagccaggtgccatggtgtgagcctattgtcccagatacttgagagtctgaggcaggaggactgcttgattcaaatacaggctgtctggttccagaaacctgcccttaacatttattcataatcttcgctttatataggctaaggaggcttttgagggaaggaaagctggtataatgtcctgaagaaagtcctgcaggggctgggcacagtggctcatacctgtaattcctctcaaagtgctgggattgcaggcatgagccaccgtccctggccaattctggtttctttaaagtggggcaaggacctgcagacatttgtatggcaactggagtgcagaatccctctagattcttgtgggttttttttttctagatgttttgtagttgtttcttccacacctaatttgacagtattctttttagcaaccagtcttcattcagttttcagaaaaacaaatctcttccttttgcactcatatttcatcagtttatggaatatctaattcagttacattgttacaatattaagtgtgctgtgtgcaaactgatttgggaacagacccagcagactgttggcaagcatgctcttctacrgccaagagccaaaggcgaccaggggcctagggaatggcttactagccataagcattcagtatgcctggggcagtagcgttgcattcagagagcatggagagcgctggttagcctggcaagctggttaaacagattagtaaagaggactttgtgcactaactctggaaaagactccatagtgtggaattgtctctggaagacatgtgccccactggagactacatttcccagcatccttggcatctaggtgtgaccatgtgactagtctccaccaatggaatgtgagcaggagtggtgagtgtcacttccaggcagggcctcgaggaagtaggtgagcttctccatccctgtctgtctagatgcagagaacccaaagccctgcaggatggcaaagctgcaacatggaagtcacccggatcaccacgtaaaggaaatctctccaaccaggaacaaacacctgccttgcaatattaggtaagagataaactgctattgtgttaagccactagatcttgggggctgttcgctatagcaactagcattaccctctttaatacacttcccatataaggctgtcatgaggattaagttaaatgacaccatgtaagagactcttaaatgggacttttcctattgtctcagatttacagctaaagccccaaagccaaggacggacaagaggtgtcaaataccaccatatcatgcctgcaggaacttttttttttttttttttttttttttttttggagacaggggtctcactctgtcacctacgctggagtgcaatggtgcgatcttggctctgcaacctctgcctcctgggctcaagctatcctcccacctcagccccccaagtagctgggactacaggcacaagccatcatgcctggctaatttttgtattgtttgtagagatggggtttcgccatgttgcccaggctggtctcgaactcctaagctcaagcaatccaacctcctcagcctcccaaagtgctggaattacaggcgtgagtcactgtgcccaccccctgcagtactttcttcaggacgtggaagaggccattgctaggctctctctggtcctccaaaggccagagcccatattgcagttcgggacatggctgctttccaaactaggatgggataattttttaaatccctgggctgggagacaggaggcctggttctcaaatggactctgtcccagacttgctaaatgaccataggaaaaacactattctacatggaccccattgtggcccacctattcatggcagaggagtaggcaagagaaacacagaaacaccctctaagtgctttgctgagggcccattaacctcaggaaacagagccctgaagatgttgtgagtcctcttctctcagggccacggaaccttccccccacctcctctcccactgccaagcttgatccccagggctctgagccacacattccaaggtagagcttgagccacacgagtccccataacctgcatttgcacccttctttacctgcacggtgtgaatgttcacctagagccaggaaaacagcacaagaggtacccaccaatgaggagtgggtgtctgggctgtttccagaccccatggcaactacatttcagagctgggcctgtgttcaagggactcaggcaagtagttgagataataataatgttaatgtttgaaaagattgtagcatagtggaatattctccaccttccagktccttcctagggcttggtgcatgtgcatatctccttccggaatcctggtcaatactaaggtaagatgaaaaaactgcgggtttgggataagcaggaaaaaagaagcaaactctcttagtggcrgaacttactgaagttaagcttcragtctgtattggtcaggactcttggttgcaagtgacagaatcccaactctgttagtgtggttaaaggttaagctgctgtaacaaagatgcccagcagtgcagtgacttaaagaagacaaaagtttacttctttttcaactgcgctgccaagttgtcaaggcagctatgatccagggggccactcagagacccaggtttcttcatagtgcaccccatcattccttaggacagtggtttccagagtggtccttggactggcagcttcaacagcacctgggaacttgttagaaatgtcaattctccagccctatcctgggcctagcgaatcaggaactttaggtgtggggcccagccatctgtgtctttacaggccctccragtgattctgcaagtttgagaatcactgcactgccccaggatactattcctgtctgcacagtggaagctggggcacagagggttgcagccaatgggaaggggaaagaactcgaagcaggcacacaaacttgtaaggctcaggtcaggaagtggcacatgtcacttcccttcatattttattggtaaagattgagtcacatggccacacctagctgcaaaggagactgggaaatgtagtctaggcatgtgctcagatagaagggaaatcatctgagtaggagaaagaggcagtggaaagctctgtgaactcagcattctggtcactgggacagtataaaatttgagatcatttgtttcatgactttgaaccatgactatctgtcccatggtaaaattcctatactagagaaagaaggtagtttatccacattcttgtctaacacaaacatttgacatttctttattgtgaaatatttaagacattgtggcaaagactgatggatgtttgtgatagcacatgaaatgtagatagactacatttcccagcctcccttgcagttgggtgtgaccatgtgactgagttttaaccaatgagacaagagcagaagttctgtgtgcaacttcctggctccggctctccatgaattgattgtctgggcttcctccctgacctagtcaggccttactggatgcagatgattgggagaaggagagaggaaggaggagccctagacgaaggatcctgagtccctgtatcaccatgtgggggagcccaccaagcagaagcacccatagggaatgttacgtaacacacttagactttgtgctttggctagtaagcattttggcagtgacgttccaatggcgctggtggtagtggaagtggatgcaggtgataaaggggtacattgtctgtacagaattttaaaacagtaatgaaaaggtctaaaagtcaatctgctttttattatcaccacatgccagcaattctaaacattgccagtgttaaaatattccttctcaccagggagaaaactcccactgttagaagcatttgaaccagagcgattccatcttgaataggggctgggtaaaataaggctgagacctgctgggcttcattctcagatggttaaggcattctaagtcacaggatgagataggacgttggcacaagatacaagtcgtaaagaccttgctgataaaacaggttgcaataaagaagccggctaaaacccaccaaaatcaaaatggcctcgagagtgaccgctggtcgtcctcactgctagactctcaccagcgccatgagagtttacaaatgccatggcaacgtcgggaagttaccctatatggtctaaaaaggggaggcattaataatctaccccttgttgagcatatcatcaagaaataaccataaaaataggcaaccagcagccctcggggctgctctgtctatggagcattattcctttgctttcttaataaattcactttcactttatggactcgccttgagttctttcttacgcgagttccaagatccagatccctctcttggggtctggactgggacccccttcctgtaacactaccacctcccctggtcccttggtatgccactggatttcgggtttatttattactgggatctggtttaccctagctaataaagacaggcataaaggtataaatagcaatgacgaacatccatatgtacaacatgttttttaaggaaaaaaacattacaaatatgactgttgacatgaacatttaaaataaatttagatttattctggcaactgcagtctgatacttaagcaatcttcctgacgtggggaaaagactcagggagactttgcattccacagatgccacatcagccatctggagtaggcagcgcagcaccagtttctgccaccaggttctgatttagccgacttcttgattgcaacctgtcttaccacaaggtctttatgatctgtatcttgtgctgacctcctatctcatcctgtgacttagaatcctgtgacttagagtagccattctttattcctttactttcttaataaactcactttcactttatggactcaccctgaattatttcttgtgcgagctccaagaaccctctcttggggtctggattgagacccgatccaggacataaagatcatcagccatctggagtaagcggtgataccaccaggttctccaactctgggttttagtcagatggccacagagcaggggtcaagagaggaaggcaggggagtgggactgcagtgagatgtctcagagactgagagaggcaggggggttagtggacctggagggtgtgtccttgaggtgagtggtagtgagggggttgagagggtagagggagtcaagtcagtcacctgtgtcccacccctgctggcttcagggcaggggagaagctgctgaagaggttcacgttaggttattggccatccaacagagactggatgaaaagacctggcccagcgaagacgttaaaacctgtttcatgaaagccagtggtgagggggcattgggcagtggaggtgtgaccagaaaggggtcctgatccagaccccaagagagtgttcttggatctcctgcaagaaagaatttaaggcaagtccacaaagagaaagcaagtttattaagaaagtaaaggaataaagaatggctactccatagacagaagagccctcagggctgcyggttgcccatttttaaggttatttcttgatgacatgctaaacaagaggtggattattcatgtgtcccctttttagaccatagagtgtaacttcctgacattggcatggcatttgtaaactctcatggcgctggtaggagtgtggcagtgaggactaccagaggtcactctcgtcgccatcttggttttggtgggttttggccagcttctgcagcctgttttatcaacaaggtctttatgayctgtatcttgtgccgacctcccatctcatcctgtgacttagaatgcctcatcgtctggcaatgcagcccagtaggactcagccttattttacccagcccctactcaaaatggagttgctctggtctaacgcctctgacaaaggggccatagataaagaccaggccagtgtgatggggccacttgcaaccaagtttgtcagccaacctggaggtgaygaagaggacttggcccctacttctgcccttgggttctccctgatgtcataattcatgtcagtggaagtgaaaaaagatgaattcttgagaatcagatggctgagaatgcacctcagaccctagaccacattttagccatggagaggcaggtggccttttcgttagcacctgacacatggtggccattggttgcctcccctttcctaggcagaaagtcgaggggtacctcccagggaggctgttggagttgccccttgaagacagcctcctcctggcaggtggcctctcggctgttcatgcatggaaatgccacaaggaggcagcagcacatcactgctgtcctcccccgagctggagctgtgtctgattttaacgagatgggaggtttgttaaaatagatttctgggccctactcccagagcttctgtaggtctgggatggggcatttctaacaagtctccaggtgatggctgctgcctctggtcaggtacaatggatctatctgttagaagtcaggatagtgattatcttgtgggtagtgaagagagggagtccaaggtggattttggaggtgcaggcaatgcatggtcctgctgttgacccaggtactgattgcatgggtgtgctcatttgtgaaaactggactaactgaacacttttatttgtatactttttgtttgtttgtttgttttgttttttctgagacagggtctcactcttgtcacccaggctagaagcagtgatgcaatctcggctcactgcaacctccgcctcctgggctcaagccatcctcccacctcagcctccagtgtagcttggactacgggcatgtgccaccatgcccggctgatttttgtattttttgtagagggggtttcactacgttacccaggctggtctcgaactcctgagctcacgcgatccacccgcctcagcctcccaaagtactgggattacaggcatgagccaccgtgcctggccttgtatactttttatacttcattaaaaattcaagaaagaagaaaaagccaaggaaaagagaaacaaaatggaaagagaggaggagagaggatgagagagagagagacagaagagagaaacggtgagagagagaaacatagagagatagaagaaagagagagaaacagagagagagggagagaggctgggctagccgctggttcagctggttctgacttcccatcctggattgtgagtggtgattctattcttcaagcctcagcttctcatctgtaaaatgcagatcacagcaaccacctcattttcaataagagaaggtatagaaagtgtgaaaggaaaatgaaaaccccaattcactctgccaaaaggaaaaaactaagctgaaagttgagtcatgcaacaagctgcctttcctttgttcgtaagcagagagccacagataaaaggccaggtatctccacgagtagccactctgtgttcaccttatcttatgtaaagttacagagcgtgagacgaatacataatygaatacataatttccctacctgctctttttctcttgcaatatgtggatttccagaccctccttctttcccctccagcctgctttcccctttaaatactgaagccctcaaagtcatctttagagaaaggcacagacctctctactgggcatgtccttaaccttggaaaaataaatgtctaaactgattgagacctgtctcagacactttctggtttacaaaagcatcaagaacacagtagctgctcaataaacagtgagactgtaagctgctccccttaagtgtgtgggctcccctgggcgccgtcgttgttcctggatcccagagcagggcgtgggagggcctggctgtctgtgtttgctagattcattttaattgtaactagttaggatggggaggaccacgggtgtcctggcaggcaggaggacctcctggggcctgttgatgcccttcactagggaaacttyttccttacggctctcggctggaggaggatggtgtgccaagggcsccaggaacaggccctgtgccaggtccttcagccacagctggtagcggagtcctctccagaaagcattytgccccgggacactcagcttgccccgcagacccaggccagcactgaggaagtgagtgcagaagcttcccatggaggaatggccaggcctgggcacctgtggccgtgagagcttcagagagggtaaacctggtttgcccctgtgactttgcccccgacacgtttcctcttctccacaaacaagaggattcccagtctttgccttcacaacacttgccaagaattgcaggcaggatgataataatagcttcagttgaagaacatggaggaattaccttcctaatactcacaatacccctgcggagtggatactcactattttttttttttttttttttttttggcagagtcttgctctgttgcccagactggagtgcagtggcatgatcttggctcactgcaacctccacctcctgggttcaagtgattctcatgcctcagccttccaagtagctgggattacaggtgcgtgccaccacgcctggctaatttttgtatttttagtagagatggggtttcaccttgttggccaggctggtctcgaactcccgacttcaggtgatccgcccgcctcggcctcccaaagtgctgggattacaggcgtgctcgccactgcacacagccgggtactcactttatacagccatcctgtggggtgggcactactatttattcccattttacagatcaaaaaactaaagcgccaagagttaggataacggttgctaaaatttattttattttattttattttgttgcagactaccacaattactacttgagactgtcactatgacagttattactgttactacttgaggccgtcattacagcagttactactgttactgcctgagacttcattacaggactgaacgaggggacgaatgtagaaatgaaaacttaagacaaaagaaactgttgtaaaggaaagggccaggggaagaagaagagaactccctgcttctagtgagcaaaggcagtccctgagcttccacagcccttcctatttattgggtagaatgagcagggaggaggagrtaatgactggttagctggttgattgatcacagattcatattgttactaacaggtttcaattaggcctaatcacaagaaacactatgcttggagcgtgactgcsctcagcattccttctggatggcagaaacagtttgtcagtttgccaacattctgcatttatgagaaatagtctgctgcttactcatatagcttccagtggtatactgagttgatcatgaccctcaatctttcggcctccaatatttatttatttatttatttatttatttaatgagacagagtcttgctctgtccaccaggctggagtgcagtggtgcgatctcggctcactacaacctctgtctccccggttcaagcaattctcgtgcctcagcctcctgagtagctgggattacaggtgtgtgctatcacacccagttaatttttgtatttttagtagagacggggttttgatgtgttggccaggctggtctcgaactcctgacctcaagtgatctgcccgtcttggcctcccaaagtgctgggattacaggtgtgagccaccgcgcccggccctaagtttttttgtaaatcacgtaacactttcaacaatcctctgtgttgagtattgccattatccccattttaaagaaggggaaactgaggcacaaggaggttaagtactttgcctaagatgacagcactaggaaatagcagagccaggatgcacacctgggcaggttggctgagcccactcactctaccactgcacagtggcggctcagctgtgaggtcatgggcctgagtcccagctccacgactccagggtaacttgttaatcactctgggtctcagtttactcatctctaaacagggagtattagtggcactttcctttaggaatgtcccaaggatgacgtgcagtggtgtggacagagtgcgtggcagagagagccttatgtatgggagtccctcggtgcacattcctcattcttgtccgtgttctccctgttttgggggatgttatcagaattttgcctggaaatgtgtttagggtttatccttgcagaaccagacccatggaaattctcaatctgtgagagaccaacagccattctcaagagtcagataaactcaggttggactagcatcccaccccagctgcagaccagcttttagacagctcgctttcccgggtgtttccttatccctgagctggagttagttatatttgccatgcaggggctctgtgaaggttacatggctcaaactcagcatgtgattctcaaactaaggtttctggagggggtgatacctgagataagtgttgggggctgggcagcaggggcctctgtgaccagcaaccgtacctggggtgggtaatttacaaacactgtgtctgggaattgccctcattctcagaaccctcctgcccttccttgtcctgcatctcccaggctcccctctcttccaccttcccagcaggttcgactcatgggaggcataactggaaacygggggatagcagcaggcagaagccagggcaggtctccccacctccatctactttttgttaggtctgcgaggctgtgtctccttagcggctgcagctcccagcagacagccttgccaggtcctcttcctctgcctgctggtgccagctctgggctctgccctccctctgcccctccgccccgagggctggtctggtgttgaatttctcctcttgcatcacacggtcccctacttggcctctcagatgggtgactaagtcctctcattaaattccttttgttttattatgttgagtgaaagacgtcattcattatagagtacctgctgtatggttgtattaatgagaagttcaagaacacgaaagctcatctatggtgatagaaatcagagcagtggttgccttggggagcagggggataactggaacagagccagagggaactccctgagatgatgaaaatgttttataccttgattgaggagttggttacatgagcgtgtacgtttatgaagactcgttaaaccatatgcttaaaatctgtatatttaactatgggtaaattataccttaataaaattagtttaataagaagaaatccctgtttaaataccaagagtgttttctaatttcctgcttggatcctaatggaaatacagttttactttttaaacaaacacaggtagaccatggaggaaaatgtaaaatatatgtatttggtgttgggtgtttttttttgtttttgttttttgttttgttttgtttgtaaacaataaaacatgagacttcgaacaatttcacccttgggttagttgatttcaggctatgctccccagtccctgggaggcagccttcattctccctgctcttctctggtcaaaaacgctgggaagcactggtctgtataamgtgctagtgcctagcacatagcaggcgctcaagcaatgttaattattggctgggcrcagtagctcacgcctgtaatcccagcactttgggaggccgaggcggcgggcggatcacttgaggtcaggagttcgagaccagcctgaccatcatggctaaaccccatctctactaaaaatatatttaaaaaaaaaaaaaaagccgagcatggtggcatgcgcctataatcccagctactcaggagtcttgaggcaggagaatcacttgaacccgggaggctgcagtgagtcgagatcgtgctattgtactccagctccagcctgggcaacaagagcaaaactccatctcaaaaaaataaataaataaaaaagttaattattattaatatgaattgggtttcttggatcacttgaaggcctgtcttctggctttctttaagaccatgtgatttcaccttgtgaggttcacagagaactcygcccctgaattctgccccggataatgggagggctttctcagaaaacacaggcctgacacacaagatcacgcataggcttgtattcaggaacaattttacaaactccaraaaaggcagcaggagatccagaatctctgtgtgccttctcttcatcctacccccagaaaaatggccagtccagcccagcacctgctgcagcctcaatattaagggactgcttgtcccatctcttgcccaggggaagtcggagagaaagctcgcccgtgtgcatgtttgatataggctgtgtgtgtaggcagggagtgggctagaggaccctggacaccttggccagcctcctaggcagtgagttagaggaaagrggactaggtcttgcacctctgccatacctcgggatccagacagaccaggcagcrtgttaatattggtgttctgcatggtggacccaagctaaagtgttgcctgcagccaagggcctgggcacggaccatcttccatcagcccagggcccaggcacagggccaccagctggggatggtggacaccrtgtccccattcccagcccggctctagaaggcactgttttgtggactgcgacccctggagggtgggcagggcctggacaggcacaggcggcgctgggtctccagtcggcagaagcggttctggttggacacccgggtggccatgcccagcccacaggtggtcgagcagggtccccaggccgtgctccattctgggcaggggacaccagggggcagggaagagacaaggccagaaaactggggtcctaggggggaaagaacaagagttagcactgagcagccagggctcagcagctcaatcaacccacctgccagcggccacggcaatcttggtcaaatggctcagcctctctgcatctcagtttcttgttatgtaaatttcttaacagtggatggcattgaataaaataatgggcatgaagtgcctagcacagtacctggtacttgtaagatttccataaatattagttatttggcaaccagagtgtgttggtcacgatggtccctcagtgaaccatggttttctcgtctctttggataaacagcattttacaggcagggggtgcccagcctgtgtggagtrgtgctttggcccagtggcaaggatgctaaagattccaggattcttgtgccaggaacaagatggcaggttcaccatggtctagctttttctctgctccaagtctccctctgtgagtattttggtgtccttccttctagtcttacactagaagtcctcaactagggtaattttgcctcccaggaaaggtttggcaatatctggagacagttttggtgatcacaactggggggatgctactggtatctagtgagtagaagtcaggaatgctgctaagcaccctgcagtgcacaggaaaacccccccaacaaataattacttgccccaattgtcactagtgctgacgttgagaaaccctgatttctacccacatgtgtgtgctgtgtatgcatgtgtatgtgtagatatacctgtatacgtgcatagggacacacttagttgagatcgagttggaaatacaccttcttatcctgcttttatccataaggtgaactcactggtgttttcctatgtatttaaatggatatatcatattccatcacagggataataacggctacctctgatatagtaccatgtgccaggcactgctacagctgcttgacttgaacaaactcaagtagttctcacaacgctatgaagtggatgctcttattgtccccattttacagctggagaaactgagacacagagaagttaagcaactttctcagagtcacacagcaaaaaggggatggyggggctgttgcagatgccgtgcacctgacccataacacgtgactacctcttgtgggtggcagcagcatttatgaaatcaatcctcctcttttcagttgccttttttagaaagtcacattcatgtgataattttcaaaaagcaacacagcaacaacaaaaatctctaaaattgaagatttatagtgggacggtgggaggtaactgtcttttctccatctctagcccacccccggcccacattccagagcagccactttgcctcgttcagttttgagttccttttttagtaagcccaaataataataaattactaaatatattaatatgtatcaatatattataaatacgataatattatatattctaagagcttagctctattatatctctgaaatgtgagaatttggttcacataccctaacccacctttcctctcccggctctgtcacccagtttttatttttaattatttatggttttaaattacacatctcaaaggcagtggctttttgtttattggttttaaagagggaggcctggtgaccctccactcctctttcttttttcctctttttgagatgaagtttcgtgcttgtcggccaggctggagtgcagtggtgtgatctgggctcactgcaacctctgcctcccgggttcaagcgattctcctgcctcagcctcccaagtagctgggactacagatgcccgccaccatgctaggctaatttttgaatttttagtagagayggggttttcctatgtcagccaggctggtttcgaattcctaacctcaggtgatccgcccgtcttggcctcccaacgtactgggattacaagggtgaaccacagcgcccggccctccactcctctttcttatctccctcctcagcctccgcccctcccagcttctgatgtgtccctgggtcctggtacccaggaagccgcgccccaccccaccccctaggtggcccttggcgcccccaggcagtcctgccctgacctggaccaccgctgcgctcaccttgggctggaaggggctgggtccccagtccccctccttggccgcacacccactcagggcagcacttgcccaggacctcgaccctcctggggtgggggcagtcccagctgggcagccgcacatcctcgctgcacagcggcacgcaggtgaagccgccgtcctcgcagcggcagcggatgctgcagtggggctggaaggtctccccttcccgatacaggcggccgttcacctcacagctgctgtcgtcctctgccactgcggaggaaaaaccgcacccccatcggtgacccgcaaagcggcacagccttctctgcagagctgcccagatcccgctgcctgaggcagctgcctcacagtagctgggccctgcccagggctccagcccaggatatgcacctctccccagccctccaccagcctgctggggcaccctggatcccggcacagggattgcaagaagacaggcctggattgaccccccaaactctgccctttcttagctgtgaacctgggccaagtgatttcacttcttcttgcctcagtttccacatttgcaagctgggatataatggtacttattttccagggtggtagagactactcggaatgataggcgtaatgatcacaacataaaagagaccttccataggtcctagctactctgttattatcattagtatagttactatatattaataaagtttaagtattctatacacgctgagatttcatgcaacaaagtcgttgtccacttgtgctgtcatcactgtcaggtsagggcttaacttgctggctgtgtgtctttgagtaagttacttaacttctctgagtggcctgaactacagcaatgatgagctcagtaatcgtaacttcaggttccatgggatgacatgtccgtaccctctagcacacagtgctaggcatggcctaggtgctcagggaacactctttcaatgaagccctcaagatatgggtgttattgccacttcctccactggacatgaactccttgagggctggggcggccagtgtgcgtctctgcaccctccggtgggctcagagcctaggtgcgacacacagtactgtaggaatgccccttcagtgaatagctggcataagccttggcacatgagagaccctgataaaatagccctactccttatcattccagagatatttactgtttcccgcctgtgtgccaaccactgtgctcccagacagaaagaggacagttcctgcctygagggactcatgggcttgggaaagggggacgggtgtgagggcatcatctccaagacagaatgaagtaagagcgctggtgaagygtgtgagctgctcaggaagtgcagacgggaaacagcgtgtgtgtgagacctgggtggccactgagctacgtctggggaaaggactcattagcaaacaagttctcccagatcttctgagaaaaccttccagtaggtctgtacacacacaggggtttcagaaccaaaaccacacatacttaggttccaactctggctcccacttgtggggcctggggcaagttattttgcctctctgagccttggtacccggctcacagggctgctgggggattagatgagctaggggacttacagcattttgccccaagcctggcacatagcagatgctcaataaacaggagagggttatgcttccacgtagcatctgctatgtgccaggcttggggcaaaatgctgtaagtcccctagctcatctaatcctccagcagggaaggccttgctgagaaataatgctggtagagggaacagccagtgcaaaggccctgaggcacgagtgtgcctggggtatttaaggaacagcaaggggccaatgtggctggagcagagagcaggaggagaggaggtcagagaggaagcatgaacaggatcctgttggggccttgtaggccactgtggggactttggcttttcctctgagatgggaagccaccagaaggcttggggcagaggagggaggtgatctggcttatgacttcccaggagctctctgactgctgtgttgtgaatagaccaggggcaacgacagaaggagggagatgattatggggctactgcaaaatccaggccaatgatgacggggctcagaccagaagggatgggagtgtcggatgctggaaatacacgatgaatttgctggtgggtggtatgtgggaggtgagaaaagagagatgtctagaccggctgtggtggctcatacctataatcccagcacttagggaggccgaggcgggtggatcacttgaggtcaggagttccagaccagcctggccaacatggtgaaaccccgtctctactgaaatactaaaatacaaaaattagcgaggcatggtggtatgtgtctgtaatcccagctacttgggaggctgaggcgtgagaatcgcttgaacgcaagagatggggttacagtgagctgagatcctgccactgcacaccagcctgggtgaaagagtgagactccatctcaaaaaaaaaaaaaaaaaaaagagagagagatagagagacctctagaacgactcccaggtcttgagtctgagccatgagaaggatggaggtgctctcaacagactggggaggccgttctggggggcggaagatcaggatcccggcattggatgcgctgttatcacgatggtgaatctgcagcacatctcacagctcagagttggcccttagagaagagcgttcaacgagtaagtgatgggagaggtttttggcagtatgttccctgcaaagccctagactgagcctttgtgatgtcttagctggactctttggggttcaccagttcccggcctctaaattcagtttaaatcattaaacactgttgagcacccatcatgttgacagaccaaggtgggaagttgcaggaaggaccagggacccaagtacgcctttggcctgcaggtgtttgaagtctgaattaagatggaataagaaaaatcccttaatacagttattaacaatcacagcctatgtactaatcaactgctgcatgtcaggcagttgagcaatggagcttgtggagccagctccctgagttcaaatctcagctctgccgcttatgagctgtgtgaccttgggcaagttgcttagcctctctgtaccccttttttccatttataagagaagggtacctacctcatgtggttgtgagattaaatgagtttatatttgtgaaaccctcagtgtcttacacgtggtaagggctgtgcaagtgtaaaataaactctgtgggtgctgtttacacgtgtcacagcaaatgtaaataacagctttgtaagcgaagtgttacttatctcaattgttcttcagatacattttcataagcaatcatccctcagtcagtgtaacgaatcaccctccttatccttacagtacttgtaaataaagcatttcacatggagttattacttttttttttttttttttttttttggagatagggtttggtctgttgcccgggctggaatgtagtggcgcaaccatggctcactgcagcctcaaacacccaggctcaagcgagcctctcacctcagcctctcaagtagctgggaccacaggcatgtgccaccacacccggctaatttttttttttttttttttgatagagagaggatcttactatgttgccaaggctggactagaactcctgggctcaagtggtcgtcccgcctcagtctcccaaactgataggattataggcatgagtcactgtgcctggcctgttgttttttaacaaggcttttcctacagatgaattcattatcaatgattcatgagcttctctctctctctctttcgttcttatttttataaaagtgtgacatgcacatagatgaaagaggcaaattgttctacaaggcttattattaaaaaagaaaaaagaagaacaatctcttgcctctttgcatttctctaaagtgatggttcccaactggagattttgccccctggggaaatttggcactgtctgaagacagactgtcatgacttgggggatggggagtgctgctggcatacagtgggtggagttcggggatgctgctagaagtcttaccatgcacaggacagccctcccacaacaactaattctctggcacccagtcactggagccagcttgcaaagccctgccccgaagcatcagagaataccaaggcctagaagagtggtgaggaatgtcacatgctcgggtgactgctgaatacatggcaaacccaggatcccagcagtgctccgagggcccccactatgggagaagacagaataaactgttccttagagcccgttggatctggtcccgtgccgtgtgacatgaagcatgtcccttaatgctggtgaacctgtttcctcattcataaaataggtctgaargtacttcccatcatagggttattgtgaggatgatgtgacttgtgtagtaagtgcttagcacagttctggacacatattatgccctaaaaggttgcacttttattttccccaaagtgttgtaaggatcctgagaagggagtggtggcatctggtttgaagaatctgggggggcttctcaggggagaagctgtttgaacttggctttgaaagttggcaatgatttggacaggtagggatggggaaaggttattggggtagtgagatggtttaagcagaggccaagaagggagaggagggagtggggagtgggctttgggacaccaagttcagctggaatggatgggatacctgaagtgagcacccaaggaggtagagagaggagggctgcactttgatccaggacaccacggccttgacctcccrctcacacccgcccccactcagtcctgcaaacctgcttacagaggcacagggccccccgkccaccgggtcctgccccgggctggcagaccaggcyctggctggcgtcgcagacgtggagttggtcgcagggctcccccagcygccgtgcacatacccggcagcagccacagccatccagcaccaggggtactcccagygggcatcggggaggtggccaggggcaggtacatggtgtcgggcacagctgggtacgcacctgaagagacagagacctcactcagccacgggctttcgaggtgggcagtgagaccctcacaaccagccacttctctgccaggctgggtagtgtggtgtccacaccttagcctcagagccatgcagacctggcctcaaaggccagtagtcccacaacatgccctaagaggcagtatggcatgtagttatgggcaaggactctggactagagttccagttctttattttttatttttatttttggagtcagagtctggctctgttgcccaggctggagtgcagtggcgcgatcccagcctcacttcaacctccacctcctgggttcaagcgactctcgtgcctcagcctcccgagtagctgggactacaggcgcccaccaccatgcctggcaatttttgtatttttaatagagatggggtttcaccatgttacccaggctggtcttgaaatcctgagctcaggcaatcygcccgcctcggcctcccaaagtgctgggattataggcatgagccactgcacctggctagacttccagttctaattctgccccttattagctgagtgaccttgaggaagttacttaagcattctgagcctcagtttcctcaaagtatctaactcagaggattgctctgaggagtacatgaaatgctgcacagcaaaccctcagcacagggcctggcatgcagtaggcgctcactgcacttagctttgatgatccttgttgttaatggtggcagagggctcagccccagccctctgggagcttacagaaaggcaaaagcaacaagtcaaggatgaaaatggtagggtctggtacattttccagcatacggatacttatcttaggactgaataaattgaaccatatcatggatgtttttggcctttcgatccattcagcatgtgtcccagctctggaggtacatcacatcagccaggagacttgggaaaatacagacccccaacccactctggggcttacaaaatcagaagtcccagagtcagggacctggaatctttatttttaataagctgtccagtggcttctgaagctcagctaggttttcagcacctctgccccagtctaacctcctccccctgccaggtacggatggggaaactgagctccagagagggacaggaacttagcacacgtcagtgtgttcgattcagggctgggagcgtccccggtcctgcttcccaagtgaggactcagggacacgggatgggggtagactgtgtccrtaagccagggacccactccccagagacaggatcagggtatcagcccatgtggcctgcctgaccctcgccacccacatcagagaaacaaccaaagcatacagcaggtgccgtgagctccctgtctgcccatttgaaggtggggaccaagaaggaagtataattcaagatgcttccagtggccccatctttggggggccaagtttgagtttagtaggatccttaggggatgagggtttcatctagaggaatggaggcttgcagtttataatgatggaattaatgacctcatatctcctgtgcagccccaaagcaggcaatgacccctttgctctgcctcaccctctgccccgcccagtgcccccactacccacaatcctgcaaacctgctttcagttcccggcaactcccacgccggccactaggagccattgcaaactggctgaccagcctctggtgggggccacaaagtaggaggcgatcacagcccccactgagacagcactgagtagcagatggacacacggagctaggtgtctggctgcctcacaagggagtggatcccatcgctgcaggctgttcagattctagagacgatggcctagcctcgcccctcaaggtgtggtctgaactagcagcagcagcgtcatctaggagcttgtcagagaggcagcatctggagcccctctataaatccgaagctgaatttttatataataaatccgaatctgcattttcttttctttttctttcttttttttttttttcttttttgagatggagtcttgctctgtcacctaggctggagtgcagtggcacgatctcgactcactgcaaccttcgcctcccaggttcaagcaattcttgggaggcctcagcctcccaagtagctaggattacaggtgcatgccaccatgcccagctaattttttgtatttttagtagagacggggtttcaccatgctggccaggctggtctcaaactcctgacctcatgatccacccacctcggcctcccaaagtgctgggattacaggcatgagccaccacgcccagcccgaatctgcattttcataaatccacaggtgattcacatagaaacggtctaggcttttgggttcccttctaagtcagaggttcagctcccttggcttgtgggcaatggagggaggactgtcagaaatgactctcaggtccctcccacctgaaaacaggagtgccaggaaatagaccagcagctgtgcaccttggctcccactgtggacccctctactggccatgcttgtcagggggcaggactctgtaggccccgatacccaggagaggctattaatgatatcaactattctagtgtacaattatctcatgtgataccatatgtatgtcatgtgccaagtgctgttgtctcatttacccctccaatgtgaggtgccatcattatgcccattttaaagatgagaaaactggagctcaaascgtgtagtaacacagccagtaagagacagaatcaggattgacatccaagttcaagttgacatccaaggcccaaactcaagttgtcccattgtgcctcagtttccccagggccttgctgtgatatctggtggtggggggcaaggctcatgatatctggggcaggagtactgggcatggagttttttgggcaagagttgagattcaagttctgccagtgacttgctacgtgactgaacatgtggacaaacggctttggaaggtggaggtgaagctcagttttctcctctgtaaactggagtagagacaacctgtttctgagtgatgatggagattaaatgaggttctggccagtccttgatcaatgtgattttgcttgtgtccaggtgtctgcctcctgccccggtccacagccaggagccccggagccaacggccagcctggaagacttacagttctccctctgagggttgctgtggctttccatgttgtggtgactaagtccctgtgtttctgtgcagtccctgcttcctgggaccagggaagaatggtcccgtaagtctcaccctaatggcaagtctaggacagctttactttgttctcgtataatcctgggccccttctccctcctagagccccaagtcccctattccaactacccaagccacccacactggcatcatgccctacccatcccctttggaagaacaaacagcaggacaggatgccagcgtggttctcaggcttcccaggcacgaagacttggagcctgagggagagaagctcctgcccgtgctcctcaaaggagcgtgaaaatacagtgagatcgtggcttgtggtggggccgattccatggctctgggaactcagcatttgccgaggggatgacaaggcttagcagctgtggccttggtccagtttgggcttggggaggcacagactggagtgcttctccccctacatccatgtcattctgggctccaccatggctctcctctattgctctgacctttctttgctgtgtggctttgggcaagttgcttaccctttctgagcctcacttgactgaaaactggggttgcaagttgcttaccctttctgagcctcacttaactgaaaattccttatgggattgttgtgcatgttagacaaggtagatgtcccacaggctctttggtgaatgtcccatgcagcattcagggataaggccattactccacagaggtgtctcctgttcccctctagctagggcgggcgggtcactcactgcctaagagtccaacagcattgatgcccttgcagaatgaaccttccaatcagctaggcatccatccaaatgctggctcagagttaggccaagcatgtcatgtcttgagtgcccccattcataatgaggatacattaaagtcctcttcaatttgcctggtaagtttgatgaatgatcatgaatggtcttcacagaggcctcacaaactgtatacccttcacctgggaagatgctgaggcccagagaaggcaagacacatatctgaggtcacacagcagggctggccggaggcagctctgagttccagggagagaagccctgcttaggcatgggggccagactgtgcccaatgtggggccctggaggaattctgccaagggggtccttggctgcgattttacatccccaccccctccacacccaaatagtcagcagtgcattccagggcccgggcctccttacctttgagaggaggcagaggagggagaaggccaggaggtgggtcttcggtgtgcctctcatgtcccctgcagagccagctttgagcctgggaggcggacctgtgagtctttatgttccggcagctgtgaggtcactcccaggcacacacaggcacacgcacgmgtacacacrcgcgcgcgcgcgygmrcdcacacacacacacacacacacacacacacacaaacacactagctttttcattccttgcttcgcttcccatcctcatggctcaaaggatgagcccatttacctgaaggtgaaactgtgaaggccaccaagggggtgcctgtccgtgtgtgtgtgtgtgtgtgtgtgygcgcgtgtgtgtgtgtgaaagcctgagccagtgccagcaccaagagcctgtgacagcttgcagaggcctctccagctccttccagcccaagagggtcctagccctgctgtagttgtgaagccctattccagaccccctgtccgaaccccagcggggctgcagataccagaagcattcagtaaacaacccctttgcagagctgacccaaggtctcctaagctccgtggccctgactctgggtagccgcggcccagcctgcggtttctggcaggcagattggcagccacccagaggtgggtgtgacccagagcaaaacttccctgggcggcctgtttgctcttggcaataaggggcctcccttggcctgcctcccggctctggaagggggcccgtggtgggcgagtccgggcaggctggacctactatgtgccagcgcttgctgggcaccgctagatgatggggtcaagccaaatccatttggtttcattcggccgcctctgagttcgcctctgcaggagctggaggcacaacactgacctgaggacaaggcccagagagggagaaaacagagggaaaacaggtggaagttcaggaataccaggcaaggtcccttgctcagaccaagagtgagggacactttctgatggaggtgccatttcagaaagccaagaaaagagagggtgagagagggcagaatgttccaggccaagggaacagtacgtaccaacgcctagatgtcggacatagcatgatagcctgcttattctgggagccaaagcgcctggtatgagtggagccttctgtgcaacgggaaatggtgatgtctgtgaagggtgagacacacaagttcacatcaccaagatttggggacatctactatgtgccagccatgggggcgggggacagaaagacatgggctttgtttgtagaatttggcaaagataaaagaggtgatgtcaagggctgtctggggcccccattacctccaccagtagttgtccaaacctcaaagtgatctagctggatagcagaggttccagaatgggcgattggtgaggaagaagtgwgacttgatatagtggcaagacggggattgtgagcatggaggagattccccacgggtgctgtcccatcggaagaggcaatggaaacggaaggtgaagatgaaagtgtgggatttgattatttatggcaggaagaggtggccagggtggagatgggggtctggaaacttggaggaaaagaaacagaagggatcttttaaattttgttttattttttgggattcttgtggaaatgctaatgttttagtcagaagcatgcctagaataatttacatccacagtggatcatttttaacacccctcttccttcatagtacaaaattattttcagtaataatcatgaaacaaaacaaatatttttcatgtatgaattaaaatttgcacttaccaaacaaaatcattaccattcacagttcacactgttttactcttttaaaaactgtaaatacaaatcaaaactccaagtagtttcgtaaaatgacaaaattgaaatacccttatcgtcatctttcccatcattctgcgttcatagttgatttcactctactgtttaaacacagaaatacagctgggccggtggctcacgtctgtaatttgggaggccaaagtgggagaaccacctgagrtcaggagttcaaggccagcctggccaacatggtgaaacccgtccctactaaaaaaaaaaatacaaaaattagccggacgtggtggrtgcacacctatagtcccaagtactcaggaggctgaggcaggagaattgcttgaacccrggaggtggaggtggcagtgaaccgacatcttgccgctgcactccagcctgggcgacagagagagactctgtcacacacacaaaataataataaaaataaatgcagaaatatgaatgctggacggtggagacaggaatgcattcaaagcaagcttggaagattccagagttgtgaggagcttactctcaactgatgtgtgttcctgagaccacatgctctgggggcaactataggattcttaaagttctccaagtcaagttgacttccatgtagaatatgtttattaaaggataagaataaaaatgtgctgatttgaagctttacatatacattattaaaccccaacagttactgcaccaattgttagaacttagatcaataaagggtattttcaggacaaagtattttaccactgaaattatttagatctgccattgcacagtgatcataaaagcagactgacttctcatcagttttattttatctttaaattctgtaggccccccacccgttattgcctgcatccaggaaaggtcactccgactttcctgtcctccctaggccactgatattaataaaaataaaagcaattgtgtatagcacccagcaagatccagcccttgtgctaagcactgtttataaaaagcagcatttctaatcctcatgatccacatctcaattgaaaaaagtgaggttcagaaaggttaagtaacttgcctaaagctacacagctagaaaacagagccaggttttcagtgcgggttcatatgactccaacacccaagtttcagtttttgatgctgtttatttctgctactgtccatagagctctctgtgataatgttttttaagttgagaggtaatgtatatacagaaaagtgcttaaagtgcactaatatgaagtgtagagcttgacaactctttctttctttctttctttctttctttctttctttctttctttctttctttctttctttctttctttcctttctttctttcttttttttgagacagagtctcactctgtctcccaggctagagtgcaatggcatgaacatggctcactgcagcctcagcctcctgggttcaagggatcctccctcttcaaccttctgagtagctggtggcatgaggcagcatgtttggctaattttgactcttgacatatgtatatacatgactgtatatacccatgtgataatcacccaggtcaagctacacttccagaagtttccttatgccccttccaagactctaccctctgtcctccaggtacccgctattctgacctctgtggccactgattagttgttcctgaaaggaacagttttaagccacttctatctctgaggcaagaaggaagacgggagaaatgaggaggtgtgaggaagagagttggagggagacacgctggtcccagccatgtccatagcagagcaaggagaccttgacaatgaggaggtgaggtgggccatgggtgccacgtatggtgaagaagacagggccatacggggcagggaggtggcaagaacgaggcagagtgctatgcccacctagggccctctgagtcagagcatggatttttcttggaactttttctgtctgataactgaggatgggaaagtgtgggcagtaggggccctggggcctggccagatcaggaagcaggcgtcatcatcaagggtgtttggtgatgaagtgtgagggatggagcttgcacacacagttcagcatgagtgggtgtggcaggagcggtgggagctgccactttgctgattggtttgctgcggttcagccctcccttcaaactgtccaattttggcaccagagggatataagcatccagggaacccatgagtcttttggctgcagccgcagcccccacacaagggcccagggtgagtgtggctgtcctttgctttcccaggaggaagcacaagctcagaagtcaacaggtccgagcttcaaatcccggctcccgctaccgacttacagggctgggaccagggtgaggtgacagaggcatgtcgggtataacatttagggaggctctcattctcagctgctgaccttgcacttgcacaaccccaagagtgagcacctcattcagaatgaggcacccaggtcacacaggagttcatggtaggaactcagtcaatgttggttgatggctaaatgacaatttccgtaagactgtgctgagatcacaaactaatgcccacatctcagtggcttaacccagtgaagctaatttcttgctcgtgaatggtccaaagtgggccaggcacatcctgtagctcctccctactcaagtgtgtggtccaaggaccgatggcatcagcatcagctggttgcatgttggaaatgcagactcccagaccccactatcaggatctgcattttagtaagacccccaggtgatttgcatgcacattacagtttgtgaatccctgttctagaccggtggcctccaaggtcaccttggcaggaaaaaagagggatggagaagccacatcatcacttctactcacatcttattagtcagagctagccacatggccccaacttaactgcaaggaaggcggggaaataccatcattccatgtgtatcaatgaaggagaaccagagtgagggacatctaggtaatattctttgccgcaggtaccttggcatctgggacacacacttttgcttctctgggtctcagtttctccatctgttaaaaaaaaataaaaataaaagcggcctgcatgttcttccaggcctgggccaggctgaacatttttagcgtctaagaaatgcatctggccgtgcgcggtggctcacgcctgtcatcccagcactttgggaggccgaggcaggcggatcacttgaggtcaggagttcgtgaccagcctggacaacatggcaaaaccttgtctctactaaaaatacaaaaattagctgggcgtggtggccygtatctgtaatctcagctactcaggaggctgaggcaggagaattgcttgaaaccgggaggcggaggatgcggtgagcccagatcgcgccactgtactccagcctgggccacagagtgagactccatctcaaaaaaaaaaaaaaaaaaaaartgcatctgaaaagtgaaacttacgaaacatcaccatcaaggtacagcatatggaagccacaagtaaatatctgcggttgaaagccctttgcagtttgtcagctcccgaggtgtgtgcccgctttcccgcttacggcctctaccccatgccaagtcccaagccgacgctggggaggtggagctcacaggtgtgacattaggtagtggggacagagaaatacaaaacagatcctgaccccagcagggctggaagtgaggaggggcagtgctgtagtggctggatgtaccagggtgtgaggggacacctgtaccatgggaaggtcaacagtcaggtgaaaatcccaactccgctgctaatttgctttgtggctgtgtgtaaattccctcacttctctggacctcagtgccccagtttcgtgttttggagactgagatctgtgacagagcctgatcaatgcccattccaatatccttcttccctcctccctcagtcaccaaacactgatttttttgtttggggtggcgacgcactcagctttgcaggaggyggggccacgggataggttccagcacrgagatacaagcaggagtgttgtgtgccgattctggaaaggctccttaaaaggaagggcttccctttggtgactccaccaccactgattgctgcctcctgcttccagtcagtaatacggacgtgatggtggagttctgcagccatcttggaccatgagggtaccctgaggatggacttcgtgtgcagaagagggcgaaggagaaataaaggaactcagatccctgatgacacccagagctgccaaatgcaccctacatgtagatttcattcatgtgattagaaacrtaataatgkgtgtgtgtgtgtgtgtgtgtgtgtgtgtgtgtggtgtgtagagagagatataatgttttatatatatacgctatttttatacttatgtatatatatacctttatttatttatttattttgagacagaatctcgctctgttgcctaggctcgagtgcagtggcgcaattacggctcactgcagcctccacctcctggaatcaagcagttctcccaccttagcccccttagtagctgggactacaggtgtgtgccaccatgcccggctaaatgtttttttaaaaaattttggcaatatgttgcccaggctggtcttgaactcctgagcttaagcagtcctcccacctcggcctcccaaagtgctgggattacaggcgtgagccaccatagccagctgtgcttttaaaatgtgtgcatgtgtgtatatatatatgtatatgcattttatatataatatatttatatgtatatattattttaaaacctttctatttaagtcaaaattatgttgtgtttttctggttagttattgctgatgtaaaagcgtcattgatttttgttgctgactgtgtatctggcaaccttgctgaactctcttatttgttctaatattttgtcagtttatttggttggtttttcaaggtagatgatcacaccatctacaaacaatgacagttttatctcttcccttccaataattacacctcttattttctttccttgtagctcagcccagctctccagctctatgtattaaacagtagcagtaataactagcattcttgccttgttcctcaccttaaaaggcatgtattatataaaacttttctccactagcaatattttctgtaggtttttggtattaaaaatccctactaaattaaggaacttctctcatgctcctagtttgctaagaatttttaaaaatcataaatacataaagaccttatcaaaacctttttctgcatcagctgacatcgttggatttttccttttgattgaatgatgtagtgagttacactggtggattttcagatgtggatacttttctgggataaacccttcctgatggtgatgtagtatcattattttaactctgctagactcagtcaggaaagattttgtttagtgttttcctatccatattcataagtgaaatggacctatactttcctttgtggtattgtcttatctggcttttataatcaagacaacacttttaaaataagataggttggtttttttttcttttgttttytttttaagcaacttgcatatgatacgaattaattgtttctaaaaagtttctgcaggctgggcgcggtggctcacacctgtaatcccagcactttgggaggcctagataggtggatcgtttgagtccaggagttaagaccagcctgggcaacatagcaaaaccccatctctactaaaaatacaaaaattagctgggtgtggtggtgcatgcctgtagttccagctacgtgaggggctgaggcaggaggatacctgagccttgggaagcagaggttgcagtgagccaggattgggccactacaccctagcctgggcgacagaatgagaccttgtctcaaaaaaaaaaaaaaaaaaaaaaaaaggttcagcagtacttacccatgagaacatctaggctgatttttaggggagtgggagggctttgacaccattacagtttctgtaatactgactgacctactgaaattctctatttcttcttgggcccatcttttgacattttatacctttctattaatttctccattttcccagaattttcaaatttgtaagcatcataaatacaaaaggaacttatcaaaaaatttttccacatcaattgacatcatagattttcctttggatctaatgatgtagtgaattacactggtggattttctggaatgtttttccgggataaacgcttcctgatggtgatgtggtgtcattattttaactctgctgaattcagtcagcaaatattttgtttagtgtttttctatctatatattcataagtgaaatgggcctataattttcttttttgtattgttcataacagctcttaaattaacttcaaattccttggtcaacgttgttccccctttttactcggcatttgattttactcccttgcctcrtacttctttcatcctgatcaatgtcatcaggattctctacctcatgttgatttcatcctagacatggcttctggttctgttcgtcttctgcagtcttcctttgttctccaattcattgatttgttcccagaagcttttctgttaaacgcagctgagcctttctttggctcttaatgactctgagtagttccatgtcttcrgcgaggttacatacttcatggaagcctcatagaaggcccagcaaatagccctggctcgcccgaggctgggctgctgcccctagacttgaggctccatctctccaaggctggctagcccacgctgcccctgcctttgccatggtgggaggggtgaagaggaaagtgmtgagtactgcctgctcagstggcttgcaaatgtccagcccccaggcacctccctatgacctcctctcaccacatattccctggtttgggcaggaattcagaggtctgctcctggccctgagctcccaggtgccatgcaatggctcccctggggcagctgtggggcttgaacagtttaatgcttggctccagtctgagctggcaaggatgagcgtgcagggactaatacggtcctcactaaggctaggatggaatgtgcagctcacagcacacacatgtgactgcctcctctgcacacggcagcacacaccagtcccagccaggcttcctgacaatgaagtggtcstcatttgctgggagagggtgttgtcatagggatcgtgccaggcatgcagctagtgaggcatagaccagcctgctggggagctggaggaggtcatatggaggatggaaatagcttttaaattaacatgaaagcttatgcacaggcctagcatgcccgggaataggcactgagcctggcactttaggcgctagatacatacttgctgtatgaacgaataaacgaattgaaagacccaagctcttatcccagctctattgctgtgtgtccttaagcaagtttcttggccttgctcagcctcagtttcttcatctgcaaaaatggtagaggggtgaatcccatcatttttacaccttcctggctctaggggtgtatgtttctatgcttgaaagcatttatggggcggcagctctgacctgaagagaggcagggagggagggcctcaggaatgcagaatccctgaatgtcagagacagggtgattcctataggctctggtgtcagatgagttaccagagttcaggagaccccactgagttggaacctgttggtcagaagggagcaggcaccagggcaggggtggctttgttctggaccaaatatctcttggagtaggaagacaacaggttaggttattcccttcccatccaagagcaccttcatcagtcaggatatccaggctccagggacttagccctcactgtctgagtccctacagatgccattatctgcctgatttattcatccacctgcccatcgacccacctgtccatcaatccacctgtccatcaatccatctgtccatccatccatccttccatgtttgtcggtccatttgtccattcatctaccatttggtcactcattccatccatccatcaatccatccatccatgtatctattcttccatccaaccattcattcattcatccatccatccacttatgcattcattcagcaaacaccgaatgtaataggtcattccctactattaagaataaaaactaaggtctctgtccacaatgagctcacagactagagggcaatatagagacaagcaaagagatgattccagcacagtaagtgggagatactaggtactgagggtgaagagatggaggacctaacccagcctgggaggtggaggaggtggttttgaaaggcttcctggagaaggtgacacctgagatgagtcttggagcaagattaggagttgtccaggtgaagaggaaaataaaacagagcagcaggagagtacaaaggcctggaggtggcctgacagcaggagctatttggggagctgcaagtagctgagcctggatgaaaccatgagagccagttggaggtggggtgggatgaagctgagaggctctgtgtagttggggaggacatttgcaactggaggtaggaatggggactgaggccttgggcacatccgagaactatttggagaggtagaaagcctctgggtcaggcatgggaactccaggttccttcctcccttctacccctgagggatgttaggcaactcacctggcttctctgggactcagtttcccagctgtgacgtgacaggttgcccttttagcctcttgggactcttccagctctgagggagctcctgagtcacatgtggtcaacaaaaccaatgcccacgtgaacatctggtctggccttaggagggagttaattgttcccagtctctatgtgtgttagggggagggtggggggaggccttggtcagggggaccttggttaggagccacccccgaggggctcccagtcatgggatgacaggacatgctgagaagggagtgagtcactggccagtcatcagcttgggccccagggtctcgggggggcaggggagccccattccctgctcatcacagagcctccttctcaagatggctgaccctttgttagagcagcaaaaccccatgctacactctaatatttaaaacaggcccaaggacagtggtttgggatgaagcaaatggtgagagccctcacccagagcagcccccaaggccccaccgaggagcccctccaagtctaaaagtccaaacacccgagtccctcagcaggagtgacaggcccagagtcagtagggactgactggagctcacacagcacgttcattcgcttctctcctctcctggctctgacactgcccttccccgctcctgaaggatggaagataaagccaggctcctccaccatcccctgctctctgcagagcctcccttccctcgaggaggtcacgtgtccggtgccaggtggctcctctcagctcaagcccatggtggctccttggcagcaccataggagacatagctgaaccatgctctgccccgggcatgacccctgcagaatttgcctccatctctgggtctgtgtcttcaccttttcaatgggaagagtgagaggctgggataactagcatggcacagggcttattatgtgtcacgtgtatatgcaatyctcacagaaaccccctaaaggaggcatcattattatcctcattatacaggtggggagactgaggaaccaagaagttgagtgacttgcccaaggtcacatagccagtaggaagcagagctgggatttgaacccaggtggctggcccttgagtccctgctctcactcattgtgctatattgcctcttaaaagatgacccaaaagcacctgctagttcctgctgcctggcatctggacaggaagatagaggtgattcaagggaaagggggagaagctctgctcatttactcactatgtgaccttgggccagccacttcctctctctaagcctcagtttccaaggtttgttgtgagaattaaagggctggggcagtgacattcaggagatggtagcagtgatcgtggttagtattccttcagtactcactcctgccccacggccccctgcggacactctctttgggtggggaagaggtggcagctgtaatggagaccttttcttccatctctgagctacccgggtgtgtccccaggagaagtttcccctcagatccccggaaaggaccagcaggggaaagtctagccacaccctatctcttgggcgcagcccctgctccatgctcagatcccgagacctggtccccttacgggccagttcactatcagggaccggcgtgggcatatgggctgcccaggcggcagctaggggcatctagaccagcttccagaagcccagggtggagggcacgtgggacaggaagaccccagtgccccaccccaccagccccatcagctcccctagccccagagaaaacacttcattactggaagcccagccaggcrgagggggtggaagtagccttgttgaaagaaaccgcacgaggtcagccaaacctcagcccctcttggccagcaacccacagatcaaccacgtggggctggctctccgggtgtttacggaaacactggccctgaggtcagcccagctgctgggctsggatcccctgggacacccccaggcctcaaagtgccagcttggcaggagtcttcagaggctgcagctggggccttatttgcctccacagtccacctgggaagtggagcgcagagaagcccggtgggcagtggagatgggccaggtcttcaggcttccctggacagctgcttgagctgggaccaggggccagaccctttccagacacccctgggaaagggacatcatctcgggagagggacatagaaagtggactgtggaggcagatggcctgggtttgaattctggctgtggccctcgcaggctctgtaactctgagcagtttacttagcttttctgtgcctcagtttccccatctatgaaatgggaatggtgataacagtacatacttcacagaggtgttgacataattaaatgattttagtaagtgatctaaataagtgatcactggctgggcgcagtggctcaagcctgtaatcctagcactttgggaggccaaggcgggcagatcacttgaggtcaggagttcgagatcagcctggtgaacatggcgaaacctcatctcttaatacaaaaattagccgggcgtggtggcacatgcctgtaatcccagctacttgggaggctgaggcaggaaaatcgcttgaacctgggaggaagaggctgcagtgaaccaagattgtgccactgtactccagcctggaaagcgagactccatctcaaaacaaacaaataaataaataaataaataaataaataaataaataaacacaattttaaaataaataaataaataagtgagaatttaatagatgatccaagtggtgtgcttggaacagtccttgtcacaaactaagtgctacccttagtgccgccgcatcctacctagtggcctccctcctctgagatcctcctgctctgttcaggttggaccgcgtgctcctctgaactcccaagtgtttgttatggaaatctcttccacttaaacgtttgctgagcattccgaccatgaataatgaggaactgaggttacagagacaaatccagtttagatcctgctccagggagcttcaaagctaaggcaaggatgggaggtgaggcctgtgcgcttgggcagggtgactataatccctaattatagtctccatggtaacgaactggggtaactaattggctgtccaatgtctgtgtttgtgggagcaggggctacatggtccctccactgctccgtcctggagaccagctcagagactggcaccaagttgctaatgaccgcctggcactagaaggastacatgaacacccgatgcgcttggagccctggccaagctgcccacactgagcccgtggtttccttcaccctcagcaccttaatggagtagggcgtatcattctatgttcagagaagcaaactgaggctcagagacgccagcccaatgtccyacagctggcgggagatacagctgaggctgaacccacatccaagttcaaagcctgcatttttagctactcagccatacatgatcttcctgcaatgtcaatgtagtatcaaattacacagcaaccctcagcctgggagttcagaggagcacccagcctgacccaggaggatccagaggaggggagggaggactttccaggcagagggatccacttgcagaaaggcggggctgggccgtgcgctgctcccagcgacctgtgtgtggaatagcaacaactgtggtgtgcaggtctggggtgtgtgaattttgggagcaacrggtggtggggtwgaggaacatctgcaaacagccttgaataccggggcagggttttagactatcctgtggggtaggagtccccagagagttccaagcagggcctgcatgtggccaggatggaagatgaattacaaagaaaggagtgagaggctgggagaaaacctatttgctcaaataacaaggctcagtatcattaccatggaggagctgtctcccctaaatcaaaacttgcctgcctggagttccacttcattttaaacaatgtgtgcatgtattggggggtcccagagcctgggcatggagcagctaggcttcaagtccttggagccccgaaatatgccttccttcccaccccagccccagcgccttcaatgccttcctctggggttaaccccattgtggccacagtggctgccagcagggaggaggcacagaggtggtgggaacagggctgaggggcacacaggaccctcagcagccagcttcaccccccagcttatccaggattcagacaagtccaagttcagatcttggatctgccatagacgtgagatgcgaccctggctgggtgccttgaggtcttgacacctgagctaccacactggtcacataaagacaataatcaatgcaagggcagcgtgaggactgtggagaccctgggcggcaggtgtgcagcgcggcgccacccctgctctggtacagtgtgagtgctcaacgctgttgttattactatagcctacagcagaagccgccgtctggtctgggaaggacttggaaacgccctgctgtggcctagagatgcacagagagcatctgtccctctgcccaggrcctgacttagctcagggaggccagtttcccccagtgagcaatggggcccctgcttggagccatctgcgtgtaccctgcagggcagaagctggtgaagagtggaagaggcagtgttctgggttccatcccttgggttttagggattaagccatcttgattctaccctcagctccatccttttctaacaatgcatmcttgggcaagttactcaatttttaagtgcctccatttcctcatttgaaaaatgggtataatcatagtccctacctcataggatcattgtaaagatgagatgaaatccagcatgtaaatgcttagcccagggcttggcacatggtgagcacttggtaaatattagcaatcattgtttccaggctgtcgacacagaggaggagacatgggacaaggaaccagtaaataatgggaatcaaaccatgctacaaggggataaataataaaaagggtataatatgtacaagtggagggagagacgaaggccatggcaagaggtccaaggcagggccactgctgggaaacaggcccagccaacctcagaaaggcagtcaataaaaataataggaacaggctgggtgcggtggttcacgcctgtaatcctagcccagcactttgggaggcctaggcaggtggattacttgaaattaggagttctagatcagcctggccaacatggcgaaaccccgtctctactaaaaatacaaaaattggccaggtgcggtggctcacgcctgtaatcccagcactttaggaggccgaggcgggcggatcacggggtcaggagatcgagaccatcctggctaacacggtgaaaccctgtctctactaaaaatacaaaaaaattagccaggcgtggtggtgggcacctgtagtcccagctactcaggaggctgaggcaggagaatggcgtgaacccgggaggcggagtttgcagtgagccgagatcacaccactgcagtccagcctgggcgacagagcgagactccgtctcaaaaaaaaaaaaaaaattagccaggcatgatggtgcacacctgcaatccagctactcaggaggctgaggcaggggaatcacttgaatccggaaggcagaagttgcagtgagccaagatcgtgctactgcactccagcctgggtgacacagcgagactctctctcaaaaaaaaaaaaaaaaaaaaaaaaaaaaagaacaataacagaattttccccacaagtgagcactaagggcatgctacatgctgtgctaacatgctttgtatacaatatctcatttccttcccacgacaaccctgggaggcagggctggggccaggttgaggcagcaaggtgaccagggtgcaaatctaccgaggccctcaccccggggcctgagcaagtgcagggttggcgcctcagaacaagcacctccctaaatgttatgccttgagcacctggctggcttcaccctagtcccagccctgctgagaggttggtataatatttagtcccattagattgatgtgaaaaccaaagtccccccacatgaggcacctgtccagtgaatgtcacatagctggggaggaagaggcagaccccaggattttgaagcctagagttatttttactctgaggagctgcctcccagcctggacatggaaggttccagtccacctcccagtggtccaataactggaagagctgcttagaaccaccctcttctggctggcctgggtggctgggagagctggcctcctgggtggaggtctggagattcctctccacattcctaggggttaaatctggggacccgggttcccagcatcagccatcacgttccccagaaggaatctctattcataacaaaccctaaaggtcactcgtctgggaaggagtcttctgtctccaccccagggcaggacagaaggccccaggctttgtgagagcatcaggtccccagaggaagatcacctgcttttggccagcctgtgagcccctcttcttcctctgggtctcctctgtagatggtatctaaagaggatgaataaacatcccagttggagatgaatggccattgcccgcagagagcaattgtgcgctaaatgcatgggctctgaactcagcctgcctgagctcaaatccccctttcatcacctgccaaccatgtggccttggggaagttacttttcctctctgtgccttagtttcctcttctgtaaaatgggggataataacacctaccgcacagggttgtcatgaggatttaacgccttctactcactcagcaactatttgctgaaggcctaccaacttccaggcagtgagtaatatggcagtgaatacaacagacaaaactccttaccttcattttttttttttttttttgagatggagtctcgctctgtcgcccaggctggaatgcagtggcaccatctcggctcaccgcaggctctacctccygggttcatgccattctcctgcctcagcctcccaagtagctgggactacaggcacccgccaccacgcccggctaattttttgtatttttagtagagacagggtttcaccatgttagccagaatggtcttgatctcctgatctcgtgatccgcccacctccgcctcccaaagtgctgggattataggcgtgagacaccgcgcccggccatcttcaattttttaaaaggaaatatagtgaagaatattatatacttcagaaaatgccagcaccaaaaaacatgatgcaaatacagtaaaatgttaacagttggaaatctagatgatgggtaagcggtaaatgggtcttcatgataggttttctgtatgtttgaagttttttataaataaaagggaaaagaaaaaagagggagagagagagagaggaatatctgccattttgaaacttacagtcaagtggggaaatagacaataaacacatcagtatagctggacgtggtggcacgtgcctgtagtcccagctattcgggaggctgaggcaggagaatcgctttaacctgggaggtggaggttgcagtgagctgagatcgtgccactgcactccagcctgggtgcagcctgggtgacagagtgagactccatctcaagaaaaaaaaaaaaaaaaaatgaaaacttgtggtgtgtcaattgatgttaagaagaggaatagagaatggccagggtggtagaggaagttccttttaagtcaggcagtcagggaaggcctccctgggaaagtgacagggaaagtgacatcagacaggagagcctagttctcccagcttccaggcctaggtgctcccagtgtccatgtacaaccttctgcccaggaaaagagtmrttgtcaaagcccaggacccaagyctcttgagactgtgggatcttgaattatgtgcagcagatattctcagtctgaaattcagatgggctggaaatgtaatctattttaaattcattctcatttcaatgctccattccatatgtgggcagaaaattcatcttattcaattgggatttttttccccaaccccatcactttcccagctccattcattttttttccccaattgtatctaggcgtgaggttgtctctggccctcttggccattttatctcttgagatcctccctgctctctgcttctgaattcttcaaagctctctggggcccactgaccaacaaaatccaaaatatgctcactcatagctttttctctgacctccttcccagccttcttagatgggaggaaggagggaggggaggggagagctgtgcatcagtcagggtagggtgagttctgctacagtaacagcaacgctcaagtcctgtttctcagtggctcctgatgcacgtcccctgctgggcagctgctgcgctgctctgtgtctccttgctcctggatcccagctgatagaacaaccaccatttcaactgttgcacagcagagggcaagagaaagcatcaagccacagactggctcctaaagtctcccccaggaagtggcacacttcacttctgcacacatttcattggccaaagcttgttacttggctgtacctaacttcaagcagaggagggagttcaagtggaaatcctactatgggcctgtgctgtggtctgaatgtgttccccaaagttcagatgttgagacctaatccccacagtgatagccttaagaggtggggcctttggaagttgattaggtcaggagggctccacccatgaatgggattagtgttcttgtaaaagaggcttgagggagcccatctgtcccttctgccatgtgaggacacacagaagtcaccatctataagaaacaggctcccaccagacactgagtctgctggagccttgatcttgaatttcccaacctccagaactgtgagcaatgaatttctgttgtttataaattacccagtctaagatgttttgctgtagcagcctgaacagactaaggcaccctaaaaggaaaagaaacagagtatttgtggacagtccctaaagacagtcacagaaagtgagagcctctttcagattcattaggtgttcaagatgcccaagtctcttaggaatgttctttcctgggaggaaggggtgtttttgaaacccagaaatgtattctctgcttttactaacacatctgtttcctgagtcagtagatgttctgcagtctaactgcctaaatagggaacaaaaaatccaaggagaaaactcgtgcagccttagattcctggattttgagtatcatgtaatcttagactggaatctgagaaaatgggacctgagaatcttgcaaccacagatttcaaacctgaaaggtctttgaatctaatttcactttctatgcagtaactgtcttaataatcttccttgcaggtggccaccagactttctctgcttgtatcctcccaggaccacagaactcatcgcatcccaaggcagcctattccatcatggatgagctcaaagtgtttgaaagttctgctttatcaagtgagccaaacttcctccctcaggaccatccactccagggcccagttattctactggaggagtgagggtaaagccatcaccaggacaaccttggtgacaggctggactggcagccagcttttggggatgacttcagggaaccctgaatagccatgggagccaaatgtattactcctctgatgcctacaattccactataatagtctggtgggcttctgttagggaggcttatacatggtggaaagaataaaggcttggactcagcctaggttcaagtactgcatcttgacctggcctgtaggcaagtcttttcacttctctgagttttggctttctcatttgtccaataggaataacaataatgataataataatacctcccatgcaggattgctagtatgttcaatgggataatatatctaaacacctcacacaatgcctggcacatagcaggtgttcaattaggtctgtattaaaatccaggctctgtctcttattatttatatgtccttggacttcatttccttgaaccctagactccccatctctaaggtggggttgatattactcacatcccaccaggctctggtcagaatcttttaagtgtttatttacagataatgtgccaagttctttatctgaattggacatttaatcctttactctgtgggtagaatatttataatcaccccaatgttttcaatggggaaactagggctcagtgaggttgattgactttgcccaaggtcacatggctggtgaggtggcagactcaagatttgagtccaggcattttgctcccgtgtatacactgtgtgtataaaggacctggcacaaagcagccaggtcattttgtgcttgaactgctgctctgtccccaacttccccaaaaaagcacaacatccagagtaggccaaagctatgttacttggctctacctaacttcaagcagaggaggggtttcaagggaaccaagtatttgtagtgcaaagccactgaggttttggagttattcgttgtarcagctggcatggcttaaccttgtcctcttagctgttttcagcatttgcacctgagtgtcaatcagctaggatgttttaggctgcaagtaatagaataccctattactcctgaattcaataataggtgccttcgcagtcaagaaatctggaggttacgtggctccagttttggttcattcagaggttcagtgatgtcatctaggacccgcattttggcttcagcaccctcagtatattggctgtagccctgaggcttggcccgtcatgctctcaacatggctgccaaagttccagacatcgcatcctcatgcaaccacttaaagggaaagaataggggaccttccccacacccctttttatataataattgaggccagcccttctcaaacctcctgtcccagcatactttctttatgttttattggccagaactgggtcatgttcttgtggaagactaccaaggctcaccaatagccatcttcttcttcctgggcacacatgtgggatacatttcccagccttctttgcagttagatgtggtcatgtgactgagctctggccaatgggatgtaagcaaaaataattgtactgatttcaggtctggcttataaaaatcttctacccacaatctttctgccatctgcctgctgaatggagaggactctgagaatgaggaaagccacaaataggaaaagtctcaatccctatatgacctgcagaaaacagagccctcctgtcaagacttattgcagtttgatgtgagaaagaaccaagcatttataatgcaaagccactgaggttttggagttatttgttacagcagtcaacatggctaaacccaaggcatagaaggacggagctcagggagacagctgccttcctcacatgctggggctaagaggggtgcgagcagggaggagaagggcttctgtagatgtccaaatctgacccaggccagcttccaccactgtctagctgtgtgactctgggcaagtgcatgaccctttstgagcctccttaaatagttacgtgaggcagtgggactggaggctctcaccctaagtgcccatatgattatgacattcactgactccttcctcacagcagccagtggccaaagagaaagggtgtggctcccctaggggctccgggtcagggtcactgctctgtctggaatctgggctctgctgcccagaacggccctcctgatgtctggaattccaccatgagtgactcatgcctttgggaagccactgccctgaccccactgagtaataacaataacagcccctcgtggctttttctttgctgagagtttcatagtccatggtctaatctggtccccagcacacggctgtgagtaggcagtgaaggtggagagagttagaattgccatacacgatgcaggaagcaatgtgcccacagctacacagcaagttagtggccaagcctagagtcctggacagtggctttttccccaaaaaccctttgcttgaaaaggctgcctctgatattcgtgtgtccatgttcatagcagattattcacaatagccaaaaggtgaaaggcactcaagtgtccattgatagattagtggataagcaaaatatagtgtatccacacaatggaagattttcagccttaaaaaaggaaggcaattctgatacatgctacaacagggatgaagcttgaggacattatgctaagtgaaataaatcagtcacagaaagatgcatactgtgtgattccatttataggaggtatctgtcaaaagtagtccaattcatagagacagaaagtggaattgccaggggctggggagggggaaatgagaagtttccttaatgggtttagaatttcagttttgcaagatgacgagttctgtggaaggatggtgatagaaactcaataatgtgaatgtacttaaagccatgcattgtacatttaaaattgcttagatggtaaattttatgttcggtgtgttttgccaaaatgtaaaagttaaaaaaaaaaaaaaagctctcctaagaggtagatgctaagttctaatatttttcaggacatataaattagtttaccatgatttgtatcagtcaggataggctaggtcatgctgctgtaacaaacagctccaaattctgactctagattagactgcccttacactaactctgttcctcctggaacattcttctttaccatcctaaacctctccctactctgcctgtatcccaaacctggaataaggcaatagaatcagacatactcaaacttgtctggctgtgtgactgtgggcaaaccagttaacctctctgggcctcagtttactsatctgaaaaatggggacaataaatgaaccttgagaagagaattcaaggagtatggaaacatttagcatgatctagggcatagtgtcaggctgtgggtatatttaaacctcatgcagagcttggcacccaggcaggaatggggtaggcttcagtctcctgccagtcaggccctcagcctgaacaatctcgagaacaccttcttccagccagccttgcgtcagggccggggaatgggtgggacaggagccagaggctgcagagacagccgtctagcgcctgggatacttttctccccaataatctgttttcaatctttcattattatatttttttcttttttgaaasccatcctgccaagcaacaggcatgcaagtgtagtcaactcccagcccagccyacatcaaagtctttgcgaatttctgctttgaatcatggggtaggggaccctgccttatatcacatgtgyccagcctccacacttttgcaagtgtgctgtttccacaccctgccatgccccatgccctctgtctttccagattctgttcaccatctgtcaaggcttggccacagggctctcccctgccaacagctctctgatgtctctccctcccttgttaacacaacccctacagtctcaccagagctggggacatgtattgaattctcatcttctttatttaacacctttgagggcagggacagcatcatccactttgtctgatgactttcatgaatcgataaagtgttttttgtcaccaccataccaatggcaggagagatgatgaggatgtttatccccattttacagatgagaacatggagrtcatgagaccggaagtgatagtcacccggttggggaatcaggccctctatcccgacgccctcgctctctctaatctaccctgctgggctgagcacacagtaggtgtgtgcctaaatgtgcatgagtagggggctgggcaaaggctggggactggcaagctcttccctgaactcatttcctcttctgcctggacaagcagtgagtctacatttccaaccttccttgcgaggaaaacaaagtcttccagtggactgattatgaaagcgggccagattctgcaccactatctgtttccacacccctttgcaatgtgactttgccttcgttctctccaatgtgggttggctttgggactctctttggtccattgaatgtggtggaagtgaccttgtgctagttctgagcctgagcctcaaaaagaatgcagtccttgcagtctctctctctctctctctcccaccctctgctccccaccttcccccacccccctgaacctgacccacccccgccagcctcctccaccatgagacaagccaaggctagcccactggagaatgggaccaactcttttttttgagacgaagtctcactcactttgtcatccaggctggagtacagtggggcaacctctgctcgttgcaacctctgcctcccaggttcaagcgattcttctgccccagcctcccaagtagctgggactacaggcacacaccaccatgcctggataatttttgtatttttagtagaggcaggttttgccatgttggccaggctggtctcgaactcctgacctcaagtgatccacctgtctcggactcccaaagtgtgcctggccccaattcttacataagacagttctrccatcactttaagtcacaaacatggtctcaactcaaatttaaaatgtccagtcaagctattaatccaaactcccaattggatctaggtttaaaccttctccccttgcccagctggggcctgtcctggggaggcagtttggggggctccttctctggacctcctcccctcccccacaagtgggggctgtggagatagtaaggggaggggaagggtctcacttgagctgccgccatcctgctggcttccagctgacagtgtcacagatgtcccacagatggccattgctgcagggctccctcactcttgaccctgggggggatgcacttctccttctggaggtcccttgcaagtccttcctcggccctcaggaatccaacatccaactccagcttcttgctgctaagaccactccaccctccaggaggccctagggaacaagacccaagcagacccctgcaagctacccccaccccagcccacaacgaatccccaaacccttccatgtcccctgcctggcatctggaggggcagtattggccccctctgggtgaggtctcatagctggagctgccgctcctcctgcaacacctcctccccaaaccccaagccctttattttcccacagtcagtgagggggtgaaggctggggagagagatcctcggccaccttctttgtaaatccgtcggacctgatgatccagtctagaatttcacatctttcctatcctggggtcttctgytgaatattttgatatatttcaacataaggaaacaggacttatatactgttcttgctctggattttattatctttgtatcttacatattttctcacctttccttatagatacctcacttgaaaaattttaattgcagcaaaatatacataacataaaatttagctaattaggaagggcacagtggctcacgcctgtaatcccagcactttgggaggccgaggcaggtggatcacgaggtcaggaggtcgagaccatcctggctaacacggtgaaactccgtctctactaaaaatacaaaaaattagctgggcgttgtggcaggtgcctgtagtcccaggtactagggaggccgaggcaggagaatggcatgaacccaggaggtggagcttgcagtgagtcgagatcacgtcactacactccagcctgggtgacacagcgagacttcatctcaaaaaaaaaaaaaccaaaaattagctaattaatcatttgaagtgtacagttttgtggcattaaatatagtcacattgttctgcaaccatcaccaccaaacctctccaaaatgttaccttgcaaaactgaaactctgtacccattaaacactaacatcctattccccctcctcccagctcctggaattgccattctactttctgtccctatgaattgggctactttttttttttttttttttgagacggatctcactctgtcgcctaggctggagtgcagtggcgcgatctcggctcactgcaacctccgcctcccgggttcaagcgattctcctgcctcagcctccccagtagctgggattataagcacataccaccacgcctggctaacttttgtatttttagttaagatggggtttcaccatgttggccaggctggtctcaaactcctgacctcaggtggtctgcccaccttggcctctcaaagtgctgggattataggcgtaagccaccgcatccagcctactttagacagatactttgtctaagtggaataatacagtatttgtgccttcttgtctggctcatctcatttagcatagtgtcctcaagggtcatccacgctgtagcatctatcagaatttccttcctccttaaggctgaataatattccatttacatatagaccacactttgtttattcattcgtccattgttggatacttggattgcttccacctttgactattgtgaatagtgctgctatgatcacgggtgtacacatatctgttcaagaccctgcttttcagttattttgggcrcacacccacaagcagaatgactggatcataaggtaattttattttacatttttcgaggaactgctgtacagttttccgtggctgttataccattttacattcctaccaacagggcacaatggttccaatttcttcacatcctcaccaacacttattttcattttttaaaaatagtagtcatcctartaggtgtgagatggcatgtttccaatcttttgctgataaaaacggcagtggataatcttgtacacacctcatttcacacatatgaaaatatatctgtcgtttaattcctaagagtggaattgctggatcaaagcatcttttggaayttcttatggaagtctaacttatacacaaagttgcacacaaatcccaagtgcttagcttgatgaattttcacggagtgaccacgctcctgaagatggtgtccagaacattgtcagccccagagaagcccccagatggcccccaaagagcagccatcatcctgactttaacatcataaattagttttgcctcttgtgaactttttgtgagtggaatcayacaatatgtattattttgygtgtggcttcttttgctcgacacatatgtgtgcaagttccatctacactgctgtgtgtagttgttcattcattttcattctcactggagtattgcattgtaygaagataccacaatttatccgttctgctgtcgatgagcatttgggtagttcctggtttagggatatttcaaattatgtggctatggagatcactggcatagtcctgtccaataaaatatgatagacacagaagaactgaaaatatgagtcaaacagatatttgtaccaaaatgttcacagcagcactattcaccatagccaaaagtggaaacaaccgaaatgcccatcagtgaatgaatggataaacaaaatgtggtatatccttacaatggaacattattcagtcttaaaaaaggaaggaagktctgacatatgctacaacatgcgtgaaccttgaagacactatactgagtgaaataagccagcaaccaaggacaaattgtryatgatttctcccgtatgaggcaacctagaatagtccagttcacagagacagaaagtagaatagtggctgccaggggctgggaggagaggagcaagcggagttgttgttttatagaggcagagtgtcagtttgggaagatgaaaacgctctgggggtagatgatggtgatggttgcgcaacaatgggaatgtacttaacacagctgaacttctggacccttaaaaatggtccaaatggtaaatgttatgcatatcttaccacaataaaaaggtaaaaatatataatatgatccacaatgcaagccatgtatatttctagcagccacattcaaaaaagaaaaagaaataggtaaaagtaattttaaaaattacttaacccaggccaggtacagtgsctcatgcttgtaatcccagcattttgggaggctgaggtgggcagatcacttgaggtcaggagtttgagaccagcctggccaacatggtgaaaccccatctctactaaacatacaaaacaaaattaactacgggtggtagcaggtgcctgtagtcccagctgctcaggaggctgaggcaggagagtcacttgaatccgggaggcagaggttgcagtgagccaagatcatgccactgcactccagcctgggcgacatagtgagactccgtctcaaaaaaataaaaaacaaaaataaaaattacttaatccaatctatccaaaatattattgcgacacatcatcaatattagcaagttattaaggagtcattttgcatttttgttagtatacaaaatcccatatatatttcacacttgcagcacatctcaatttgaccagccatatttctttcttttttctgagactgtctcgctctgctgctcaggccggagtgcagtagcacgatcttggctcactgcagcctccgcccctgggttcaagcaattgttgtgcctcagcctcccaagtagctggaactacaggtacgtgccaccacgcctggctgatttttgtatttttagtagagacagggttttgccatgtcagccaggcttggatcagccatatttcaaggactcagcagccacatgtggtgggtggctccacatcagatcatgcaggtctagttcaagtcttttgatgaaygtatcatgcatacctgttagatatgtgcatttttaattttgatagatgttaccagattagcttctataggtgttaaaccaagttttcttttctggttttttttttttttttttttggtttgtttggagatggagtctcactctgttgcccaggatggagtgcaatggcgagatctcagctcactgcaagctccgcctcctgggttcaagtgattctcctgcctcagcctcccgagtagctgggactactggcgtgtgccaccacacccagctaatgtttgtatttttagtagagacagggtttcgccatattggccaggctggtcttgaactcccgacctcaggtgatccgccctcctcggcctcccaaagtgctgggattacaggtgtgagctatcgcacctggccaaaaccaagttttaatcccaccaacaatgtaagaaggagtgtgtctccatatccccacctgcataagtttgccagtttgatagcaaaacagtgcctgctcaggtggtgtgggtttaacacgtttctcttcctaggagtgaaaatgagaatctttttatatgttaaaatgccgctgcgctttcctttctgtgaaccattggctcaccaatttgagggctattttatacttctctcacccctctccccgttctccaggccccaccagagttgggactaaatgagggctcaaagccagatatttcagaatcgtgctgttgtcttgctggcaaattctgtctgagttctgggaagcagggcttatccttgagggcacaccgccccctgctggccaagatgggtttttcctccccagcttagaccaggagaggaggcaggacggctggcgactgaggggggctgcctctggagtctgggtttgatctcacgtataccattgactcctatgtgacctcaggtaagcaacttcacctctctgggctttctacttcctcacctataaaatcgaaataatagccattcttctcactctcggcgttgttggaggaataatccggtgatcgggcttgaaggtgcttcacagagtgtggcaaaaaacaagtgctaactaaacagtggctgggattcttgacattcagaaagacccagtggagagagagaaaggatgacgggagcttagcaaaagaagcagctggtgcagctggaatttcataggtccacttctgcctagccaacktctaaacctgttttctcttggctcccttactttccagccagaggctcagtcatactgcaatgctgagaactccctgcctaagccagacagggccttgacctttcccccacgttgggctgggcacactagagtgctgagcaaatccacactcagcacctcccctcccccccccacacacacacatacacaaagccacacmtgcaaagcatttggatatcttcttccagggagcttatagacaccccagcagagrcttctgtgatcacactggctgagcaccagctctctgtgtggtgctggatgaggkgagttttatctgagccactctggccccmcgctgtagggccctgtcctcttatttgacattcaactcttgcctaattgacaattacactcatatcyttcctctgctctgcaaccttccatggctccccagtgcctaccacstaaggccagattcctcaccctggcattcaaggccactcatggccttggatggtctgtgtgtggaggggcccactaggctacatgaggaacgctctctcaaatcctgcccttccttcaagattgaactaaatgccacttccttccttccytcatttctctacccattcattcaacatgatttattaaacacaaaatggatttattagcacatatttattacctactatgtgaagacattattctaggcagtggagagagatagtggtctcagccaattgcaactgaaatgtgttagttttgcaaatgtgaaacatatgcccatgcgaatgcgttggaaagttcctccayggccctgggagaggacatgcaagtcaggagccctgatgcgtcaccrgcctcacagtaaattcacctctgtgcccaagaatgcagggctgtctcctggtccaggatcatggtctcttcctcctctgatctccaaggacttgcactctcggctctgccactgaccagctttgtgactttgggaagtcatttttctaagtctcagattatgtatgtaaatgggtatataggaagtgattcctaccttgagagaggaattaaatgttaattaaattgcttaaagggttaggttacattagattaggtgtaaaaacgtctgcacgtggtaagtgctcattgagcggcagccattattattactattagccgcagctgacttgggcaacacctgctacctgcttccrgatggatccagaggtttgctttctttgcccactggagggcagcagaaagcagaaacctgccttccagagctttgcaccccggctaacacctaacactggcctctcaagaggcaggaggaagggtaaggggtttctgggctcaaaagtgaggctggccagtgaattttctgtgtctctaggactggatgctagtggctggggtaggttccctaaacagctccaatcaatgcaaaggcagccargtcatccagcccacagccccagtgtccgtccctggatgcatcccacagtcctggacaggatgggcaggagttctggcctctggagctgctcttcgcatttctgtctgtgtgaccttgggcaagtgccttgacctctctgtgcctccatttctttttccgtaaaatggaaatattgctgtttcccccaaaaggaaaagcttccatatatgcagagggatggccatgcttgcgttgctttgcatcaggtaaatctgttacattgtaattagcttttttcttctgatcacaaatgcaatgcattaattggtttgaatattttgagtgccctacagcaggtcaacccctgcatgagctgatgaaattggcaaaaatgaagctagtcattgtgttggggtggtgggattctggatgacagagttcccccctcagcaaccgccaccccattctccmaactttctatgttattgcatcgcctttacaatggtagaaaagagagaccaggaggaacgtaactgagcayttactatgtgtgagatgtttccatttatcctttccctaattctgcaggctctacacggcaagcccatgtctgtgttgcttgctgctgttttcccagtgcccagcaccgtacctggcatgtcgttggtcctcaaaacatacttgtttagcagtcaaagaaatgatttgtgcaaagtttacaaatgaggaaattgaggttcaaagaggttatgtgacttgttcaatatcacctagctagtgggaygcaggaccaggatcattggacttcaggtcctgaggaaggtctttctactcatgcctgtccctctgcctcctcacattccgacaccctctttgtaaagctgtcttattttacaggcatctgatcaggcggcctgcaagaagagtgcgcccccttagccagtatggccacgcttcctcccttaggggctgctgggtgtgcccctcatcttctcaaccccctggggacccctggaggatctggagcacaccctccagctgggggatttgcccagcaggtgaggccccttagtcgctgtagcccattkggaagtttggcaggtggatttctagtgcaaggccacctctgccctctgagctcagagccacctatttctgccccacccagtcctgcacacagctggtagcaggtgcagggaggaggcaaaagccagactttgcccctttatcttgcaccccttttcccattctcaggcagatgtgtgtccaaaagtgtttgacctgtgctgtgtgcatatgggaatatgcacatatatacatgcgtgtccccatgcacatacctgtggacatgggcagccctgtgtgtgagcacacatgtgtgtctgagtgtggcttgtgcgatcctccatgtgcccatgggtgcagacgtgaatccgagtgtgaacgtgagcttatatgtagctctgcatgtgtgtgggtaatgctgaaggatagaccaccaagcagaagggcatctccttgccccgcctcagtttcctcatctgtaaaatggggacaacaatggcacctaacaggtggaaccggcaaggcacacagtaagtgtcatgatagtagccctttttattaagcttctcggggatgtgtgcggattccacaaaataagaacgcagaaagggactggctcaagaaatgtttctcccatcattctttcatccttaggtccagaagtatttcttctgttctcttggttttatcactgcaaaggtaatataacaacagtggaggaagtttgagaagaaaacatggggaaggggagatacctgtcccccaaaaccccaccactcccgacacaagaaggaatttcatttttgcttgttcttttcctgactttgtccatgagccagcatggagcttggcacacagcgccgagctcgaaaaaaatatttggatgttttaagaaatatatattagctaaaatgactacactgagtatttttccatcctgcatttgttcacacatcagggacattttccatatgatagctggtctttatagttattataattattattattattttgagatggagtctgactctctcgcctgggccggagtgcagtggctcaatctcggctcactgcaacctccgcctcccaggtttaagcgattgtcctgcctaagccttctgagtagctgggattacaggcatgcaccaccatgacagggtaatttttgtatttttaatagagatgagttttcaccatgttggccaggctggtcttgaactcctgacctccagtgatctgcccaccttggcttcccaaagtgctgagattacaggcatgagccaccacgcccagcccagtatttataattattaaagataataggccaggcgcggtggctcacgcctgtaatcccagcactttgggaggccgaggtgggcagatcatgaggtcaggagatggaggccatcctggccacatttcacaatgtggcctagtgtttccacattgtgaaaccccatctctactaaaaatacaaaaattagccgggagtggtggtatgttcctgtagtcccagctacttgggaggctgagggaggagaatcacttgaacccgggaggcagaggttgcagtgagctgagatcatgccactgcactccagcctgtgacaaagtaagactctgtctcaaaaaaaaaaaaaaattaggaactacctactgctatagacgagtcacttgtattaagaaatgttatgtcgcagtaatgaacatctttttccatctagaattttttttctttctttggaacaggttagtgtttccacactgggaatagggtgtcccagaatttataaaggggattccactgaaaaaaaccagaaacattaaccatcaaggccatgcaaatcaaagccacaatgagatcccactacacacccccacgaggatggctacaataaaaaagacaaacaataacaagtgttggtaaggaatcagagaaatcagaactctcatacattgctgacagggatgaaaaaagtgaacaaagccagtcataaaagaccacaggcctggacgcactggctcatgcctgtaatcccagcactttgggaggccagggtgggaggatcacttgagcccaggagttctagactagcctgggcaacatagggagaacccatctctacaaacaattttttaaaaatttgctgggcatggcggtgcactgtggtcccagctacttgggaggctgagcagggagggtcatgtgagccctggagttcgaggctgcagtgagctgtgattgcactgttgcactccagcctgggcaagagaaggagaccctgtctcaaaagaaaaaaaaaaagaccccatgttgcatgacttcttttctatgaaacatctagaaagagcaaatccatagagacagaaagtaattggcagttacctggggccagaggggggtcggctgcaggactgactgctgataggtacagggtttctgtgggggataatgaaaaagtgccaaaattgattgtgacaaatatataaaaaactattgaattgtacactttatctgttgttgttgtttttgagacagagtcttgctctgttgcccaggctagagtgtagtggcatgaccttggctcactgcaacctccatctcccgggttcaagcgatcctcctgccgcagtctcccgagtagctgggattacaggcgcccaccaccatgcccagctaatttgtgtattttttgtagagatggggtttcaccatgttggccaggctggtctcgaactcctgacctcaagtgatctgcccgcctcggcctcccaaagtgccaggattacaggcatgagccaccacaccctgcctgaattgtacactttaaatgggtgaattgtatggcatgtgaattttatctcaataaagctgttataatcaagtatttttttaaaaaggatggagacccaagatgacaataaaaatgcacgccgtcatttactgggagcagggactatcgccaagactcattaatctcatgtatctttcacaataaccctattggcttattttccccattttacagataaggacgctgagattcagaatgactaagtaactggcccaacggcacttagttttttagcggtagaggtgtgatttgaacccaagctcatgctcaatttgaagtacttttgttgcctctttagaaggcaccaggagctaacgcaccaggccgacagcacagacaggggcccaggatcggggcctcctctctcccctgccattatctggcctgggcagccacagctcacaatcagggctctctatctctccctcaggccttctccctgcatctccctgtgtatggcccctccagtagaaacccagtggaggctgatctggcaaacagatctgactcaggcctctccaaggcagctctcaatcctgtccaccaagtagcctccgagacttcccaactttaccgcacagaaataataatacgtgtgcacaaagatgcacagacaaagatgttcaacatagcattgtttstaagagggaaaaactagaaagaacctaaatgtctgacactggagaaccagttattccacgacgtaatgckcagcccttaaaaatcctatagcagaaggatcctttctgacatagaaaaatgttcacagtatatcaagtgagaaaagcagagccctcctagccgctgccgcctgccccccaggccaacccctgnttgcatctacaatccagccacattaacccccttctggtcccccaaatrctccaggctttctcttctcaggcgtttgcagttgcttcttcctctgcctggaatccacttcccatcccatcccttgtcgttctctttcaagctggctaactctgctgcagccttcaggtctcagctgagctctctcttcccctgggaaggacccttgggccctcaggatggggcagggtccctcctctgtgctctcacggccctgtgggtcacccatcatggcccccatcaccctctctgtgactggccatttaaatgtctgccgcctgcatttgactccagaagacaagtccagacctgtctaactggcctgacactgctttcttagtgtcttatctcagaggaggcctcttccagtgacttctgtggcaactggagcaaaagccagactgctcttcatgttctccaaggccttgcttggtctggccagtgccacatgttttccaacatgccaaatgcatgcctgcctcaggacctatgcatttgctgtttcttctgcctggaataaatgaaaaataaataaatactttttttttttttttttttggagatggagtcctttctgttgtgcaggctggagagtagtggcacgaccttggctcactgcaacctctgcctcccgggttcaagtgatcctcccacctcagcctcccaagtagctgggactacaggcatgtgccaccatgctcagctaatttttttttgtatttttattagggatgggattttgccatgttgcccaggctggtctcaaactcctggcctcaagtgatccgcctgcctcagtctcccaaagtgctaaaattacaggcatgagccacagtgcccagccataaatacaataattttttttttttaaagaaaatttaggccgggtgtggtggctcacacctgtaatcccagcactttgggaggccaaggcgggtggatcacgaggtcaggagatcaagaccatcctggctaacatggtgaaaccccgtctctactaaaaatacaaaaaattagccaggcatggtgtcaggcgcctatagtcccagctacttgggaggctgaagcaggagaatggcgtgaacccaggaggtggagcttgcagtgagccgagatcgtgccactgcactccagcctgggcgacagagtgagcatctcaaaaaagaaaaaagaaaatttagtgctttgttgatttaaataaaattatccttggtattttagtgaggaaatacttcaaagcatgactttacctatctcaaaagcagatattgttatgtgctattaggatatctggacaccctgccaccataggagtttgcccttgcaggcattactaaatcgcttccttcacccaaaacatatcatggccatgagttgtgactgccaaggaatgtgccttgctagtttgaagatgcagttgattttattattttattattttattttattttttgagacagagtgtcacactgtcacccaagctggagtgcagtgacacgatctcagctcactgcaaactctgcctcccgggctcaagcaattctcctgcctcagcctctcaagtagctgggattacaggtgcccaccatcatgcccaactaattgttgtacttttaatagagatggggtttctccatgttggccaggctggctttgaactcctgacctcaggtgatccgcccacctcagcctcccaaagtgctgggattacaggcatgagccactgtgcccagccacaattgattttaaaatggtgtcaccctgactctgttatgctcctgtttccctaacagtgtcaccatggacccagcctcttgccatctttgcactctgccaatgtcagtgtgttggcaaagtgagtttaaaattgtagtcattcatctagccaaagtgatgattcaaatatttcaaaaagcaaacttttactctttcatagagaggagactgaattttccaaacaatcaaaatgtcacgtgcgtctgtgtgaagagaccaccaaacaggctttgtgtgagcaacaaagctgtttatttcacctgggtgcaggcgggctgagtccgaaaagagagtcagcaaagggtggtgggtttattattagttcttataggttttgggataggcggtggagttaggagcaatgttttgcaggcaggggttggatctcacaaagtacattctcaagggtggggagaattacaaagaaccttcttaagggtcggggggggggttacaaagaaccttcttaagggtgggggagattataaaatacattgatcagttagggtggggcagaaacaaatcacaatggtggaaagtcatcagttaaggctattttcacttcttttgtggatcttcagttgcttcaggccatctggatgtatacaggcaggtcacaggggatatgatggcttagcttgggctcagaggcctgacattcctgtcttcttatattaataagaaaagcaaaacaaaatagtggtgaagtgttggagtggcgaaaaattttggggctggtatggagagataatgggcaatgtttctcagggctgcttcgagtgggattggggcagcatgggaacctacagtgggagagattcaactgaagaaagattttggggtaaggggtggtattgtggggttgttagaaggagcatttgtcatacagaattattggtgatggcctggatgcggttttgtgtgaattgagaaactaaatgaaagacacaaggtctgaataaaaggagagaaataggtattaaaggactaagaagtgggaggacccaggacatccaattagagagtgcccaaggctgttcagcgtaattacttgcttggttgttgagtttttgggctgtatccttgacagagtcctcctttttaagttggaggctgagcttggtgaggtgtgtcttgaaaagaccattagtccgttccatctttcctgaagattgaggacggtaaggggtatgaagtttctactgaataccaagagcctgagaaackgcttgggtgatttgactaataaaggccaatccgttatcagactrtatagaggtgggaaggccaaactgaggaattatgtctgacagaagggaagaaatgaccatgatggccttctcagaccctgtgggaaaggcctctacccatccagtgaaagtgtctacctagaccaagaggtattttagtttcctgactcgggacatgtgagtaaagtcaatttgccagtcctgggcaggggcaaatccccragctggatgtgtagggaagggagggggcctgaacaatccctgaggagtagtagaatagcagatggaacactgagaagtgatttccttgaggatagatttccatgatggaaaggaaatgagaggttctaagagtcgggctagcggcttgtaamctacatggaagaggttatgaaatgatgacagaatagaatgggcctgtgaggctggaaggagatatttttcttggtccaagaaccatttgccttgtgtgggaagatattgataggtggaagtttcagcaggagagtaggtgggagtgacccatgaggaggagaaaaactgtctgtgagggacagaagttggaatgctagctctktctttagctaccttatcagcataagcgttgccccgaacgatgggatctgatgccttttggtggcccttgcagtgtatgactccagtttcctttggaagtaaagcggccttgagaagagtttttattaaagaggcaataatgatggaggacccttgcgtagtgaggaaacctctttcagcccatttaacaccatggtggtgcaggatatggaaggcatatttagagtcagtataaatattgatgcgtagtgcgtagttcctttgcaagagtgagggctcgagttaaggcaatgagttcagcttgctgagaggtagtggaggtgggcagagtggtagcctcaatgatagatgtggaagatactatagcatagcctgcctttgctggtgtgtggcgattaggcctagtggaactgccatcaatataccaggtgtgatcagggtgagaaacaggaaagaaggaaatgtggggaaatagagtgaatgtcaggtgtatcatagagatacagtcatgggggtcacgtgtggtatcaggaataatrtgggaggctggattgaagtccgggccaggaacaatggtaactgtgggagactcaacaaagagtgagtacagctgaaggagccggggagcagamagtatatgtgtcaggtgtgaggaagaaaatagattttggaagttataagaactgtagagagtgagttgagcatagtttgtgattttgagggcctccaaaagtattagggcagcagcgrccaccgcatggagacatgatrgccagcctaaaacagtaaggtcaagttgtttggacaaaaaggctatagggtgcggtcccagtccttgtgtacgaattccaactgcacagccctacacttcggctgcgtgtaatgaaaagggttgagatgagcyagggagagctagtgtgggagcagtctctaaaactgtcttcaaggaacagaaagaggagtggggaaaggattgagaatctatggagtcagctaggtttccttttgtgagtttatacaatggttttgttaggatggcaaaaccaggtatccaaagacaawagtatccaaccaygcccaggaagtaaaggagttgttgttttgtagaagggsctggggtttgagagatcagtcggacacgatccgcagggagagcgcatgtgttgttatgaagaattatgctgaggtaggtaatggatggagaagaaatttgagctttggacagggatacccaatatcccttggagaataaatgttgaaggagcaggagggtgtcttgttgagaagattcaaaggaggggctacaaagtagaaggtcatcaatatattgaataaggcaagaagcagaggggtggaaagaaagtaaatcatragaaagagcttggctgaagtaatgagggctggccctgaagccttgcggcagtacagcccaggtaagctgctgggactgatgggtgtcaggatcggtccaggtaaaagcaaagagaggctgggacaaggggtgtaggagaatagtgaaaaaaagcattttwaagatcaagaatggaatagtgagttgtggaggaagatattgaggacaaaagagcgtacgggttgggcaccacagggtggataggcaaaacaatttggttgataaggcacagatcctgaactaacctgtaagacttgtccggtttttgaacaggtaaaatgggagaattgtaaggagagtttataggttttagaagcccatgctgtagcaggcaagtgataacaggatttaatccccttaaagcctgttgtgggatgtgatactggcattgagtggggtaagcgtgattaggttttaatgggatagtaatgggcatgtgattggttgccagggagggagtggaggtgtcccatatttgtgggttaaggtcgggggatatgagaggaagacscaaaggaggcyttgggttgggaagaagggggcaatgagatgtggctgtagtacaggaataatcagggaagcagataatttggttaaaatgtctcagcctaataaggaagctgggcaggtggggataactgaaaaagagtgcataaaagaacgttgtccaagttggcaccagagtgggggagttttaaggggttttgaagcttggccrtcaatacccacaacagttatgggggcgagggaaacaggcccttgaaaagaagataatgtggagtgggtagcccccatatcgattaaacgggatggacttaccctccactttaagagttacccgaagctcagcgtctgtgatggtccaggaggcttctgaggcgatcgggctacgtcagtcttcagctgctaagccgaggagatctgggaaggagtcggccaaggaacatagggtttgggctccaggggctttaggagtggcrgygatgtgagtcggacagtccgacctccagcgggggcccgcacagacagggcacggcttaggaggaatcccgggctgcgggcattctgaggcccagtggccaggcttttagcatttgaagcaaggtccacgaggatgttttgaaggagcccctgggagctgtggcttggatgttctgaagttcttgtatgctggagacgtggttgtgggctgtcttacagcggaggcgagcagctgtaactcagaaatgcgttgctgcctggctacctcctctgtattattgtacactttgaaggggaggttgattaattcgtgttgtggggtttgagggccggattccaatttttaaagcttttttctaatgtcaggagctgggtgataaaatgcatattaagaataaggcggccttctggcccctctgggtctagggcggtaaagtgtgtaagggttgctgccgagcgggccatgaactgrgctgggttttcgtctttaccttgggtagtttctctaagtttgtcataattaacagctttgtaagctgcctttttaagcccttcaactaggcaggaaaccatgtaatctcgcctagccatacctggggaatctgcctgatagttccattgggggtcctctcggggaactgctctactgccttcctggaggtcaggttcatgaagccggcggttatcagcgtgagattgggctagagaaaaaactctttcccgttcatctggggagagggtagaagtcaggatgacatttcagtcactccaggttaaattgtaggacagagttagatatcgggattcctgtatatatttagtggggtctgatgagaaagagcctaaatgctggctgatttgggaaaggtctgatagagaaaaaggcacatgtaccctgactatgccttcagctccagccacctctctaagaggaaattgttgggcaggtgggggagagctagccgcagaacgaaactgaaaaccagactgggtgtggggagggcgggtaatagaagggttataggatgtgggagcagaggctgaagaagagttggagsctgattcagcctggcggggagcgagctgaggaggagcagtctgggaagaaggtgagaggtcagatggttcagtagaaaaggaagattcacaagactcagcgacgcttggggttgggactgaagggacaggtgggagggaaagaaggaggatttgggacgagtcgcattgggaacagagactagggagggaacgaagtgtgaaaaatgcctggacgtaagacacctcagaccatttgcccatttttcaacaaaaattatctaggtcttgtaggacggagaaatgaaaagtgccattttctggccatttagaaccattgttagtttgtattggggccaagtggtgttgcagaagaaaataagatgcttagattttaggtcaggtgagagttgaagaggttttaagttcttgagaacataggctaagggagaagaaggaggaatggagggtggaagkttgcccatagtgaaggaggcaagtttaaagagaagggtagagatatggagaagggggtggggagcagccctgggctgcaatgtgggtgagcagccaaagcaggcgtccccgcaattgacttgccaccaagggaatgtgggtgawtgaccaaagcaggcgtccctgcggtgatcggacaccaatggaatgtgggtgaataatcaggcaggcgtccccgcagtgattaaatggcaagggaagactgtcttcctgagtctgtgaccggccctggagttttgggttcacggataaaatgtgtctcctttgtctctactggagaggaaaaagaactggaattggaaggacagagagattgaagggtagcaagagaggctggagaagagagtgaaaagaccacttacccaatttgaaattggtgagatgttccttgggctggttgatctgaggacccgaggtcgtaagtggatctcttcacggagtgagggtgaggacaggggactggtctcccgaaggagtccctctgacccgggtcttcagcaccaaatgtcacacgcatctgtgtgaagagaccaccaaacaggctttgtgtgagcaacaaggctgtttatttcacctggatgcaggcgggctgagtccgaaaagagagtcagcaaagggtggtgggattatcattagttcttacaggttttgggataggcagtggagttaggagcaatgttttgtgggcagcgggtggatctcacaaagtacattctcaagggtggggagaattacaaagaactttcttaagggtgggggagattacaaagaactttcttaagtggggggagattataaagtacattgatcagttagggtggggcagaaacaaatcacaatggtgaaaggtcatcagttaaggctattttcacttcttttgtggatcttcagttgcttcaggccatctggatgtatacatgcaggtcacaggggatatgacggcttagcttgggctcagaggcctgacacaaaagacctgaaaaagacaacttgagaccaacagaatgtctctccctctcccccgtttcttttctccttttttttttttttagcagcagtttactcaaaaggtaaacaaaaaaatcttttgctatctcttattaatactatatgaggcagggtgcggtggctcccgcttgcaatcccagcactttggaaggccaaggcaggcggatcaccctgagatcaggagttcaagactagcctggttaacatggcaaaaccttttctctactcaaaatacaaaaattagcctggcatggaggcgcatgccaataatcccagccactcaggaggctgaggcaggagaatcacttgaatccaggaggtggaggtcacagtgagccgagatcacgccactgcactccagcctaggtgacagaacgagactccatctcaaaaaaaaaaaaaaaaaagaacaaaaaaaaaactatgtgactatctagttcaaaatagaaaaatgattctacttttgcatcaatgcattataaatataaagcctaattttaataaaaccttataaatcatctaatctcaatcagctttgaccacacgagataatatttctataaaccttttataacttcttacaatttttccattcctctttcttttcccaactttctatatccattcagttaatctattttattctttccttcttttatcccaatttcatacagcctttaaataacctctaaactaggcaaaaccactttctctttaacaaaaaccacatgcttatgtctttcttataatcttccttcctaaaaagatgtcttactttccttacatattctgaatacagaattgtcttccttctggtctctagtgttagttaccatatattagtcagaattttaaatcttagtaatcttaatttatactgaaaatctaagaagtaattttttttttttttttagagtctcactctgtcacccaggctgcagtgcagtggcgcgatctcagctcactgcaacctccacctcccaggttcaagtgattcttctgcctcagcctcccaagtagctgggactacaggcacacaccaccacgcctggctaattttttgtatttttagtagagacagggtttcaccatgttggccagtctggtctcaaactcctaacctcaggtgatctgcccacctcagcctcccagagtgctaggattacaggtgtgagccaccgcccagccagaagtaattttgtcactatgtactaacaattgattaatacacattttataatatttagaaacacaggctttctaatggaacaatttttcagtgtggaataggatacttttactagcggatcttaatatctctttttttttttttttttgagacagggtcttgctctgttgcccaagctggaatatagtggtgtgattatagctcactgcagcctcaaactcctaggcttgagtgatcgatcctcctgcctcagcctcttgagtagttaggactaacaagcatgcaacaccactcctggctaactttaaaatttttattttgtagagacaaggtctcactatgttgccctggctggtctgtaactcctggcctcaagcagtcctcttatctcagctttccaaagtgctgggattacaggtatgagccaccacacccagcccctaaatatcttttgtttctctgaaataagaaaccaaaagtatatgagcttaaacttatatgtagtaattaatgtcttagcattatatcttatttggaaatgatctagatcttcaataaatattcatagtttaatttagcttggcaaaactctaaaggcatagttaccaaaaaaatttgaaaaactttttcccttttgtggccatcgccaaagcaggagtagccaaaatgaagtttgatccctttgtgacttatttttttttcatttttttgtttgtttgtttttgagacagagtcttgctctgttgcccaagctggagttcagtggcacaatctcggctcactgcagcctcccacctcctggattcaagctattctcctgcctcagcctccaaagtagctgggcttacaggcgtgtaccaccatgcccagctaatttttgcattttcaatagagactaggttcaccgtgttggccaggctgctcttgaattcctgacctcagcttcccagtgttgggattacaggtgtgagccatcacacctggccttaattaattttattaaataacatattttttttaatggaacgcttcagaatttacatttcatccttgcacaggtgacatgctactaatcttttctctatcattccaatttcattttatttatttatttgtttatttatttattttgagacagagtctctctctgtcacccaggctggagtgcagtggtgcagtcttggctcactgcaacgtccacctcccagattcaagcaattcccctgcctcagcctcccaagtagccaggattacaggcatgtgccaccacgcccagctaatttttttatgtttagtatggatggggtttcaccatgttggccaggctggtctcgaactcctgacctcaggtgatccacccgcctcagactcccaaagtgctggaattacaggcgtgagtcactgcacccggccttcattccagttttagtatatgtgctgcgaagcgagtacctcactgaattttagacaaggtaggaaatttacatttcaaagcacagagaataaatttaagctttccagaaagctgcttaagttttacattttttttttccttcagcaaaaaatcacaccaacaagaaaggaagcgaacagagagagggactcaccatataattaaaagaggggtttcagtcacctgaaaaaaaattccccaaaacaagatccaaaatagaagaagcagaaaggctctattttaaaaattatagtcttaatacctgcttttaattaagttgactttgaactacagagctcttaagaaaatctttttttttttttttttttttttttttttgagacggagtctcgctctgtcgcccaggctggagtgcagtggcgggatctcggctcactgcaagctccgcctcccgggttcacgccattctcctgcctcagcctcccaagtagctgggactacaggcgcccgccactacgcccggctaattttttgtatttttagtagagacggggtttcaccgttttagccgggatggtctcgatctcctgacctcgtgatccgctcgcctcggcctcccaaagtgctgggattacaggcgtgagccaccgcgcccggccaagaaaatctttttatcaggttttagccagataaattaacacacattctcgattttgtttttgtttttggcttttcctctctgaaatttacattaagaagagttttggaggaggggcatatttgtttgtaagaggtctagggtaatcactcttttaagctgtgtgtctttgaaatgttttaattaaatgtgtcctttctttctgaatatgtggtttcattaagcttaggagagaaggctaaacaaaacaaaaattcctatcgtagtctaaatagaaaccaaaattttaaatcaaaggtatacctgcacaagttactcaaaaccaacataaataggtgtgcatgagaccaacagcaggtgctcatacagcacccagcacggagcccagtacacagtaagcactcagtgctggctagctgttctcattatcatcatcatcattgtcgtcctcatatatgtatgagtggctgatcaatctctgcgatcatggatgaggaagactttggaagtcaagacataaaaggaaactttgaagaagggcaggttatcccaggccagggcaagatactagagctgcattgtagcactgcagagctataataaaatgggaagcagcagcccatgatttctgggggtgctggggaagatgaggacccaaggggaaaccaccgacagctagtgatcagcttgactaaagaacttcccacaaccagagttttgacccaagatagtacaggatttggaggaggggtgaattcctcatcccaggaaatgtacagagccgaggctcagtggacagctgtcatcaggaagaggattcctgcactggtgacaggttgaaggaaatgacttattaggtcctttatttggtcttgatctctctgaataagggtcccaagattccctcccctgttgtggccacatagtcagcaacagttcataacataataagttattaaacatgttaagttacatgtaacataataaatatatttatttacataatagcattacatttttgttcataattacataaattaaaatttacatttacattcatattttcatcaatatgatacatatctataattatttcattcctacattgtgtttgtatacttttacgttaacctcttcatgtgacattgattttgtaatgtcattttctttagagagaataagaagatactttaatcttttctctagcacagttgactaatttttttttcttttttttttttttttttgagacagagtcttgctctgtcgcccaggctggagtgtagtggtgcaatctaggctcactgcaacctccacctcctgggttcaagcgattctcctgcctcagcctcctgagtagctaggactacaggcacgcctggcgaatttttgtaattttagtagagatagggtttcaccatgttggccaagctggtctcaaactcctggtctcaaatgattcacccaccttggcctctcaaagtgctgggattacaggtgtgagccaccgtgcccggcccccattttttttttttttaaggcagggtcttgctccattgcccaggcaggcatgcagttgtctgatctttgtacactgcagcctcaaactcttgggctcaaaggatctccccgtctcagcctcccaagtaatcaggactacaggcatgtgtctccacatgcaactaatactttaagattttgtagagatggagtctcactatgttgcccagattggtcttgaactcctggcctcaagccaccctcccaccttggcctcccaaaatacggggattacaggcatgagccactgtgcctggccccaaatttyttatggtcgataaagtttctttcagctttgcaacttattactggtacagtagccccctcttctgcaaggttttgcttcctgaggtttcagttgcccatggacaaccacagtctgacaatattaaatgaaaaattccagaaatcaacaattcattaagttctacattgcatgctgttccgagtagcgtaatgaaatttggtgctgccccactctaccccaccctgtcccaccaggggtgtgaattgcccctttgtccagcatcttcactacctgcccattcgtcaacttagtagttgtcttggctattggatcaaaaaaaacatagtctaaataggattccgtactatccacggtttcaggcacccactgagggtcttgaaatgtatccctcgaggataaggggggactactggaaggtcataaaattctaggattgttgtcaaatttggaagaacctctatcaagtttctttaatatcggagctgtaagatttccggacttattatgtttccttgatgactaatcttaaaatttttttgaattgatgctttctattacatcctttttgtagtggtgtattttgacttttgttattttcatcaatgtcagtattccgtgacaacttctccttagctagatcccccaaaatgccagaagcactggggcaatacccaaaagaaggggaagtatgacagagagggaagttggagtgagaggggcagcagtcttaataaattacagttaaaacatcttacattggcaaattctactaaagcatgtgatcctgagtgtgcattacttggcccctcccaggcccctggaaggcccctggcaagtgaggggctctaaggcttaagctgtgactttcacagtaagtttgctaaatccatttctgcctttccccagcgtgatggggagattctgtccacctccacttaagcgttgttttttacaggaagcctccagaataagctagttgcccctacccccaccccattatctgcgtcatgaggctggaggtcatgactacctggctccttctgtatcctaagtagactgaagagtgcctggtacatagtagaatcttaggctcagggctgaggtgagctgccagggtcatgcagataggaactgtcagagctcgggatcagccagaatgaatgagtgaaagaacgaatgaatgccagcttcccagactcagtcagggaaacctcatttctttctttctttctttyttttttttttgagacagagtctccctctgtcacccaggctagactgcagtgtgcgatctcagttgactgcaacctccgccttctgggttcaagcgattctgctgcctcagcctcccaratagctgggactacaggtgcacttcaccactcctggctaatttttgtattttgagtagagatgggatttcaccatgttggccaggctggtctggaactcctgacctcaagtgatcctcctgcctmggcctcccaaagtacttggattacaggcgtcagccaccgtacctgactagaaacctcatttcttaccagaactcttgatggcctgcttcccatcctccatcctggaagactgatctgaaaccccaggaggaggtcctctgagccctgaggcagagatctctcacctggaagatgggtctaatgactgcgccccacacacaccagagaggactgcagatagtgcgggatgagaggaagatctctggccctggagacagcatcatcaagcggtagcttcatctttgggagctggggcytctgcaggagctttaccctcctctctccatgctgagcctgtctcaaccccctaacctgcaccccagtcttttggggtcacctcaaggctttggctgatgcttctttgctgacgtcaaccaaggtgatggacccatttgtccttgtaaagtaactcttgaacatacatgcacttctccctccctcctcttgctttgaagggtgggtgggcacctgccaccatggtcagggtgagggccagccccatacccccaatgtcagaaggcagctgcccctggcctgtgggtttatctcagaggggccaggttttcctcactgtgtgtccccagcacctagcctggggcccagcccagggtcacactcagtaaatactggctgagaattaagggggaactttctcgttcccctccaacacttttcttttcttttttttgagacagagtctcactctgtcgcccaggctggagtgcagtggcgcgatctcggctcactgcaacctccacctcccagattcaagtgattctcctgcttcagcctcccgagtagttgggattacaggtgcccgtcaccacatccrgctaatttttgtatttttagtagagacggggttttgcatgttgaccaggctggtctcgaacttttaacctcaagtgatccacccgccttggcctcccaaagtgctggaattacaggcatgagccacckcacctggcaccaatgcttttctgcaagtgctagtgtgtgccatasagacatctgtgcatgcccaggggcggctgaggggccataagcctcctttgactccattatcttgcctgtgcaggccagacgattgcctgaacccacaatagcttcaccagaagaggggcttactcatcacttccacacaacctgtgcccytcccccactgggaccagctggggttgagggggtgagggtcaggctggggaaggctcctggagattgcatttgcaacctacccctcccctgccaacctctattaccacactgagaggaacagggagacatcactaaattgaggacctaggtagagagagaagaagagagtgtcctgtcagccttcaaaggttattcagagctcttggtgcaggaaggccctgctagaaaactccaagagtccaggagggccttgggcataaaagctcagagttgtcctcaagaagcaactgcatggcagttatatcagatgcacattcaacaataataatagcaaacccttacacagatctacaagcccttatccacacttcagagatcccagtgtttctgaacaaaataatgtaacaccaaaactcattgggtagccaaaacctaacctgaacagatgtatgaatactcgtatattgttttctgcagaaatattaatgtgtttcgttatgggatgctaagccagatcccactacccactagtgtgttatataagtcatgtgctttccaaaatcccaaaactccctaaattccaaaatgcatcaggatcctgagacactggagtttcagttaaggagttgtgacctgtgtagcttcctccatgacaggcactgttctaactgctctccataatattaattcattcaatccttacaatgacctgacagagtagaacttactattattcttccaattttatagataaggaaactgaggcagagagaggtaaagtgacttgcccaaacacatacagctaatgaatgctgcaactgaagcttccagagcctagttccagagcccactctccgaacaagtctaccatctatttcccttaaaagggctggtgaggccgggcgcagtggctcacacctgtaatcccagcactttgggaggctgaggtgggtggatcacctgaggtcagaagtttgagaccaccctgccaacatggtgaaaccccatctctattaaaaatacaaaaattaggtgggcgtggtggcgggcacctgtaatctcagctactcgggaggctgaggcaggagaactgctggaacccaggaggcagaggttgcagtgagccgaatccgtgtcattgcactccagcccaggccaacaacagcaagaattcgtattaaaaaaaaggctggtgagaggggcgtggaggttgaggggtgtggtaaacagtaggagataacgattttatgttgtgtgtgtgctatggtttggatgtggtttgtctcctccaaaatgcatgtagaaacttggtccccaatgtaatggtattgggaggtggggcctttaagaggggattaggtcattaggagggattaatgcctttctcacaggagtgggttaattctcacagaagtgggtgagttattgagagcagttcattacaaaagtgagtttggcttcctcggctttctcttgcttcctcggctttctcttgcttcctctcaccctacgatgcattctgctgtgttacaacacagcacgaggccctcaccagaagctgaccagatccagccaccctgtcttggacttcccagcctccagaactgtaaaaaacaaaccccttttctttgtcaattacccagtcccatgggttctatgacagcaacagaaagtggacaaattgtgtaacatgcacatgtccaggagggtgtgtgagaggtaatcctgttgttacggttgttctgtagggtgaccacaattgggaatttccctgggactgttttggttttagcactgaaaactctgtatttcaataaactactcagacctggtaaaccaggatggttggtcacyctagttcttggcctcttttcctatgagcaacatgaggctcatgacccactgaggaagattctaggatctgaagatgcactttgtctacataacacagcttctcaacccaaaccaggatctccagcaggcacttactcaagacatggggaagaagccccggagaaaatgctggctgtatcagattcagtgagggacgatgcctctgtctccacctggcatcttcctaagaggttttcaaggaccaatgtgactctatcaggctttcaccttgagtgttgatgctggcctccattgtaaatacagtgggaatacacttgatattctaatttagaaatgcctgactctcatccccagctttgaattttaactcctcaaagtccaaagtgacttcttaggaatgacccacaccatgagctcatatctatcttcctgaggcctgcccagacctgtcgaagtagagagaagaagacaaggcccctgctcttgagaagcaggtatgggctatggaggcaggacagaactatgccccaggttcagagagtggggaagagagtcctgtgtgcygagggctcccatggactcctggagcaggataaggaaggaatgggggraggatggrgataccatacaatcctcctgagggctgaggattcccccagtcaagaactgaggctggagactgctgtttaaacatggcaggttgaacacacttatttctctccattgttctctgaaattccaagaaaatgacacagggattttttttttaaatgcacatctatctactgggacaaagaaaacgtatgaggaagaaaatagcagatgagaagaatcaaccaaattccggaagctggaaggcagatggtgagtggggactgacaagaaacccaggaagttgaaacctggctgctcacggggagcctttaggacaaagcaaattgcagaatctcaggctcagggattggagggaccagaaatctctgaagaccaagtggtgtcaggtagggcagaagacagaagggtgggttggttatcaatctgggagacaattggatgtccaggcctcctaccccagctggcacaggcaagatgtgaccccaccccacaataacacgaggcccacccaccrgatagkctggatgaaaagaataatctgagatgatgtttgctatggtttgaatgtggttccccaacaagcrtgtgttagaaacttaatccccaatgcaacagtgttggcaggtggggcctcatgggaggtgttyaggtcatgggggctccacactcatgggtggattaatgctgagtataaaaaggcttgaggcygtgagatcaatctcttgctccctctcttaccctctcggactctctcatcttctaccatggaatgatgcagcaagaaggcccttgaatgatgccagcaccttgatattggactttccagcctccagaaccatgagccaatacatttctgttccataaaaattacccagttccaggtattctgctatagcagcacaaaatggactaaaacaatgttggcacaagactcagtgctgggcctggcatgcaacaggtccttggtaagttgtctctatgattatactcaggcctctttctatcttgctctcttattttcttctcctggtcagaaagaggcttaaagacatatgatatggacagcagaatctggcttcctggtaacactctttccacctatccatataccctcctcacctaccaggctatttgatgtggcagaaatgagcagccttctagatctactatcctctaattttttttttcccccaatacggagtcttgctctgtccacccaggctggaatgcagtggcacaatcatggctcactgcaacctctgcctcccaggtacaagcaattctcctgcctcagcctcccaattagctgggattacaggtgtgcaccaccgtgcccagctaatttttgtatttttagtagaaacggggtttcaccatgttcgtgaggctggtctcgaactcctgaccttgtgatcgaacacctcgacctcctaaagtgttgggattacaggcatgagccactgcagtgggcctactatcctcttctttagtaacasaatctccttttttttagctgggtaccttgccttacaggtataagacatttcctagtttcctttgcgattagatgtggccatgtgactatataagcagaatttgttgtgaggaaaaccaggtatctagatctttaaaagacagaagtggccaggcgtggtggcaggcgcctgtagtcccagctacttgggaggctgaggcaggagaatggcgtgagccccggaggcrgagcttgcagtgagccaagatagtgccactgcagtccagcctgggcaaaagagtgagactctgtctcaagaaaaaaaaaaagagagacaagcactagctgctgcatcctttcctcagccctgctctctggactgcagatgtgaaggctggtgccccrgcagccatactgyacaatgaggataggggctggatgctagggatggcagagcagagagatagaaggaggcatcttcacagagttgtcacatcagtggcattgcctgcctctggcctttttacacaacagagaaataaacttctgtcttttttcagccactattatttgggtgttttctgttgtgtgcaactgatcctaatcctgtctgataaatgtgagtgaaagggcaacctgtcccttgtcctctttcttattcagagatcttagaagatcagaatcagcagggaccttggctgtgtggggcaaaatctggcccacagatgttttctttggcttatacaaagttttaaacattaggacacatttgaatacagtttaaacattaaaagatgggtctccggcttttttggatgattggaggatctggcaacactggatttatgtttcagcacagcagcatcttgacgaggcatttgctctctcctttccacaatccccacctctcccattgtgtgaggatgttcttctcctcctatgagcgaggcgtgtctatggtttatcctattaattagtatgtatatgttatccccactacacagatgagaaaatcaaggctcaaaacaactttcccaaagccacagagctgtaagtggtggagctgaggctcctgatcatatacattttgatcttgatttttatttatttatttgagacagagtctccctctgtggcccagagggattctcatgcctcagcctcccgagtagctgggattacgggtgcatgccaccatgcccggctaatttttgtatttttagtagagatggggtttcaccatgttggccaggctggtctcaaactcctgacctcaggtgatccgcccgcctcggcctcccaaagtcctgggatgacaggtgtgagccactgcgcytggcctggaatagatcttgaactagatttttcaggagggctacattggaggtagagagacattctcaaacatacacaatctctgttgtcttctcacaggagtggcgtgctgtgtggataatgaatattggggaaggcatctctctccagcccctctcaagctttctgtagtcactggtccactctgtattgctatgaagaagctcaagaccagcctgtatcactcggggtcctggcaggaaccaggtgccacactcaaactgagtaattgaagagggtttaatatgggagttatttacataggtgtgggctggtgtagctgcccatatgccctcaaaatcacctctacatggcaatagctacttactgctaacagagtctctctctcattgctgcaaatattttctagccatgcaagaaactcagccggtcatgttgaacaaactaagagtgccaggaagttaatgtcctggaagcattgccagaggggagggggcagttagattccccagcttcctcgctcctctgctgggttaagcctgcaacatattcatcatctcccagagtgctgcccggggatagagctccaggtgctcagtgtggtgacctgctcatgtcagcttcttcccctttcctgtcttgtttcgcacccacatccttcccatgtttcctcttcccaaataaactacttgcattgaaatctttgtctcaggctctgcttctggggaaacctgaacctagcgaggagagtttaaggaaagcaacaaagggtggcgtgggactctggtaacaaagggaaccactgcctttcaagaaaacggcaggaggccaggcacggtagctcatgcctgtaacgccaacactttgggaggccaaggtgggtggattatttgaggtcaggagttcaagaccagcctggccaacatggtaaaaccaagtttctactaaaaatacaaaaattagccgggcatagtggtgggtgcctgtaattccagctactccagaggctgaggcatgagaattgcttgagcccaggaggtggaggttgcagtgagctgggattgcaccactgcactccaccctgggcgacagagtgagactctgtctcaaaatcaatcaatcaatcaataggcaagagggaatctggaatggggagggtatggagaggtgggccaggaggactgacaggagatgtggccttggtagagagacacagtcagcccagtgactgtgcaccgagggaaagggggaatgaatatcctgacctctctcctctcatctgctgttctcctgctggtgctccctgttgacaaaacccaaccagagccagagggcaggagagcccattggtctcacccacagcagcatggctgccggacacagaggagcagagcagcgtgcagaagggtggagagtgcacctgcaggggcaaacagaagaactgcatcacgcagcctggccctttggatctgacccatttggaatgcagaattttgatagtctaggatctgggtaaagggttttccaggtgtcaggatggaagtgactaaggtgcagaggctggagggctggggcaggtagaagcaagcattcctgttacctactgctgtgtgacaatctccccctaaaacacaatggcttaaaataacatccatttcattacatatctcaatactataggtcaggaatttgggctgggcttacttgggtaattcttctgtcccacatggcattgaccaaagcctggttttcagtgggcagctgggctggatggcccaacacagcttcgctaacatgattgctgtcttcgtagggatggtggaagcctgggctcagtgggactgtcaactggaatggccatatgtggactctcttagcatgatggtctcttctagaagcttgggttcccagagagaatgttcaagaggccccaaaggacaccacaaagcttctttatgaccaaggctcggaaatccaggaagcttgctcccatcacgctctattactccaacaagtcactcaggccagcccaggtccaagaggaggaaacctagactccatcttgcaatgtgaagaattgcaaataatttgtgtcaccctaaagcaaccagcaactcatctaggttgattggcatttcagcaatgtggtgggaagtggtgggactgatgttgaagagggacttgaatgtcatgagaggctggggaggcaataaggtggggagtgaagtttctcgagtcagattcaaatttaaaccccagttttgccacttacaacccatgagccaagcaggctgtctctctatctgaacctcagtgtcctcatctgtaaaatgaggagaacacctcctacatctgaggatgactgtaaagatgaaatgggatgggtgcttataaagtgcttcccagtgtacctggctccaaacctgtctcagtaaatggcagcccctattattgaacccgagtaacacagagagccaagaaaggatcttacaaaaaactcccctggctttgacaatgtatgagacccactgatagggtttggctttgtgtcctcacccaaatctcatctagtagctcccataattcctacatgttgtgggagagactcggcgggagataattgaatcatgggggatggtctttcccatgctgttcttgtgatagtaaataagtctcacaagatctgatggttttaaaaatgggagtttccctgcaggcgctctctctttgtctactgccatccatgtaagacgtgacttgctcctcctttgccttctgccatgattgcaaggcctccccaccattgtggaactgtaagtctattaaagcctctttcttttgtaaattacccagtctcaggtatgtcttttttttttttttcatgagatggagtttcgctcttgttgcccaggctggaatgcaatggtgtaatcttggctcaccacaacctccacctcccaggttcaagcgattctcctgcctcagcctcccgagtagctgggattacagtcatacaccaccacgcctggctaattttgtatttttttttttttttttagtagagacggggtttcaccatgttggtcaggctggtctcaaactcccgacctcaggtgatcctcctgccttggcctcccaaagtcctgggattacaggcatgaaccactgcgcccaggctcgggtatgtcttcatcagtagcatgaaaataatggactaatacagccaccctctccctcactcccacatacaaccaaaccccaaatccagctgattttacaccctaaatgcagcttgaatatgagtttctccacttcccccactgacatcactatgccctacccagaccatggcagttgcctccttcctggtatcctgtcctccctcacccccgctggccccctgtaatgccctcccctcacagcagggagcccaggcttctcaaagtgccctgtgggtgcgaaccacctgggggtcctgtttgtataaaatacagattctacttcagtaggtctgggatggggtctgaaagtctgcatttgtagtcagctcccaggtgatgtgggtgctgatgatccctggatcacactttcagtagctggagaatattttttccaaataaaagggtgattttgtctcgcctccacttaaaacactccactgacttcctaggaatcccacaccatcgctgggtcccacatccctggcaggattcagctcccatcagaccttctagccccttgctctccactctcccactctctctttcccccttgtttatgggtttgttaatttatttatgatgaaatgaaatgaagctaccatccaccccagtactggaacattatcaataacctgtgtgtggccaggcgtggtggctcatgcctgtaatcacgccttgggaagccgaggtgggtggatcatgtgaggtcaggtgttcgagaccagcctggccaacatggtgaaaccccgtctctactacaaatccaaaacttagcagggcacggtgccacgcgcctgtaatcccagctactcgggacgctgaggccgagaactgcttaaaatccaggaggtggaggttgcagtgagccgagatttcgccactgcactccagcctgggcgacagagcaagagtccatctcaaaaaaacaaaaacaaaaacaaaaaaacaaaaaacaaaaattagccaggcgtggttgtgggcgcctataatcccagctactcgggaggctgagacaggaaaatcgcttgaaacgctgggggtgcgggggggcggtggggaggaggcgggccagaggggcagaggttgcagtgagcccagatcgcgccacttcactgcagcctccgcgaaagagcgaaactccgtctcagtaaataaataaataaataaataaataaataaataaataaataaataacctgtacccgcgtgttatttccctccgtccttacctcctcccggctccttccctttcacctgagataaccactcttctcgtatctatgctcatctttcccttgctttacattttttccaccgatgcatgtgtctaaacatacatacttttggttttgcttttacacattctaaaagttgcaccattgtatgcagttttccgcaacttagtttttttcactcaacattgtttctgagacattgtttctgttgttgtctggctgaagttcattccgtttcactgctgtctaacgtttcatggtgtgaatattccggtttatttgcccactcgcccgtggaggggcatttgagggtgtttccaatgttcctgttattcggaatagcgctggtgtgaacattctgcacaggtctctggctgcgcctgggcgggtttcttaaaggtgaatgcccaggaggggactgtctgtgttctccctccctccgagctccagccttcctcgcctcctttcactcccagctccctggagtctctcacgtagaatgtcctctccacccccacccacccctgatgaactcctgcaggttctgcaggccacggctggcccccctcgaaagttccttaactatacaattatggtgtgtgtttctgcgacgagcgtccgtctatccggtggaaggcacgccgctcgaggcttgcgatgctcccggggtccccgcttctagcttgggcctggcgcacagcagcgcccagactgcagggggacgcttgaaagttgctggaggagccggggggaaggcagcgcccagcgaggcggctggagcgcgcgcccacaggtgggtccggtcgggcgccgcggggccgtagttttcgggtcggcgggcgaggacgccgggtccagaattccaggaaatgcgcgatccaggccggcgggcggggcgggggctccggcgagagggcgggccccgggaacggcggcgggcggggcgggaggcggggcccggcccgttaagaagagcgtggccggccgcggccaccgctggccccagggaaagccgagcggccaccgagccggcagagacccaccgagcggcggcggagggagcagcgccggggcgcacgagggcaccatggcccagacgcccgccttcgacaagcccaaagtgagcgcgcgcgggggctccggggacgggggtccggcgcctgggcggcccgaggggcttagcggggcccagcccggggcgtccaaaccctgggaacgaacgggggctcctgcaggcgagttcttccttcggcttaggccgtggcttgcttgcgggctaatcagggacaatggggcagagaaggtccagaacccggaggcctccagagtctgcttctgcccctgacttgacccctctgggtctcagtttcgctgtctgtcaagtgggcatcctagcaccgctgagcgctgtgtgggcctgggcagggacttgaggtctctgaagctcagctgtatgatcaggcccgatgtctacgccggataggcacctagtgctgtgccccgcgcctactgagtgctcagtgaatggaagcagctttgtacgccagcgttatggtggtgagcgccaaggagctcaggtttgtggatgcgccccggggaagaaccgtgagccctgccagaaaggggagggaggggagcagagcaccccccttcccccgcgcgggaagaacaggagctaggtaggccctgggtttggggccctagcagggttcactcgaggccaagccatggccactggccccaggggagaatccccttgtttctccgcccaccagctgtggcgtcttgggactgttggggtcagggagggtctggacccccttggcctgtctcagagtccgagaggaggggcccaggagtctgccaagcagggtgagtcagccagtagggtgtgagagtggttggggaaggagtcagctgcagtcagcctcaacttacccttctaagaaataggtgtgagtggcccaggaggttggctcacgcctgtaatcccagcactttgtgaggctgaggcgggaggatcatttgagtccaggagtttgagactagcctggacaacaaaactagaccccgtctctccaaaaaataaaaaaagttaggggaagtgtgtgtggtggtgcactcccgtagtcccagctactcaggaggctgaggcgggaggatcgcttgagcccaggaggttgaggctgcagtgaggtgtgatggtgccactgcacttcagcctgggagacagagcgagaccctgtctca

SEQ ID NO: 96596 - DNA, 22299 bp, Homo sapiens
tgggaccagctacaccagctgatttgaaagggtcatattcagcctgttcctggccttggggttaagacatctgagttccggccaggctctgccatttacttgctgtgtgaccttgaacaaatcacttccccgctctgggcctcacctgtaaatcaggagtgcatgatcagagtcaaggaggctttcgaagatcagatgacacaggtcaaggatctaggatagggcctggagtataactgagctcagaaaacgggatttttgtttgtggcatcagcagtagtgcctccccgcttgggatggagccaagcagacagtgctgccccttgggaatcttgctcccagcctgctgctgcccatcattgtgcccaggtgctctgattgcagaccccagaggagtgggacccctgtgtttcctcccacccatttctctgaaaggccacaataaacccaacatgaaaacagggtccacaggaggagtgctcctgcctagatggtgagatttgtcctgactggtctctctcactgcctgaaatgccaccattcttgcttcacacaaacacacctccagctcatactaagtactggcccatattcactgcatgtgctggctgacctggggaccccagggctctatgtcccttgctatcctgtaattggggtgggggcggaacaactcctgagaggtctgccctgcagtgctccctaccctattgctttctcctctagcaaaaagcacttcaaagaatgtatcaacttcatccactgctgccgccttaatggggggaactgccttgtgcactggtgagttaagcggagggggataaggtgggggaggaaggaagtggctgtgccctctgctgaacacacactccccctgtgggaaggttggacctgtgagggatcttctccagcctgtcacagtgcctgagggcccaccattcactggagagaggccaacccgggactctattccttatgagctgtgtggccatagccaagtagctgtttctctctgagactcaatgtcctcatctgtaaaatgcggaaaagaaagctgacctgatgggactgttgggagggataggtgaggtcatggaggtagctcatcaccctccagtagttctgggcctccctcctcccctccaggccttggaggtgatggtgcagggcagtggggaaccccgagctgggagacaggaattctgggtcttcccaggtgcccctcgctcagttgatgtcattcattccttaacttctcactgaaggcccatcctatccaggctcaagctggctctgctggaggcccagcaaggaggccggtttcccaagcctcatttcccaccctctccctccttcccctttccagctgtactaacctcctccccatcctccaaatctacgaggcttatgcctcatggtctttgtacacactgcccagaaggttcctgactaacccttattcatctttcaaatttcattgatatctattccttgggaaccccttccctaaccccaccccacctatagattaatacctcttcctatgtggatctcctagcccccagactcatcctcaaagctattatcaccacctggaattgattatctgatcaacgtctgtcccccccccagccatactgtaagctccaggacagcaaagaccatgcctgttttatacccgctacatccccagtgcctgaaaaagaacagatgctcaggacatatttattgactgaatgaatggtgtttcactcaggcttttgatgtgggagaacccaggggatgctctagacagagggaacagcatggcaaaggcctggaggtgggatggcaagtcctgacaggtcccttatggttggagctcaggaggcaagggtgggggagttgaagcagggtggggtgcctgggggcatggaggacattggatcttacttgaagcctgaggggttgttggggatcccagctttgcaggcatctctcgcagcaccacgattgtgacagcgtatgtgatgactgtgacggggctaggctggcgggacgtgcttgaagccatcaaggccaccaggcccatcgccaaccccaacccaggctttaggcagcagcttgaagagtttggctgggccagttcccagaaggtagggatggggtcaagggctgggttgggccaggggtgggagatccttcttcccactcgaactgatcactgattggaacatttttagcctgtgcctcagacccggatttttctagggtctcaaactcatggcctttgagctaatccacctcctaggtgtattttgttagacagccaggtgttttctttttcaatttagaatttgaatgcctttagatcagtgcgggcccttccatttgaccaggtcttccagccctccccactgcctgccctacctggctggaacctgaaggatttgagtgtttgaccccatcggggagaattgtccatgtcctactccatccctgtgtccttgatgagaccacagcagtttccctcttatacctctcgggcagatgctacgtagaaatgtcaggaactaagcctccctgggaacaaaggatgagagggggagggctctcagcaggttgagggcggtacccagaggctcatctgcagcacggcgttgggaaagagtcgggcaaggaagaaatctgtgggaatggggttgtgagcacagaggtgcaaagtgggaggagttacccagaagtgcaaagcgggaggagtgatccccgctgggcgcctgggggtcactttagcaggtctggaagctggcgtgtcaaagggggaagaggggtcagggagagggaggggcctcctagaagggaagagggactcagtgaggggatggaaaccccggagaagggaggcaaagaagacgctcaggaagggaggggctcagcgaggtgtgggacgctcggagaagggcgaaggtcgggagggtgggggcggggccggctgccttgaccccgccccgcgccggccttgaccccgcccacctcacccgcccaccccagcttcgccggcagctggaggagcgcttcggcgagagccccttccgcgacgaggaggagttgcgcgcgctgctgccgctgtgcaagcgctgccggcagggctccgcgacctcggcctcctccgccgggccgcactcagcagcctccgagggaaccgtgcagcgcctggtgccgcgcacgccccgggaagcccaccggccgctgccgctgctggcgcgcgtcaagcagactttctcttgcctcccccggtgtctgtcccgcaagggcggcaagtgaggatgcagtccagccgtggctccccacttccgactggctcccttcgggggctgtctgcgccttccacgccccccaggacgggcccagaggctgggggagccccgcggcggcctgaaccctgcctcccgcgcccgccctgctcgtccgcgtctgcagtcagcgtccccaacctgtgcgtctctgtgtccgggccggcctgctgcagccacctggtgccttagtccttgggctgggggagggggcccacccttaaaggcggcgggaggggagggagggagagtggagggtttgacgggcctggagggtattaaagagacacagaagaagctgcctgtccgagtgcctcccagtcattcaacaaaggcggggcagcaggattctgccaggagccagcaggactgccaggggccagcagcctgcagaaaaggggatgcgagggagcctgcatcccctgggggcctgaggagcccaccaccctcccgcaactgcagtctgcggagttgcctcctgggaccccacctccttctctaacatctcccctcccccaaagccacggtgtcccgcctgacaaggcccaagtccctccttctctcggaacccccttccaccttttgaacccctctcctccaccatgaggggcccctcccctccccgactcccttcccttccctgtgcacaaatagtagctaggaaggtgaggtagcgcctccctcatcctgaccttttactgcatgagttcacttaatcctcagggaggaaacagaggctcagagagatcaggcagcttgccggagcacacacagccagagcagggaaagctggacgctagcttagtcagtctgagtcccatgacggtaggtagttaggaagcagctcctctggtttgggaggttcctgacaaggaggctccacccccagctagtgggaatgacccttcctgccaagactttaaaggccagggctgcccatcaaagcggtagctggctctgaggatgagtagaagtcactgcagctgatacttccaaaactaaagttaacccaaagttgagagggatcgaaaatagctataacccaataagccactcgtatggggttcttaatatgcacaaatcactgtgctcagggctgtcggggaggcaccgattccagcactggagttggaggatggacaaaataaccttcagctgccaccccaacttcctactcctcattcattcaacaaatgtccattgagtacctactgtgtgccagccattgtgctcggccctgggtatacagcaatgagcaaaacctctgccttcatgttgctgacattctggtcgggaagacagcaaataaaaaatatgtcaggtggtgagggagtggaccgtttggttatctgggggaagcattccaggcagacagaacattaaggccatgagttagtaacctccttgccagtaacctccaaaaacagaaggagctgcttcctaactacctaccatcatgagttagggtctttcccttcacagttcatgtgaagagcaaagtggctggactcaccagagtgcagggagcccgcagtcctccaggctggttaatggtgctgccagacgccccatttaaaacaccttctacctctgatggtgtcttcccctatttaaaagcctccatggaggcggaggctgtagtgagccaagattgcgctactgcactccagcctgggtgacagagcgagaccctgtttgaaaaaagaaaaataaaaaaagcctccatggcccccatcatctataggactgatctgatattccagatcaatccttcaagatgcttcaagagccaggtggctactggaatatgggagctagaggaaaggaggagcaggaagaaagccctcccagcaggtacacatcaggaacaatgcttccagtctctggtcaatgctggctgggtgcccagctttgtgccagtgctgtgcaaaggtgcagggagtggggggcattctctctcagagcctcagttccatgaatacagcaaggagtggagcaatctgagcaacttgatctttttcatatcccacatctcctttgacaatttaatgaaagatgcaaatcccccccccccaaaaaaatgcatagacatgaaatttacattcacttttagggggtcagagacccccaccaagaatccacaaagtacaggtgtagctgtcggcaggcagtgtggggcactgcttaggctcccgggctctagggagcagagagacacattttggctcctggctccaccacccactagctctgtgaccttgttagagggctttaacctctctgagctcagtcttaacattaaaacagggcttttaccaacctcataagctgttgtgagaaccaattgagacactgcaggaaagtgtttagccaggcccagcactgatgagcagtcggtaagtgggaactcctaatatttacagaaataagtgtgacccctggactacctgcatcagaacctcacgggggaactcattacaatgtgggtttcctgggcttcctgcccagaaagtctgattctgcagatctgggatggaggtcatgagtatgcatttgaaacgagttgctgcctctcagttctggcaggagttagtttgagaatccgtgtgcctttccaatctcaacagtccaggtcctgaaaagagactgacaaatttccaggtgggctgggaagagcaggtgacagttgcagactggggcaaagctgtgtctctggatgctcatgggggccggcctcctgagacccgcagagcccaggctaccccacttgcgtgggtcttgtgtctcacagcgcctcctgccaccccataaaagaggatcaatgccctccaggctaggctgctatggggaggtgcaaaaggaaagggcctcccaagagaggggacaaaacagaaagtgagacctgcctgcccagactttcactttcatagcctcccagcatcatccaggtggcccgtagtccccaggcccacgtgggttgagccactgcaagcccaagacctggcccctgcatccctgatggccagaaggaaggaaaggtccccgayggcaggtgacccatggcagagccagaggttccctgtgcctctgggactkggggggcacagattgagagtgggtgctacgtggggttatgctgggaggatgcgggcaagaccctctttcgcatcccctggaagcatgtagccaagcagggctaccaggtgcaacaggactcagcactcttcagggcaaggggacaggggactggagacgctcagcactgggcaggctctggacacaagttgccccagcactgagactgacggatagccttgtgaccctgggccactttctggcctctagggctgagggtaatgttctctacatatgagggactctcagacactttcttaaaacaatcagccaaggctgccacgacctgcaccaccggcccctctcagagggcctcttctcccactccaccaatgcactaatgggaattctgtcagcctcccacccctaaacccatcaacctctgcagctcaggaaactttttggtgctcccaacaccagcccttctcagggacctcctgcaggaatgtccctcctttccccagtcatcattaacttcttccaaactggctcctttcttgagaaagagatggttaagctgaggatggtgggagcatgccaggtaaaggtgaagaggcgaaggtattgcaggcaaagggaactgaatgtgcaaaggtctaatggagataaagacatgaagcatttagagatgaaaagaactaaagtgggggaggagagggagtggaggcagatgaggcccaggaggggcagttcatgcatggctttgaggccatcatgaagagttggaactctttcacaagggcaatggggagctatggtaggggagggtcaaaaccagatttgtggccaggagttgtgcctcaactgtaatcctaccactttgggaggtcaaggcaggaggatcacttgagcccaggagttcgagaccagtctgggcaacatagtgagagcccgtctctataaaaagaaaaaaaaaaaaagaccagatttgcatttagaaagatccccctggaggacctcctggcattgtggagggacagttgccgtcatttcaattctgggctctcttccctgagcaataagcaaccaaccgcacatccacacactaccaccccaaacaccaaagtcacctccagcccctccttctgtggcctccccctccttccacagtgggaagcacctggagagtctccttacaccaactccctccctctcagcctcccagccccccatgaccagtccggcttctgtccctcttgataatgcctctagttgccaaatctaagcatatgtcactgtcttcatcttctttggctcctggatggtgttgggttggtctgcatcttgtaggccctccctcctccttgaaacactcccatttggcttccagaatctctgctgcctgccctgcaacccctcccaggcctttgtttctcaacctccatcctgtcccctcctctactggggctcccagcactcacttctgaacctacttcctcatgtcccactgtccccttccgtggcctcagcatggtggctgtgggtcttcctctgaaccccaagcctgctcatcaagctgcctgctggctactgtctcctggatggcccccgagcacctcaaactcaacacaccccaaacatcacactcatcagctctgccccacaaacttctgccacctgggtatctgaaccctggccactccccaccttccagcttcattctactccattaccaaggcctgctggctctccctgcagaatgtctcttcggtccctctgctgaaacccatttctgtcagctctcacaggacaactgcagtgacctccctgggcttcctgcttcccccatccctcagcaatccccgcagtccttaagagggatctttctaaatgcaaatctagcctcgaccctcccctatcagaatcattccatagctccccattgccattgtgaaggagtctcaattcctcactcactataccctcaaagccatccatgaactgcccctccctggcctcatctgtctccactccctcccctccccaactgtagctcctttcatttctaaatgtttcatgtctttatcaccgttaaacctttgcacatgcgattccctttgcctgcaatgccttctgctcttcacttttacctggtcagctcccaccatcctcagcttaaccatctcttgctcaagagagccttccctgggaggtgaggaataaaagactacaaattgggttcagtgtatactgtttgggtgatgggtgcaccaaaacctcacaaatcaccactaaagaacttactcatgtaaccaaataccacctgttccccaaaacctatggaaataaaaatttttttttaaaaaagagagagcctcccccgatgcattcatttatttaatgcatttattaagctccaactcagtgcttcttccaagtcatcactgactccaaaggtgaaggctcattgaacaactttccctgtgaattttaagtgtctggtgtgagtttgtcttctccagcagaccatgagccgcttgagggtggtgtcatcaagcactgtgcctggcacatagtaggtgctcaataagtgttgaatgggtggttgcatggcctgtcccttaagacstatgcatatacgtgaacaacagcattgttgttcagaggcaagagattctgggggctggcctccccatccttttggctgctctgacccatccctcaatccaccactgtcacacacatgtgactccttggcttcaaacccttctggtgcccaaagctcatggaataaagcttggccttcaaggacattcatgatctagcttcagcttatctcttcctccttaatttctcttgctctttcccccaccacacacagtcgaccctcattattcatagatcctgtcgttgcaaattatcctatttgctatgatttatttgtaatccccaaagcaacacttgtatcagtttcatggccattcatggatgtgcgcagaatggcaaaaaaggtaagttgccccccaaccacccaggaacattcgaagctcaggtcaaacaaggcaattctctgccttcttatttcagctctcatatgtaaacacgtgtcctttttacagtctgtttagtgccacattttttatgtttttgtgyttttttgttggtgattgaaaatggcccccaagcataaagctgaagtgtggtctagtgttcctgagtgcaagaaagctgtcatatgccttctggggaaaatacaagttagataagcttcgttcargcatgaggtttagagctgttggttgcgagttcagtgttaataaatcaacatcatattaaataaagttcctcaaacagaaacacacagaaaacaaggttatgtgttggttggttgatgaaaatggtatgaccagaagctggcagggacctagccctgtatttcccctaggagcaatggttccttagtccctaatttagtgtttatgggaactttatagaacataactaaactccctcaaataacgagagttgactgtaccctcagacacacacacccagcaagggcaacaccaggctgctcactgacccctgagtgcaccacgcccttctatacctccaggactttgctcaagctcttccctcttccaaaaatgtcactccatctctcaacttcctactgacccttcaaggcccagctcagtgcattcaacaaatacatactgggggtgtcctgtgtgccagggaccattctagtcgcttggagaccacagccatgaacaaaaccaatacacctctagtcatggtgatagcaccctctgccctgtgcccacgtcatcttcatgttattcttaatacaataagtgtcacaataaattaccactgtgtgccaggcacttatctaagcattttacatgcaccagctcatcttatacccaccccaacctcacgaggttaggtggtattgacacctacagacatttgcagacaataaaatcaagcctcaaaaagtctcactcctggcacccacaaggaactgtggcttttctgttttggtgtccatgtttccaacaagacctggagtctctgagaacaatgattgagtgcaawtcatcagttaaatccscctcagtgcatgattgagtgcaattcatcagttaaatccccctcagtgctgaacgagagaaatgtagcaatacatctcctgatggcctcctctttgaccacactggccttgcctgaattatccatctctttttcactgcaggccctttgcctttgctgttccttttactggaacacctttccccagctgttcatcaggctccatccaggttttagcacaaatgttacctcctgaaagaggccttttctgaccacactctttaaagtagcctcccaggctgggcacggtaactcacacctgtaatcccagtgctttgggaggccgaggtgggaggatcacttgagcccaagagttcgagaccaaccacctgggcaacatagtgacacccccatctctacaaaaaatattttactattagccagacatggtggggtgcgcctgtagtcccagctacttggatgaggtgggaggatcactcgaacccaggaggtcgaggttgcagtgagccctgatcaccaggctggagtgaagtggtgtgatcacggcttactgcagcctcgacctcctgggctcatgtgatcctcctgcctcactctcccaagtagctaggactacaggcatgtactaccacacctggctaatttttattttttattttttttagtagagacagggtctcactccttttacattttaagaaatgttctctgaccctaaaagattttctcctacattattgtccattaattttttatcattttttctcttacytgtggtttttaaaatcatctggagtccactttgtgtatgacaataggtagggatttcattctatggctcggcagatagcaaaccactgccatgattttatatcccatcactctatttattttttcttttatttatcacaaaccataatttggaatatagttatttctgtttaactgattacagctgtcttctcccattaggcttgagagcaggaaccatgtctatcttattcctcattcaatccccagccctagctggggtcctagtaggagctcaaataatatgtgttgtggggagggagggagggaaaggaaagggaaaaggagggagagagagggcaaggggcagggcagattctcatccctctgcacggcccagtgccctagctattcctccccaaatgcccccccaaggcccccatccccaatcctccaggcctggatggtgcacaagggcaagcatttggagggcaccaacaaagaggcccctccacctggaagaaacgattccactctgccttcarcaagagcgccaccttctgggctgcaagagtgagtgcagccagctggacgcctccaagttcttttttttcttttgagacggagtttcgctcttgtcacccaggctggagtgcaatggcgagatctcggctcactgcaacctccgccacccaggttcaagcgattctcctgcctcagcctcccaagtagctgggattacaggcgcctgccaccaagcccagctaattattttatatttttagtagagacagggtttcaccatgttggccaggggtctcaaactcctgacctcaggtgatgcacccaccttggcctcccaaagtgctgggattacaggcatgagccaccatgcccggccaacatctccaacttctacaagaccacattgtgtctgccgctgtggcccaggtaccatcctgcccctggaggtaatggccaacgatggctgtctggcaacaaggatctctttgctcatctataaagtgggtggtggactcattgagcttaaactcatgtgctggtcaatttaggacgcctagaccacacagtttatctccccactagaaaaggaggaaactggctggatgcagtggctcacaactgtaatcccagcagtttgggagtcggagacaggtggatcacctgagatcaagagtttgaggccagcttggccaacatagtgaaactccatctctactaaaaatacaaaaaattagccaggagtggtggcgggtgcctgtaatccctgctactcaagaggctgaggcgggagaatcacttgaacccaggaggtggaggttgcagtgagccgagatcgcaccattgcactccagcctgggcaacaagagcaaaactccatctcaaaaaaaaaaaaaaagaaagaaagaaaaggaggaaactgaggccaagaaacaggtggaccttgcctgaggccatacaatgagctggggtactcatctgggatcgtctaaattgagggggttcctcctggggcccagggaatagcaggctgtctcttgcttgatgcagttaccagggcctgggcgccccctgaagaggtaggcatgccctttagtccgaaggaagctcctgggaagtggctgagcctgcctgcaggtcagacctgctgagtgtgttcttccagcccctgcagccttgccagctcagtcacctctcagcaagtcacccactggccccaccctctctggctatgacctccagcaccatcatttacctcatccctccagagcaccagctccagccctgtccccatgctcccacccgctccacctttttctacctctcctgcagccctccctccatctgcagcaccaccaggccattcccttcacctccaccatcttcagtttcattgccctgtctgcagccaccccatcttctccacattcattcctttgtcctccttgggtccatcactccacccccatgcaccccatcgggtccagctccatcacctccggctccctcactgttcccatcagctctgtctccctcattctgtctgtatcacccctattatctccaccccatcacctttccgccatcgtcgacagctcattgctctgtgctcatcacccccacccccgcatcagcatctggctctgtcccgcatacctttcatctccagctccctcacctccgcatttacccccagcacttctctccctatcacagtgacccatctctggccctaatacctacaacatcttcatcaactttctctttacctccatgggggcgggggagtttgagctctgaaacttcaaagttcttttctcaaaagcccagtgccataatattgacttctaatacattggacagccagcccttttactcagaaacactgtcaaccccagctggccttcagtccgcccagacctctctgcactggtgggaacagtctgggaattcctgaggagtcacaggcctcctctcccaccctcacagcctcttctcccaatgctcaggatggctccggatttgccacagaggatgaggacaaggagtggccccacaggctggcccagcagggttccttactaccacccatcctcctccaggccctttggttgaccacagtaaggactgggtctcctcacccagccctgcctcctccctggcctcctccttatctatgggtctggggtcagggtgagatggtgcctgactgcttcctctccttcaccagggtgccagacataggacctcaaaaacctctggtgcccaatgccctccgatgacttcagcaacctggtaaggaatcgaaatcccctcccctccgaccagtgtgctgaactggggacggccgcggggtggggccagcccacctctctctcccacccaaagcacccagcccaggctcccaataatagccacaacagtcaacatttcctgagggcttagtttatgccaggcacccttccaagctccccacagcccccagatgctgctattattcccattttacatatgcccaaaccaggacacagaggttaagaaccttgcctgaggtcacacagctggtaaccctgggaaagctcctaagtggcagtgatagactagaatccgagggcctggctgcagagcccacaaccctaaccactgagcaggattgctggtttctcatgagacgctgctaggttgttgttattgtcgctgttatggttatttctacctgcatcaaaatctttgctgggaggaagctcctagaatcccagaagatttgctgggagggtcatgccctcactgtacagatggccccagcttttaaccgcagagctcgactatcagttcgtttatactggaagctattgtttactactattattactagaattcttatcatcactgatagggagagagcacccaaaatttccgaggtagaggctgggacgacctctgggtccggcagagtttgaaggggagggtaagaaggcgagggragctagcgccgcccacgtccagcccgtgcaccctctctcgccccacagcctgctggctgcacgtgtggctcttctctccgcagcgctggtgcgcgaagccaccgggcgcacagcccagcgctgtcgtctgagtccgcgggcggccgccgagcgcctgctggggccgccacctcacgttgcagcaggttcgcttccccgacccaytgcccagcgcccacgtgttgcagggcctgccgcctcacctggagcgcggtgtgcagctctgggtggctccggagggcgtgttcaccaagcgcctgtgccagggcctgtactggcgcagcccaacaaggtggagcgcaggcgcacctgccacctgctgaacacacgcggcttcctccaggcggtaggacggctggaggagtggaacagagtggcgtgggaacgggggcataaggacgcggtgggcaaaggaacatgaacagaggagagtgggcacattaaatgcaggcccagggggatgggcctaagggtgctgggcatgaagtggacattgacacaaagaatatggcacaaaagcaccagggatgggaaagaatacaggcaccaggagggctgggggcacatatacggatacaggcgtatatggggtgctggcatggagaaggcttgaggcgttgggtgtgcagcataagaatagggcttcggtacatgtgttggcttagggcataaggtggatgtgaggtgcaccaagcacgagataggtataggtgagtggcagtgggcatgggttgggcataaaggcatggggtgggcataggggccaaggaagagacataagacctggaagtgggcacagatgtgggacatgggacaggcataggaacgtggaagtgggcctagggtacaggcacacaatgggatgtgggcttacaggacttgggcatgggaaatgagcrcaagatgggcaccagtgggttgcctagttcttgcccagtccctatagtctcagtgtcgtataattgtgtgcccacctgcaggatggtcaccggacccaaagtaccagatctgtctgtgcttyggtgaggaggacccgggccccacasagcaccccaaggagcagctcatcatggcggacgtgagtcactccttccactccagccaagaagcacgccctccagtcccctccagacagcccttcccacactccctccagtcccagctctgcctctgacacttctagcaccctcgggtctgtaggaccctacctggaaaatgggggtagggatggggctgtaactagggctgtgacttcccatgggaacatccgaggcgggaaatggagagggtctgctcatcgccccacccgcccccgcaggtgcaggtgcagcttcggcctgggagctcgtcctgcactctaagtgcctcaaccgagcgcccagatgggtcctcaacccctggcaaccccgatggcatcactcaccttcaatgcagctgcctccatcctaagcgagccgcttcctcttcttgtacccgctgaaggcagcccccaacaggggggctccctactcccacccaaccctgcccacactaagcccatagacttggggcctcccccggcacatcacccaggtctgccggacggcagaggtggatcgcggccttccactcctctgtcacggggccccggaactcgagagtaggccacaccgccccccagctgggcatggggcttcggcaggaaactgaacttgatcttgaggccccagaaaggcagcaactggagcagaagcaagacttcatctcttgctgacagcccaatttgtcaatagcgctttcctcagagccagccttaacctgctgttgagtccattaaaacgtttgcttaaagtttttaccaataattagatcatcagggttgtttagtgtgggatcaagccataacaaaactgcctagcctctcaggggcctagaatttacagaaccttcctcctccctgcagctagtctctcttctttattctgggggctgggaaggatcccaaaacagggaacttggccgaaccctgggctttggatgctaaccactgaagtaccagcacctgtaggatgctgtctttgaagaaactgaggcggacctccaaatgcagccctaaggcagaggtcaacgtggaagaccagcccttctccaagccccactggtctttgcaagctgtacgttgtaggcaatctgagaactggaaagggggactacaaccagaaagttggttaccctgccatgggaataaagtagctgttttccaccccacatatcaggccttttattcttttctgagttctgattttatttataggaatcctcttacagatgccaatattgtaagtctcttttaatgatacattaataagccaccttcatggggggaaaactgtgattcgataaaggacagaaatcaatcaattgctgtttgtttagtcatttagcagacatttcttgaacacctactctgttccaggcctctgttccagtgtccagtgtgtgactctgggggtacagcaaaacagcatgctctttactctcttggagttcacattctgttttctagtggggacccagcgactctccgctacccctgcccctcactgaagaggcagtatttaggaattacagaatcctaggctcatatccagctttgtcactcactagatgtgggacatcagggaatttacttaccttctctgagcctcagagccctcatctattcaaaagaagcaatgaagccctccagagcagggttggttgaagaagtaagtgtagggttggggaggtgagctggcctggtacagagtgggtgagcagtgacttgggagtgggagagcagagaggatgccgtcccctcctccagaaggcctgactgttctgggcctgactctctggacctcccgaccccaggctgcagctggggtagcctcagttcagagtgacaatccgcagccatgttcatatccctactccatactaggctcttgatgagggtgctgcattctgtgtaaggggaacctgttgcctccccaccatggcctggacagctgaggagtcaccagctccatgttagagatggggaaactgaggctcagccaaggtcttgaggtgcctcttgggagggagaatgtctctccccagatagctgtccttcccacaccagtcactagggggcgacagggatgcagcagaactgaatttcatgggctctccttaccatcctaggtgcccctccctgcagacaccccagagctaggaggatggggtaggagtggtgtggccccaaggcctctgcaccgcaggagaaggcagtagaccacaggcctgggagaagagggaaaagcaggagtagaggtagggattagagaagcccctggggcttctctcactctagggggactgggctcaggccctgcctctctctcctctctctctctctctctctctctctctctctctattcattcctttcactccttgtgtttgcacctgtgtctctcagtatctcctttctctctggctttgtggatttccttgtttctgcctgctcagtgattctcactttctccgtatactacgtgtgtgtgtgtgtgtgtgtgtgtgtgtgtctgtgtctgtgtctctgtgtttctgtgtgtgtatgtctctgtgtgtctgtgtatgtgcttgtgtgtgtgtctgtgtgtatgcctatgtgtctgtgtgtgtctgtctctgtgtatatgtgtgtgtgtgcttatgtctgtgtgtgtgtgtctgtgtgtgtgtctgtgtctgtgtgtctctgtgtgtctgtacgtgtatgtctgtgtgtctctgtgtgtctgtacgtgtatgtctgtgtgtctctctgtgagtgtctgagaggctctgggtgtctctgtccgttgtgtctgcctctgtcttatctttgtctctccctctttctccctcttgtgatgtctctacctctctctgtctctatctcttttttccctgtctctgtttcatatgtttctgcctctgtctcattttgtttttgtctctgtcccgctcagtttcacatcctgtccctccccagccaccaccacccagcacacgtgggctgagggtctcagtcccttccttcccaactcctcatccctggcagctgctcggcttcccactactggcctctcctgcccgcctcttttgggccttgtgggagtggggcgagggaggaggggaggatggctcagcagacccacccctttttgcctttccaggctgggaggctgggccagtggaccttttaaccagcctgggcaggctattccggacgccagccctggaagctgagcctgacccagcaggtcccagcagcctggcagcccggccagcatgcagcagcagcctctgcccgggcctggcgcccccacaactgagccaaccaagcctccctacagctacatcgcccttattgctatggccatccagagctcaccggggcagcgggccaccctcagtggcatctaccgctacatcatgggccgattcgccttctaccgccacaaccggcccggctggcagaacagcatccgccacaacctgtcactcaacgagtgctttgtcaaggtgccccgcgatgaccgcaagccaggcaagggcagctactggacgctggaccctgactgccacgacatgtttgagcacggcagcttcctacgccgccgccgccgcttcacccggcagacaggtgctgagggcacccggggccccgccaaggcacgccgtggacccctcagggcgaccagccaggacccaggagtccccaacgccacgaccggcaggcagtgctcattcccaccagagctgccagatcccaagggcctaagctttgggggtctggtgggggccatgccagccagtatgtgcccagcaaccactgatggcaggcctcggccacccatggagcccaaagagatttccacgcccaagcctgcatgcccaggggagctccccgtggccacctcatcttcctcatgcccagcgtttggctttcctgccggcttctcagaggctgagagttttaataaggcccctacgcccgtcttgtccccggaatcaggcatcgggagcagctaccagtgtcggctgcaggcactgaatttttgcatgggggctgacccaggccttgagcacctcttggcctcagcagccccctcccctgcaccacccacccctccaggctcactccgggccccactgcccctgccaactgaccacaaggaaccctgggttgcaggtggcttccctgtccagggaggctccggctacccattggggctgaccccctgcctataccggacgccaggaatgttcttctttgagtaaaggcagcctcacctcgggcagtccctgcaggtccctcaccctccgggctgagcctggctctaggacctgaagaactctcgaaggacccagccctggtgagccaaggacaaccacacagaaagccaggattgaagcggtgctcagccaggcccctggggcctccggacaaacttgggggtgaggggaagcagggcctcttgggatttactctgtggctctcagggccaataaagccatgtgatgatgagggtcagcttgcctgatggctgggggctgagggccagggtgcctgcttgtatgtgggggtggctgtggctgtggggttgtgcagcgggggcagagacccttggtgggaatatctcacatgaggttttctcctgctggggactttctcagggagtttcctagaaagggagaggaaggggaggtagggaatggggagcagggagaggaggatacaggcaagggagagactgggcaggggcaagactgggctggcctgagggactgattctccagtctcagatgctgggacttagcccccgtaggtgcagtcatcataaccctgacaatttgtgacactgatcctgtcccgggcttgtatgtatcatctcacctgtgtgatttggaaagttggccccgtttacagtggtggaaacaggctcgccagctccaactccagagggcaaatgggtggcagagggtaaatcaaaaccacatctgtgtggctctaccctccagcctctgacctgcagcttgagtgaggacataagggtggagaagagggtcagggcagagctggtggtggcccccagaggtgggagggctttgctgcaatcctggaaggccagggctagaaaggcaccctttacccattgtgcagacagggcacctagggttcaaaaggcagcacctaccccctgtttggacttcccacattaatgtgggagcttccctgagcccccagctccatgaggtcctctggtgactctttaagacggcatttcttggggccagcagcatgggctgtgactgtcctaggtaccattcagaagtgactgagccctgacctttgaccttctctgactatcccttcgcgaggaagcaggagaaatggggatattcttggtcctcgttagaggaacagagaaggaatctgaaacatcgctgtcctcacagaccccagcactggaggagcagaggcgaatggcttcctccccagagcctcagtcctcctatctggatcatgggcatagggagaggagggagggatgctggggcacccccattctggtttttggcatgtggtctagagtgtcttatgtcccacgaggttacactcagggggctggagaccccttcttgggcaggcagccctctcccctccagaggccctcccttgcccaggcagccccgaggactccagcctttgctgctccctcctcccccgacaggtcccctggggcctgggaggaagcgagcccggctggacagcccgaactgtctggttcccacagtctcagagctggggtggaggaggacctgcagggtgagaggggctgggaaaacgcctggccagctgtggggcccctccccaccatgcctgctgaaccccagcctggaacccatcaaacaatggggaggaggagcaagggtctgtgcagcctcctatgggcagcttcatggggcagagggaagaggaaaggccctctgtgtgcagggcatggtgaggagggggaaggaggctcttgtgtgagtctgtaccatggcgtgtgcctgtgtggatcagtgtgtctcaggctgcgtgtgtgtatatgacagagaaagagagagatgcagaaagacagaccctgcagaggcagacagacagattcaaaggggtgagagttctttctcagttgggtcagggaaggaggcctctgctgggcgctgttcccgttgcacattcctgtggagccctggtgaccccagtcccttcccagcctgggttctgagctactaggaggatgggaagccggctgggctgggggagcccaggcctctgccgctgtactccccagcatccccctgaatcaaggaagtttagctctgcactagggtggggacttgtggagaaggaggctgagtctcctgctcatcccttg

SEQ ID NO: 96597 - DNA, 13096 bp, Homo sapiens
gaatccagccaggcttgaaactggtggacttctagacttcataatacaagctaagccaatatattcctttttcagttttaatctatttgagtttctgtaacctccagctcaaaaagccctgacaatacaaacttcgtatgcccagccaagaagtttgtcctatagacaatgagaaacaaagattttgaagtaggataatgataacatcagattcattttctggaagataattgcaatgaaaatatggatggactgaacttcaacctgtttatttcacagatgaataaacgaggctcagaagggataagtggcacacccaccataacagagtagacttcaaaacatacttaagaaaaaagaaatgtggtgtttactgagcaccttctctgtataaaggacagtgccaaatgtggcacaggagataaacaacgaatccacagtctgatcacagggataagcacctcaaatgcaaggcagggccaagtccagtcagtgacataaaagacgtactactgagttgggcacagtggctcacgcttgtgatcctaacactttgggaggccgaggcgggtggatcacgaggtcaggagatggagaccattctggctaacacagtgaaacccatctctactaaaaatacaaaaaattagccaggcgctttggcacatgcctatagtcccagctactcgggaggctgaggcaggagaatcgcttgaacccaggaggcggaagttgcagtgagccgggattgcgccactgcactcaagcctgggcaacagagtaagactctgcctcagaaaaaaaaaaaaaaaaaaaaagacgtactactgggttcaagcagaaagagattcagctgggcatggtggctcatgcctgtaatcccagcactttgggaggctgaggtgggcagatcacttgaggtcaggagttcgagaccagcctggccaacatggtgaaaccccgtctctactaaaataaaaaagttaactgggtgtggtggtatgtgcctataatcccagctacttgggagtctgaggaagaagaatcacttgaacccaggaggcagaggttacagtgagccaagtttgcaccactgcactctagcctaggcgacagagcaagactctatatcaaaaataaaataaataaaaaagaaaaagactgcatccaactgaagatcaagacaggctccagaaaggaggaatctgagaaaagccttccaaaataggacggtttcaacagtggagataagagggaagagcagtcaacaggataaacaaagtcacagaagtagtgaaagaaacagaaacaataattccatatttcagttttggctccagcccagattatgactacaggaaaagcagagattaggccaattatgtgtgagagaagatcttacatattaaggataatctgcatttaattcaataggcagtgaatttccttgaaagacttctgtacaaaacccacgaggtggtcagagctatactttgggcagattaacctagcaacactatgtcggcaatggaagcagcagaggatgctggttcctcaagatcattcttttcaacctttatttaacctaccgctgaccatctgctcctccttgaagccttcttgtgcttctgccatataacaccatcctcacctggcccccaagttctatcctctcccctctttttttttttttttgagacggagtttcgctcttgttgcccaggctggagtgcaatggcgccatcttggctcaccataacctccgcctcccaggttcaagcgattctcctgcctcagcctcccaagtagctgggattacgagcatgtgccaccatgcctgactacttttgtatttttactagagacagggtttctccatgttggtcaggctggtctcgaaatcccgacctcaggtgatccacccacctcggcctcccaaagtgctgggattacaggcgtgagccactgcgcctagcctccctcttgtctttttatcacttctctttctcccaaggtctcatccttgcagttccattttttactctatgcagatgctcccaaatctctctcttgctaccaactctctttccatagctccagatgtacacttcacttgatactctcctggcaatcttaactcaaatgcttaaaacagaacctgctatcaccttctacaacattctctttttcctgtttaatgtatttttctatattctactctctcagactctaggccttactcatctctgattcttcaccccctcccttctccttcacatccagacagtcaccatgtgttatagtttctgctgcttgagtgtgatgccctcattctacaccccttgccacttccttcatccaggctatcatttatgccaagactaataccacagactcctagaagacttctctcacactccaagtcatccccatatctgctggtggaggaagcactcaaaaaacctggctgcgaccgagtttctctggtattccaaagcacctcacacaaggagaacagtcccaactcccaagggtggcatccaaagtgctcctacaatttggctcccacttgcctttccaaactgatcccacactactcctgattttctcatcatttcctgctcagagtccattttttgctgtacctttcttcacaatcaccaccttttccccatttccacaagattaaggcaatctaggtccatgccaaatgccatcatttccttgaagcctttcctgatttttctattgaatacattgtttgtatctcttttatagcacatataaaattctactttatgtattgcacaaatgtctataacttcatagactgtaagctacttgaaagtggtaaagtatagtaggcaatggttgggctttagagtcaggctggattaaaatcctgtcttactatatacgatctatgggcaaattactaaacttctttaagcctcagtttcctgatccgtaaaatgggaataatagcatttacacattattagtattatgaggattaaatgaggtaaataatgtatgttaagtgctacctggcatatcatgtattaaatagtaactactatttttaccatcatcattgttgttaaggggaaaatagctttttcatctctgtatcttctacacagtctcaatcacagaaatcttaataacagtttattgaatgaccaactttggaccacaaaattccattctttaaatatccctgagatttccctaaactgaaacagtctccttttctctcattttacccagtatcctcccctccgccccctaccaaacttacctggtgcaaaatggtatatcgctcacgaaacatctctgctttatctcttggtgttccaaataaatttggtgcagggtggttggtcattaacagactagaaaaagagaatgcctatttttgactatcataatacacaaaggtgagccaaaagtgaagcaagagactataccttctgaaaaaaaaagtacatttgaaattaatttaaaatcagtggatgacatacttacggaagaaatttttttctttctgaattgtacacaaagcgtggaatatcaaatgctcctatgatattgaaaacgtgctctctgaaaaacatcccacaaaatacagacctgatttactaaaacataagtactctaggtgaacatgataacttgcattataagtatttgtaataacacacttttcacattttctcaggccaggcacacaatttctttttctttttctttttcttttttaagacagagtttcgctattgttctccaggctagagtgcaatggtgggatatcagctcactgcaagctccgcctcctgggttcaagcgattctcctgcctcagcctcccaagtagctgggatcacaggcatgcaccaccacgtccagttaattttgtatttttagtagagatggggtttctccgtgttggtcaggctgatctcaaactcccgacctcaggaaatccactcacctcggcctcccaaagtactgggattacagatgtgagccaccatgcccagcccataatttcttatagtgtcaaaaatacaatgggtgtaaaatgtttagcttgtgcattttcatctcaagggacaagaaagcattgccaaaactctcaagaaaaaaattaatcaagttaatttccagttaagaatttcatctgttgaaaaagaagaattatataaacaatagtcacatcttaaagaaatctctccctatatgtactactcttatgagctacagtatttttttttttttgagacagagtttcactcttgttgcccaggctggagtgcaatggctcgatcgtggctcaccacaacctccgcctccagggttcaagagattctcctgcctcagcctcccgagtaggtgggattacaggcatgcaccaccacgcccagctaattttgtatttttaacaaagacggggtttctttatgttggtcaggctggtcactaactcccaacctcaggtgatccacccacctcagcctcccaaagtgcagggattacaggcatgagccactgcgcccggccatgagctacagtattattaaaggatatgattaagttccaacaattttttattttttttgtttttgttttgttttttgagacagtctcactctgatgcccaggctggggtgtgatcttggctcactgcaacctcttcctcccggcctcaagcgattctcccgcctctcaagtagctgggattacaggcatgtgccaccacacccagctaatttttgtatttttagtagagacagggttttgccatattggccaagctggtctcaaactcctgacctcaagtgatccgcctgcctcagcctcccaaactgctgggattacaggcatgagccaccatgcccaaccccaacaattttaaaaatctaaaatgttttttgtttgttgtttgtctgagatggagtctagttctgtcgcccaggctggagtgcagtggcacgatctcagctcactgcaacctctgcctcctgggttcaagtgattctcctgcctcagcctcccaagtagctgggattacaggcaccctccaccacgcccagctaatttttgtatttttagtagagacgggttttcactgtgttggccaggctggtctcaaactcctgacctcatgagctgcctgccttggcctcccaaagtgctgggattacaggcctgagccaccgcgccctgccaaatctaaaatgttatgcagaagtgtcccaggaaaagttacacaatggaaaaagagctccccctccaattctggccatatctttcagacttatacaatatatatatagtgttagagatggaaaaccaaaaaaaattatttaatttcagatacttttaataatataaccatgtttaaaagaagttaaaaatttccacagcactactgtataaatatcccaacctaaaaatctttcctaaaattacatgtttatctcccaaattgaaaatgatcaaaaaagattcatgctaccctagaggtaacaagtatagagtggctgagaatcactgaacttgaggaaaacctagactccagacactgctccactattttctggtagatcagtctgagtaagttattgaacttctcatgccatctcttcatctatgagaacaagagcctctactgtggtatgatataatgactctctgacaattgaaggtacaaaaatcctttaccattcagtccccactggacctccatgtaggctggctataacatataaacagcctgacagaaatagccgagccaggtcagtgaggagtacgggctggccgacccaggcactgcgcactgaggccagggatgggcctgagccatgcacctcctctgaaactaccctgtgccctgcctttgaggcctgacaggtgtgggagcaggagctgcccaaaagtgggctggggttggaggaagcatcctggtcgttgctatgtgccctgaggctttaaggcacctgaccccacccttgctgaactggcatcaccaggacctgtttactctagatgagaatcatgatccctgggcgcttagtgcattgcctggaagagcccactcatcctggacgagccctttggcagcctcagacagtccttgaggaggatgactgagacatcatgggccatgcactgtgtgcctgctcttagggaaatgtcatcattgacaatagctatttcttcatccagaacctgggggagagtgggttcagccatgtggacctagtggaggggttacaggatggacacttctacgccctgaagcgaatcctgtgtcacgagcagcaggactgggaggaggcccagccaagaagcaaacatgcatcacctcttcaatcaccccaacatcctttacctcacggcttactgtctgagggagtagggtgctaagcatgaggcccagctgctgcttccgttctttaagagagatatactgtggaatggagagaaaggccgaaggacgatggcaactycctgacttaggatcaaatccttcagctcctgctgggtatctacagcggcttgaggccattcatgccaagggttaggcccacagggacctgaagcccaccactatcttgcttggagacgaggggcagccagttttaatacacttggatgccatgaatcaagcatgcctcacatgaagggctcccaccaggccctgaccctgccggactaggcgacccagcagtgcaccatctcctactgagccctagagctcttccctgagcagtcactgtgtcattgatgaacagactgatgtctggtccctgggctgtgtgatatatgccacaatgtttggggaaggcccttacgaaatggtgttcaagaaacgtgacagtgtggcccttgctgtgcagaaccaactcagcatcccacaaagccccacgcattcttcaggagtgtggcagctcctggcctcaatgatgactgtggacctgcagcagcaccctcacaatgcttgcctcctcagtcagctggaggtactgcagcccccagctcctggccagcacactgcccaaatctgaacaaagcagtggccatattgagaaggtggcgccttgtgccttggaaagaggctcccatcactcactggaatctctacccattctttctttattttattttatttattttatttttttttttttgagagacaagtctcattctgttgtccaggctggagcagagtggcacgatcttggctcactgcaacctccgcctcccgggttcaagcgattctcctgcctcagcttcccaaatagctgggactacaggcatgcaccaccatgcccagctaatttttgtattttttagtagagacggggttttgctgtatgttggccaggctggtctcgaactcctgacctcaggtgatctgcccacctcggcctcccaaagtgctgggattacgggcatgagccactgcgcccagcctgcttttctgctttcttacccccaagagcaacacctggacaaggggctttactgagtgggggtggaataggggttgggaaaaggaaaactgatgcgatatggtacatggctctgtgcaggactgttgagctcatattacgttctgcctccaaatctgggagcaagagaatgtataaacagaagaataaagtgaatgcagattggtgtgggggaaaataagtaaataaataaataacaggtaactttagggtaaacaacgagtaacgtctattttaggataataatcaaacttcagtacaatcattttgaatttctattgatggctttaggaacattcattatactccagtatttattttatgtattttttttgagacagagtctcactctgtcgcccagactagagtgcagtggtatgatctcagctcactgtaaccaccacctcgcaggctcaagcaattctcctgtctcagcctcccaagtagctgggattacaggtgcgccccactaccgcccagctaatttttgtatttttagtagagatgggtttcaccatgttggccaggctggtcttgaactcctgacctcaagtgatccagccaccttggcctcccaaagtgctgggattacaggcataagccactgcatctggtcacactatagtattttaaatgagtttgcaagggtaaaattaaaaatcctcaatttctctattttttttttagcagttataagttctgacagggagaagattataacttctgactaaaataaagataatgactcctttcaatcatctccattgccccaaataggaaagaagtggcaatgttaaaactgtctctcagcccattttccccagtgttttccttccagttaaatgccatcaatttgtatagaagtatcatatcaagaggaaagagggatattcagagaaataaaacccagaagaattactgccatataaattcttaaacctaaaaacatgacatagtggagtcacaaaactgaggtcctaccctcatttgccattcaccatgtgaccaagtaaagttgctgaacttctctggacatggtactttcctaagagcaaagtaaattatacttctgaatattcatttcaattcaactcatttgtagcatacagaataaaaagtcagatcaaccggttgggtaggcagcaaaagttagtaatgaatggtacaagcaacactgtaacctcaaatcccaggaaaaaccagtaaagatgagtcatttaataatgaggtttgcaaagaaagccattatttaaaaagacacacagaaataacaacagtaatcactgtagaaacgttgatcactaataattttccaagacaataattaaaaataagtgctcaataacacctccaaggaggaaaaaagttaactgtacccacatacatagtttcatcaacagactgactgcattcctggactgctgcttccaccacagatcgttcaatcatgtttgatgacactgaaaagagaatttcaaagtcaaaatttaaaaacaaaaaaaaaaatagttctttccacagacagctcttttcccaaaaataatttgcaaatattaatactgagattctcattatacagtttttggagaaaaaaagtgttaggtcagaacaataacaaaagccttatctcaaataccttcattttccacactcaaagttacaataccttaatatacagtcaaatgccttaattttctaaaccctgtttagttataagaacatttctgagctagggtcggtggctcacacctataatcctaacactttgggaggccaaggcaggaggatggctcgagcccaggagtttgagaccagcccagacaacgtggtgaaaccccttctctacaaaaaatataaaacttagctgggggtggtggcacatgcctgtagtcccagatactcaggaggccaagatgggaggatcacctgagcccagggaggtggaggctgcagtgagctgtgatcatgccactggcactccagcctgggccacacagagtgagatactatctcaaaaaaaaaaaaaattctctaagctcccagttttaataaggttacattagtataactttatcatcataactgctcagtttcaatgagcatgatagtaacaatagcagctaccacttattaagcattgagtaaatgtgtggcaccatcctcagtactttatttacaagtattattccactgggtagatgtcctgtaagactgatgttaagatgcccatatcttatagatagggaaaatacaactttaagaggttgaaaattttgcccaaaaactagaagagatagagagcaacaaaaacccaggactgattccagtgggggctcttttaatcactttgatatgttgtcaagcaaaataccatgtgccatcttaaatcaatgtacacagggacaagtatcattttcttttttttttttttgagacggagtctcgctctgtcagctaattttttgtatttttagtagagacggggtttcactgtgttagccaggatggtctcgatctcctgacctcgtgatccgcccgcctcagcctcccaaaatgctgcgattacaggcgtgagacaagtatcagtttctaaatgttcaactgtaaaggaattttttaagcaaaggtatatgtaaaattctgcctttaggaatgaaaatgagatataataaccatttatcctgtatcacggagtatgtttcttcctatataattgaagtgactagcatctatataacattaagagtgaactcggcacttctcagccttttatgctaagataaagtggacagtgagccatacccacttctatcctcagggtgctataaatatcagactttttttccaaggggaagagcatttcttctttccagtcccatgcttgtggtattaagtatttaacaaaaaggtccctgaatccctatggcagtgtggcagtggcaagaggaaacatgctgatacagttttactgacaggttgaatagagaggtgtctcagaaaactccccgaagtatatggctgaaatggactgcaaatcataaaaaactggaacagaggtttagttcatgtattggtggccccattctagcttctttgggcatgtttcaacagatgtgactttccaaaaaagaacatgaagaaagagaggaggggccaggtgtggtggctcacgcccgtaatcccagcactttgggaggccaaggtgggtggattacctgaggtcaggagttcaacaccagcctgaccaatatggtgaaaccctgtctctaccaaaaatataaaaattagcctggtgtggtggcacgcacctgtagtcccagctactcaggaggctgggacagaagaatcgcttgaacccgggaggcagaggctgcagtgaaccaagatggcgccattgcagtgaaccgagatggcgccattgcagtgaaccgagatggcgccattgcactccagcctaggcaacagagtgagactctgtcccgctctcaccaaaaaaaaaaaaaaaaaagggagaggagggaagcagtgtgtagaaagcaaatgccttgaaggagttcccaaacctctaccttcctgggtcaccttatgtttcataactttggtatactcaagaaaaaaatgaccatcttttatagaatgtgcttttcttgaaatccacttattcttttttttttttttttttgagacggaatctcactctgtcacccagtctggagtgcagtggcataatctcagctcactgcaacctctgcctcccgggttcaagcgattctcctgcctcagcctcccaaggagctgggattacaggcgcctgccaccatgcctggctaatttttgtatatttagtagagacagggtttgccatgttgtccaggctgaccttgaactcctgaactcaggcgttcccaccagcctcggcctcccaaagtgctgggattacaggtgttagccaccatgcctggccccacttattcttatcacaagcgttatataattttgtatcaatgtctattttcaccaggtacaatggctcacgcctgtaatcccagcactttgggaggccgaggtgggcgatcacctgaagttggcggttcgagaccagcctggccaacatggtgaaacctcgtctccactaaaaatacaaaaattagccaggcatggtggcgcacacctgtaatcccagctactcgggaggctgaggcaggagaatcatttgaacccaggaggcagaggatgcagtgagccgaaatagcaccactgcattccagcctgggcgacagtgcaagactccttctcagggaaaaaaaaaaaaaaaaaaaaaaaaaagtctattttctacagtttgctttcagtaaaatgccttccaactctgtttagtgtattcattatcagtgcattagtagaattgctttttattgaaaagttactgtctctgccctttaacttagacttacaaaattaagttaaaatgactagccattctattaaaaaaaaaaaatccctgaagaaatcaagaagagatgtcagctctgtttactttactcttctttttttcctcccaaacatttaggagttaatgacttaaataagacatggtaatagccactaggagagacaaagtgaccataaaggaccagatcaaaatcagaagccaagtgcaggaaacatggtggtgacacctccactgggggaaaggaactataaaagggcccttggggatcatcctgaggttccaactaaactaagggtttggatgtcatcaacagttaaaataaaaaaggccgggtgtggtggctcccgcctgtaatcctagcactttgggaggccgaggcaggtggactgcgtgagcccaggagtttgagaccaggctgagcaacacagtgaaaccccatctctactaaaatacaaaaaattagcctgacatggaggtgtgtgcctgtaatcccacctactcgtgaggctgagacaagaaaattgcttgaacccgggaggtgggggttgcagtgagccaagatagcgccattgcactccagcctgggcaacagagcgagactccatcccaaaaaagaaagaaaaaaaaattaaaataaactaaaggtattaccccttgggaagaaatgctaccatgcatacatcttataacactgggacatcttaatagtgaagcctcaacttcaatttaaatctatacatctaactgaagatgcagaactatattaacaatttaggagttatcagaaaatattacttacagggttgcttctcaactgcattaattatcttttccagtttatcttcaagctctaattcactgatagactgaagagcttctgtgaggtacttaatagcttcactaagaaaaggaaaggaaaaatgaggcaggtcattagtaattaaaggctaaaagttttctgccaaaaagcagcaaatactcatcaatctggcactgaaaggaagaaccactaactgctctcttcaagtagcactttatctttcctgtgctttctgaacaaaatcatcctcctatgccttgctaacataaagcctcaaatcacatccttcctctaagaaggcttc

SEQ ID NO: 96598 - DNA, 15022 bp, Homo sapiens
tttgatccctcaggagaaatacgcttcatttcaaccacctggtacacacacatacacatgctcacacatacactcccacatacacatatgcacacacactcactcacacgtgataggtataactgaagccaaagttgcagaaactccagctaccctaggtgaaatgtacgctgctattcttactgtgtttattttatttcattcttccaattattgacttgattattgacttgattccaattattgacagattattgacttgatctgataaattgatttcatgccccgctgctgggccctgatttatagtttgaaagctcctgctctgagggagggtttgcattttctgctctgtgttcttctgtttttaaaatttaatatggaggatggattcaactattgtctttgtaatttttcacttaaaaataaagggagagagagggagcaatgggaaaatacaaaacaataaaagtcaaacaggcttcctgaaggcagctcagcaaaatgcggcaaaacagatctctttaaaggtgtacatacttctcgtcggagctgcttcactttaagacacgttactagctggggtaaccgggtacagagctgcgctcataggctgctgaccccgactttgtttgtaataatgaaacatccctaacatctgggatgcccacacatggacccctgctggtcatccaattgagtgcgatgcgcggctattcaagacttatttatggacacggaaagaagggtgcaggaaagaaggggcgccctgggattaagaagttactggcaggctacaaaagtataacaccaccctgcccttgttttcaaaatatgtatttgcaagtgtgagggagagggacacagagagacaagtgtggagtgagggggctccacacgcaggaagagttgggttggttttagttccttctcggagttctgttgtatcggcaatgagcttgcattgctttcataggggacattttcaaggaaaagagagaaagaagaaaggaaaggaagaaacagaaaaagaaggaggggaaagtaagagagaaagaaaaggaaagatgaaggggaagcagggaggaagggaaggaagaagagagaaataaaaaaagtgggggtggtgggacttccctggagctgcgaccagagcgagtgcggcccgtgcggggagtggctggcgctgcaggtcccggcgctgcggcgcgaaagcgctttttggagtttcgatctgggaagctccaggaagcccagggggcgcaggctttccgggtaggagaggtcgcttggcgcgtccaaggggacccccaagccaccggtagggacgcggagcggctggagcggtctctgctgggccgggaggctgacgctgtcccaggccaccctccgcgccaccaagctccagtcccggccagccgcgcgtgcggggaggtcagggaggactctcccaggcgccgggccgcgtccctgccgcgatctcctttgcttcctggcggtttcgggatgagaaggagcgttcgcggaggtaggtaggggttggtggtagtggggaggagatgcagaaatttcgtgggtgccaaagttttctttaaagttatttttcaattgagatacttttaaaggaaaaaaaaatccacaaatttaggatgtcagtttcaaaaagtttttacggaggagcagcgcgggggctgggcgcagaattagggacgccgttggctgaacgggggcgtctcttccatcctgcctgccgcgcccctctgcacccctacccaaccctgccatgtacacccgcgctcacatccaagcgcgcaaaccgacactactcacccccacccccggcgaccctgacaatcctgggttcccaggcattgtcctggcgcgccagggaagttgccgtgcccagtcccctcacctggatccgtacactcccgcctcagcggctttcactgtgtcccccacctttcacttaatgttcaaggtttcgctggcacaggggctgcgggctaagctaatcccgcgtcccccgggtcgccctcactccgggcgcaacaggcgagacagtgagggcggggattgcgcgagagcgagcccctggccgtgactgcaagaggggacctgtgcctaaggccccgaatccccgccccagccctggaatccaccattcacctctccctggtctctctctcttcatcccagcggcctcccacctctgcttcccagcacggagcgggtggtggggtttgactggagcttggggaagcggaggagggacaggaggaggggggtcctgggcagggggcgcacccagcagcacgctggcccggcagtaggagccgcagctggagtgagggcgcccctctgccaaggcgcgcctccagcggacctcagctgcctggagcgggtgggcaagaggcaaggttgcaggtgccggaagggggccagggaggagtcaggtgcgcagtggtgcctgcagcggtcgggagccaggctgtaccgggtccaaagcccctctcgccctccacctcacccaaccccctccacacaccgccggatactcagttaagttggatcggcggctgcaggggcagctgcatctgttcggtctgtgtgtgcgcgcgcgggagcaagagagggcccccttgcctctcccgccgctttccaggatcccgcggcgctccgctacctcgctcttctcccgcagctaagttccccgtccaggtgggtgcgtgcggttgtaggagcgccccgggcaccgccgcagaccctcttcctcctccatcctcctccagcgcccctgccagcctaggctccttcccgtcccgcttcccaaggtcactatggggacgcgagggagggatttgtgtttaattcctgccgctattcagagggaaaagaaaataaagggaccaaaggcaaccagaaagcagtttacctcaagcctttattattgtagattgaaagaagtttatatacaggaaatatttccagcaaaacactcaccaaatggccttcgaatcaggggccctccacctcccagccccacaatcagcagctctgcctaggactcccctcacttggggacctcaggctctccccccacctctctttccccggactccatcaccccaacgtcattccccaggagtctcagctttttctctctccctggggcgctgcgaacctcgccaatgcctctcaagctatcttcctctggtcccaaagcagacaccccaacttccctcccatttaaggtggttacctcacggaaacccagagcaccctccccctcaaggtttaggtgctgctttgaggcccctgcaattcagaactagctcgtggtcaagaccagttagagatagttcgtcatcagcagtggggctcctgtgcacccaaaacaagcgggggaaactaccctgcccacccctccccatccacgacatcacttcccctaccagggacaggaaacagacacaaaagcaacagggaaccccctctccgcgcgcgacaggtgggtgccaggcaactagctcagctgagctgagagtctcctggaacccagctgcgctcagggcgcgcgggcgtggccaaggtctctgtgcagctgcgggaagcaccgggccaaagcacttggctgagggcacgctggggagggggtgtaagaaaatgctgtagaggcaaagtcctgggggcacacggacaagggcaagccatatcccgcgctcaaaagaggatttccagtgagccaggcaggtgtgaatgagacagttacagaagcagagtcccagggaggtaggggagattgttcatgtggctgagggtgcagactcagtctgaaatggtggctcagcacatcagtgtcactggggcctcgccaagcgtgacttggtttgaggcgcttgcacgtgggcttcgaaggctcgaaggcccagcccaccaagttcagtcaattgtccgttggatgtttacaccctccggggccgagcgccgtgcagttgctcatcatagcgttccaaccaagtgcgcagctcagagacctggtagccgtcggggccacggccgccctggtacataatagtgccactctggatgacatagagacgctcgaagtaggcgccataggccgagctgctggagttggccatggtgtcgaggaccagagcgcagccgggtgcaccttgctgcagtaccctcgctgcgctgacccggtcctccaggctccggtgctgtgggatgatgtagggagagtccgtggtgacccagccgtcggaggggtgcgcttcctcgatgtagatgatgaggaagtcgacgtcgcgctggtacttagtgaccaggcgctggaaggcgctcatgcgcgccatgaacggtggtcaggtgcagctgccgaaattgagaaccagcgggcggttcccttgcgcgtagtcgaggatgtgctggctctggaagccgtcgggcagaaccacctcggagttgggcgccggaccgccctcgtgcgcctgcttgaagaaatccaacttctggccatgccacaccgccttgagcgacgccagggtgcacaggcggttgtcgtcggacacgcagatgggcgggtcatcgggaggcacctcctcgccttcactgttgagctccacttcgggctcgggctgcccccggcggcggcggcccaggaaatgcttgcggatacacaagaaatcgagaagccagagcatgaaggccgtgccgaggaagcgcgggaagagcacgaggcacgaggcggtctgggcgcagagcctcaaggagtgaagcagcagggagcggagcatggtggctgcaggccccgaagccccctgggacccctcgccctctccgaccaccaaccgcgacgtggcctggcgaggcatctgggcttcagcagtgcagggagttcaatttatagcggaggcttcaattggcgggagactccacctccggcccggcccgcccccttgcaacttgagcccggagggatcacccagcagcgcggccaatgccctagaaatcttgggctgagggcgggcgcaggcgggcggagggcggagcggccgggcctggggccggtgggggcgggcccgggccccgcagccagctctcgggggcgggggactccggcagccgctgccgctggggaccgggagcccgaccagggacctgggcgtccgctggggaggtcctccagctggcgcgagcgctgcgcgccgccctggtccccgccgcctggctccggcccgcgcccccctcgccgcgcacctgagccgagctccccggcggccgccgagccgcgccggagctccggttcgcttcccgcgcgccgccgccaacgccgcccacgccgctgccgctcgtgcggggccgctgcccaggtgccgcgggaggccgggtccgcggccgccgcttcggtggccccggctcccgccccaccgaggacgcgggccagcgaggaggcaactttgcgttcccgccgccttcctggctcgcccgcgggcgccgctcgcctgccggagcccgcccgcccgcctcccgcgcgcgctcacactcgcgcctcgcacacggccgccccccgcaccgccccgccacgcacaccgcggtccgcgccccccgccgctgcccgaggctgccgcgcgccgccccagcccgcgccgccctggccgcgcccgccccgtcccatctcgttccagcggggcgccgcggttcctgggtcagcggccgccggggccgggctgagaggtgcggagggcagagcccgcgggcgggttaccgccgggcgccggagaccggagagctggggaaagcggcgccggccctgcgcccccagccgacccgggcgcggggcgccacgggcgtggggcgcggggcagcgggcgcggggcggcgccggccccgggcggctctcccactaggggtagctgttgcctgaacgccggagcgctcccctctcgccgcttgcctcgcccagcgcagccccggccgctgggcgcacccgtcccgttcgtccccggacgttgctctctaccccgggaacgtcgagactggagcgcccgaactgagccaccttcgcggaccccgagagcggcggcgcgactcaccgcggaggcgcccggacgcgtcaagtgcgtactttcaaccgtaaatgggtgctgagcgtttaggggtgcggggcaactccctaactcgtggggccctggccggccctgccgcggcgtccgagaccttctgatccctcgctgcgcgcggcgcggggttggcgacttgggctcaggggcggcggggcggggaggtgccttgacctagggacccagaggccgggagcaagtctcctttcgccttggactgcagtgtcccccagggcaaggcctgaaccaggtcgcgagggtctgtctcccgtctggggagctgaactgcccgagacactgtcgcagtcgcggggacttgtctggagcggcggggtctgagcccaagtcggaagccgccgccgccgccagcgtcccgtgcgcctgccgccccgggaccagccgcgaaacttcttctcgggacggagacagcgctcgccgcccgggccgaggtaggagctggctgggctcggtagagcgcgggcgaatcgctttcggcagcgaaggaacgtgtcgggagaagccaactgcaggaccagggccccagcgggcgcgcagagacgcctgccttgggcggaggtccccccctccggttttcgtggctctggtagggccctctgtcccgtgagctcctcactggacctgaggctacaggcttcagcaggtcaagcgcccgagtgtgcctggaggattggcggcggggtggcatgagaaggtggcccctcttctccatctcccagtcaggcgatttctctgctgtctggggcaggggcgcacaccccaggaacttactacgtagagggaagccagcctggtctctcccccttgcgtcagtgctcctaagctgcccctcaccactctgggtaggggtctttcaggtgggctagggaattctccttggaagtccccttgtttgctcccctccatcagggcacctctgagttagccaatcatcctcttttctggcctcttttttgcggggaggagagtagagagagaagcctcctactcggcaggtctctgagaggaggtttgggggggcttctgaggttgctcctcctgggcagagtcaaggggtgttgagggttccaacttttactggacaatctctcaagctctgattccctgatttctgggaggtgtcagtgtagggcttgtgtcctgccccacccacacagcatttggtgcaggcacatgggatggttccccaagcccttttcccacagttagtttcagaaaatgcataagccacctaaggctgggagagcctttctgtgctggctgagatctggtggcatgtgcatgcatatgtgtgcaagtgtgtgtgtgtgtgtkcaagtgtgtgtgcgcatgtgcatgtgtgtrgaaagtatggtctgggtggctgtaagactggcccctcttgtcccctctgcaggcccagcccaatargaagcacctgatccacactctttctagccccagggatgctcaggaaagcagcctttctttagggctgtcatctgttctggggatctgttgctgtttcttgggcccacagaatacactccacacctcgggactccataatattggacaaggctggaaggcccatttggctcctgcagcctsttatgcaggtgaggacagacccaaggtccaggcaatgctggcctttggaacacagaacctggctcactgactcccactccagttgtcttttccctctgcctctggagcaaccctctctcctccagagcaacccctgtccctccttcctacctctctctagggctgcacccccagctcaccttagacctggcccttcctacctgttgcccctactgtcttgtcccatcccagtggtcaggagggagagtactggccaaaggcccagctccacctgtgacttaggggagtgccaggcatcacccagaggtcccggccctcgggggcctggcaggctctgctgtgggggaagcagagttagaactggggctgcttctcctgtcccccagcctggctgggcctcccccacctccctttctgcctgccctcttacaactccagcagggggcgggcaggggaaagaaaaggagggacaagttggatggggtccatttggtgtccaggaacaacttggagagaggcggggaggggacaggcagcagggccctggcagagccaggggagggctggcctttggatggccttctgatcccaagcccatcctcctggggcagtcttcccttgaaagggagggtttggtgaaccctggtgcggacccccccgccggacctcactgccccagtgcggggcgtggtaggcgggtttgcaatgggtacagcctctctctccattccagtagagcagctcccagggcccagagaggctgtcactgagacttccctctggggtggggtgggttctggtggccctgtgttcccctgcaggaggacctcctgaggcttcgggcaggagctggtgcacacctggaggagagtgctggtgaatggcaggtgtgtgcctcagtgtccttgctgccagggtgtcagccctgcttcaccactggccgtttgtctctgtcccctccactggcctcttgaagcacagagaccctccgggtactttccttcctctrggcttccactcatgctattccctgctccctttttctacctggagacccccattcctcctcctcctctgctgccctcacctccacctgggccctcccagctcccgggagatggctgaaccccactccccacccgctagtcatcctcttcagcggtcctcccagagctgtcctcagcatggcagcctccacagcccctgggtgtcacccccggtttcgtgtctgcctcggactccagacctgcccctcccaggctggcccagatggatcctctacagtgactaacccaaaccagcaccaggcagggacccaataaacctttgtgaatggagtaaatgagtgcggtgtgtacttactgaaaactccttgtttggggagaaactcagggtatttcactctgtccttttgcgcacctgcagcagtgagctggggcggcatgttggcagccagggctgagcacggtgggtcaggacctgccgctgtgagcagacaacacttcctgggaagtccccttggggcgtggtgtctggtgaatgcacccatcacctggtcactgggccaatccgtttccctttctgggctaaacaggtcttcccacgggtacctgggccctcccacggaggtatttacccttctcatttactttaagaatgaattcttctatccaaacacttggctaggttgatcatggggacaccctgcaggggatggggtgggagatggctgagggacccagagctctggtctgagcggtgtcctcaacatggcagacctccatccctctgggagtttgaggcaggcacaggggaggtggcgggactctggggtgactgggcaggctgggatcccagccaggacagcttgtcagggccccagggcctggatctagcagaggtgtttggcagcatttgggggttggagaaggtctggggctcccggccaaggagaggagaaggcctaggaggcagtgccctggctacttgctgtgtgaccctgtgcatctctggccccttcctcaggtctcgtctgcatcaggagtgggttgggtggtgactttccagtgccttccccatgggtcattctgcacgccagaaggtcctaggaagttctaggagacgctattctggccctacctgctgttctgcggctgctgagagccccacttgaggacgaaggtgccccagtgctggtcctacctggcctcatgctctgccacttccacccagtaccgccttcgcctgcccgcttcctgccgcagctcagggccctccagcccggcctgggctctgacttgttcctggcatgagtgctactgtgctccctggtgctcagccagaccccagggcacaggatgatgccttgccagaggttgcctgtgggtgcctgggtcctgcctggagctgggtggggcactgggatgctgggctacttgtgccaagacagatcttgctctgagccgggccctgaggctggctggagggccaccttgcgagtcagtccctcctttccatctgtgatcctctctggaaaaaggtggggttcaaccgaccagcagataggcatcccaggtccatgtgcttctctgagcctcagtttcttcactggagaggcgggcctaatgtttgaatgtgttgtgttcaccatgacatgaggggcaagtgtaaagtctatatgtgtgcctgtgtgagttcgtgtgtgtgtgtatgtgtacgtgtgtatatgtgtgtgtgtatgtgtgtgtatgtgtgtatgtgtatgtgtgtgtatgtgtatgtgtgtatgtgtatgtgtgtgtatgtgtgtatgtgtgtatgtgtgtgtacgtgtgtgtacgtgtgtatgtgtgtatgtgtatgtatgtgtgtgtatgtgtgtgtatgtgtgtgtatgtgtatgtgtgtgtgtgtgtgtgtgtgtgtgtgtgtgtgtctgtttacttaaacccagccttgttccagagtggatttcaggattcctctaagaagctttggaatgccagaagataccacaagtgagaagaaaaaataaaacaagaggaaggatatacttcccataaggggacaaagtacagccgcagtgtcctccgcttgggccatggaacagctgcaggttttgccctgattaccctggtggtaaagtctgattggctatgattcccggtgtccagaagataaacacgggcggtgcagcggagccacacgcatgcctgtgcatggccacgccaggtcggaaacccagcccctctgcttgggaggcacgcagggctctggctgaagcctgaagcttgggatcctcagagcacagatgtcccagggttgtgtgaagttagtgagacgaggtgtacggagagagctcggagaggagagggagtctcgattgctgtggctgtggctcggagatgcctgcaagaggtgacggtgatgtgcgtggtggtgtgttcactgatgatgctacactgcaggcccagggctgtgttgtggtggcaggtgtcctcctggaccgtttgacctttagggaggcctcctccactcaagcactggtcctggaggggctctgggcacacaaggagtcaggcatgtttttgcccccgaggagccccccagcctggcagggcccaggggcagggcagggtggggcggggtgggatgggggtgctccaggaggtagcagggacacttggtaagtggggccaaattgggaggcatctcaggaggtggccatgggcagagggacagccttccagttctttgcctctcccctttgaagcccggcgcctggcaacagacctgtggtagctgcacctgcctgggtaggagactgtgggctcttttctcgtagggggacaagagtcatttgcaggaccttctgagcaggtgggggacagcgaaggacaagaggaggctgtgcctgtgcggctgtgtcccggcacaggtgccgcttcatgcccacgccaccacatcctcactgggtggcttcgggcaagttacctgaactctgcgcctccatctcgtcttctgtaaaatgggtggcacatccgagcccacctcctagggagggtgttgtgaggacaggtgggggcacgtccgcacagcccctagaatagtgcccagggcaccagagtgctctgtagggaaatagtagtggctggcactgagcccccaacataagccagcaccgtgggccagagccacgactcctgcttctgggcacttcacaagctatggccaggggccaccacctttggccactcctttcccacagaattcctaccagggccctgccaggtcaacaagtcacagggcttccccatcacagaagcccagctctgtgacacctcttggtcccaagcacgttcctatcccccattcatgtgttttgttaggaccctttagggttgcacatggcagaaacttaatccacaccaacttcagcgaagaaggaatgtactggctccagtcagtgaaaagtccaggaggagccatgccttcaggcacggctgcatccaggcactcaacaggtgtatccaggcactcaacaggtgcagccaacaccttgccccgcaggctgtcagctcctgccttctgctgcgtccacgtcactgtaggtggatttctctgcacatgggtgagatggccccagaagctctggctcatggagtccttgtagcacctgtcctggccatccccagatgagaaagcatcatttcccatggcagaaatctggtggaaacaggagggagggggtcggctctctttggtcggatctgggtctcgtgcccatctctgggagagaaaagtccccattcacagaaactgagcagatcctggattggatggggaaggagagatgctggcagatacacacacattcactgcactccctgcaaggatagtgacaatagtagaagctgctctttcttgagaagttatgacgtgtgccagaaaattctaccttttaaggatatagagaggcttttatcatccccattttacagatgacaaaactgaggctcagagaggtgaagtgatttgcctatggatgcatagctaaggtctgaccccacaactcacactcacaagttagcaagaggtgtttcaccagggtagtctgggggcagaaggagcctgcctggtgagggaagggaggtggagaggtggggagaggggaggccaagaggaggggacaccaggacctggcctctggcttgcacaatggggagggaaccctggagaagaggaggtttatgggggaggctgctgagttttttgggcacatatgctaagttggaggtgcccatggtcctcaggagatgttcgggatttgggggtcagaggcatgagcctcggcatcctgggaatcatggctgtttgctttgctttgggaatttcacagtggtggggggaaggcggctgctgacaggaagcacttcccatttggtggagaaggcagccagaacctgcatggcagaagctgcggcctgggcctgtgacagtgtctacaactgtggccacaggttcaaggcccttgtagttggcagacacagggcctgaagttctctggccgttgttttagggcaaacaccttgagaatggcatttccaaggcccttgggctgtgccagggcaccaacgccagtcgaggaccacgcctttctgagggatgcttggaatctcacagacaggggttcacattccgactctgcttcctagaggctatgtggccttgggcgtgtctggaacctctctgggccacagtttgcttatctgtgaaagagtcatggtagcctctccttatgggtttatggggagcttcggatatggagggtggggcagcacacagggctcaagctgcagctcttagttacctgcttttcctttgcaggtgtcctacgggcctgatggaaaggtggcaggcgaaatgcacctggcctcagcgtcaggggctgtgaatgcagtagcacttgtagctatgaggtcagagtggactaggatggtccttccaccaagaagcctgggccttcctgctcttcgttgtccagctgcagaaactgatctcatccctcagggcttggcacaactgccccttcctcctcacattcccaaatatacctacccctccccaactcaatcctcctcaccagactgtggctccaggatgacagggcagagttggactcacctgtgtctgccaggccagctcaccgtgggggcaggtcccaagaggcctctggatttggaccaacttccagtgtgaccttgaacaaggccttcgcctccctcagcctccgttgcatgaggggttgtgctggcacatctcagagcaggtagcgctacctggtgagttgagggctctgtccatcatctttgtcactgtaatgctgggtaacaaataaacacgaaacaatgagtgctcgtttctcaggtgccgggggatttagtgggtccaggggtcagcgagggcaggctccctggcggacccggctggggtggtggccgctctgctctgctccacgcctctgatctgcagactcgcccaggcctgatctcaccgcaatggcagaggcacatgaagaaagcagcccccatacatgagcggcagggagccgcctgtgctgtgtctgctcaccccgcatgggctcacggcagtcatgggggagcactcacatgggagcagagggcccggtgaggctgctcagccaagggtctggtgcagggagaagtgaagattagggctctttgcaatctgtcacagggagtgagccagggcgtcaccctgggacttctgatggtgatcatgtgctcgtcacccaccatccgggtgctccagctggaccagacctaggcctgtcttgagggaaagacagatccttgccacgtcacttaccacaaccgcagccaaggctggtggactccatagccgtaggaaggcagcttcagggacagggtgggaggctagaggtctcttgtgttccgaagggcacagacgtatgggacaaaccagggaatgacccagcatccctcttggccatggtcctgccaggagacttgggtgctgtcctgcccccctgggcctctgtggcctcatctgtaccatagaggctggacttgggatttgaaaggtaccacccagggctgtggttcagtctctttgtagagagacagagtaagggtgagagtgagccatggagagaaagaggggacaggcctagtctctgcctctaattatttgcctcttcctcttctgcaagcccccctcagtggaggtggggggtggagcgtgca

SEQ ID NO: 96599 - DNA, 13749 bp, Homo sapiens
gtctaggctggagtgcaatggcgcgatcttggcttactgcaacctccgcctcctgggttcaagcgattctcctgcctcagccttccgagtggctgggattacaggcatgcgccaccacacctggctaattttgtagttttagtagagatggggtttcaccatgttggtcaggctggtctcaaactcccgacctgaggtgatccgcccaccttagcctaccaaagtgctgggattacaggcatgagccaccgggcccggcctggtatttccgtatttcatttgaaactgcatagttttgatccttttaaaataatttttcggccaggtgcggaaactatgcctagctagtgattaggatgctaataactattagcattagaatgctagtaactatgcctagctagtgattagaatgctattttttaactcttctcattggttttataaatcatatttataatatagtacatccaatcaaaatgtagatttttgtttcgatttcaataagttacatttcacataatgacaattgtatgactgtttcatccaaagagtcttgaattcttttgttttcccagtaccaaatttactttagttttatctatgaaatggtgataaactttcgttgtaagtatcatttgatagcattgaagtatttaactttttttgttggagccagagtctcagtctaggttggagtatagtggcgccaccggctctatcttagctcactgcaacctccatctcccaggttcaagcagttctcatgcctttcgagtagctgggattacaagtgcacaccaccacgcccaactacttttgtgtttttagtagagacagggttttgccgtgttggccaggctggtctcgaactcctgaccttaagtgatctgctcgcttcagcatccgaaagtgctgggattacaggcgtgtgccatgatgcctggctgatttttgtatttttatagtagagctggggtttcgccatgttggccaggctggtcttgaactcctgacctcaagtgatgtgcccgcctcagcttcccaaagtgctgaaattacaggcatgagctgctgcgcctggcccatttaactatttaaaagtcactttcaagttatgcagagtcataaagtaggatgggatcaatattttctatcttattttgctttgattttccccagagccctatctgtatcttttaacttttttttttttttgagacggagttacctaggctggcatgcagggatttgatactggctcactgcaacctcagcctcctaggctcaagcgattctcctgcttcagcctcttgaatagctgggatttcaggcatctgccaccactcgtggctaaattttggattttcagtagagaccggatttctccatcatggccaggctggtctcaaactcctgatctctggtgatctgcccacttcggcctcccaaagtgctgggattacaggcatgagtcaccgcgcccggcctcattgaaaatttatttttcaataccagactgcagtgttctttggggcagagacgttctgtcaatgtgctttttttccaaagtattttttttaattcatagaatatttaaattttttgatacatttgtaaatatatagtttgttagtttcaatagtatttaagagtccttaatactttcttacagagaagaagaagttggatgggataccgagattaaggatgatgtgattgaagaatgtaataaacatggaggagttattcatatttatgttgacaaaaattcagctcaggtattttcatctttttttataaatgatgttaggttgttcgtctctaccttaatcttcgcacattatgtggtgcatgttatggttaaccgtcttccattatagtttttgtgtgtgtgtgcctgaaagtagctttaatatagtggctaaataaaccctccaaaataaaagaaaatcagtaacaatttgatcagggtatgagaggatttctagtaatgctcaaagcttgccatgaaatcttggcatcttgattcattcttaggctgcatacaaatcgtagagaaaagataaaacggcaaatttgagagtagaagtcattttttaataaaattctagtatacctattagccagtggaaccattatggtaaaccagtttgtggttatagagcactaagtttctacaggcaacttgaataaacataacttgggtccattttgcatacagcaacatctttaccttttttttcattttttctgtagggcaatgtgtatgtgaagtgcccatcaattgctgcagctattgctgctgtcaatgcattgcatggcaggtggtttgctggtgagtttgaatttattttttgactgattgttattaaggctctataatgaagatgctaaacccaacatgtctgtttcttttaataggtaaaatgataacagcagcatatgtacctcttccaacttaccacaacctgtttcctgattctatgacagcaacacagctactggttccaagtagacgatgaaggaagatatagtcccttatgtatatagctttttttctttcttgagaattcatcttgagttatcttttatttagataaaaataaagaggcaaggatctactgtcatttgtatgcaatttcctgttaccttgaaaaaataaaaatgttaacaggaatgcagtgtgctcattctccctaaatagtaaatcccactgtatacaaaactgttctcttgttctgccttttaaaatgttcatgtagaaaattaatgaactataggaatagctctaggagaacaaatgtgctttctgtaaaaaggcagaccagggatgtaatgtttttaatgtttcagaagcctaactttttacacagtggttacatttcacatttcactaatgttgatatttggctgatggttgagcagtttctgaaatacacatttagtgtatggaaatacaagacagctaaagggctgtttggttagcatctcatcttgcattctgatcaattggcaagaaagggagatttcaaaattatatttcttgatggtatcttttcaattaatgtatctgtaaaagtttctttgtaaatactatgtgttctggtgtgtcttaaaattccaaacaaaatgatccctgcatttcctgaagatgtttaaacgtgagagtctggtaggcaaagcagtctgagaaagaaataggaaatgcagaaataggttttgtctggttgcatataatctttgctctttttaagctctgtgagctctgaaatatatttttgggttacttcagtgtgtttgacaagacagcttgatatttctatcaaacaaatgactttcatattgcaacaatctttgtaagaaccactcaaataaaagtctcttaaaaaggccacaggagatcttcatttttcaaatgttttaaagttacagaaatttgagaacagaattagcttcttttagtctcaattcagtacttgcctcttgggaaaatgttccgagtctgcggaaacttgccctcacgttgtcccccatgaattcctttattctattagagtctagccctgtgtattttagaagaatgtatcaaaactgaggggtttaccaaaaagaaaaggaaacagcctggccttaaaacctgggcattcttggtctcctgcattgtctgggcatatttatgaagaaattttcaccatttacaatacatacttaacaaaatggcttaacttcaaactggtttccaaaattgatttatatattaatatattaaataaggtgcatatattactgtattaaggggttttgagctttcatactagttgggaagcaagctgtcaccatttatactcaattctcttcaactgtttatctcttggtaaatcttttgagtaggaaatgctgctcctagcttatcttcaaatactgagttccttacctcatttgttcaacttttttttttgttagcattgaagcacaagttttacaggcttattcagaatttcatatcagtcgttttgtttgacatttatcccaataattgttctagtgatttaatttgtatggaaactcccaaggttcaatttctttttctttttgagatggagtcttgctctttggcccaggctggagtgcagtgatgtgatctcagctccatctcccaggttcaagcaattctcccacctcagtctcctgaagagctgggacaggtgcgcaccaccgtgcccagctaatttttgtatttttagcagagacggtgttagcccggctggtctcacactgacctcaagtgatctgtccgccttggcctcccaaagtgccgggattacaggcatgagccaccgcgcccagcctcattgaaaatttacttttcaataccagactgcagagttctttggggcagagacactctgtcagtgtgctctttttccaaagtatctcctgctatcagtttttccccttgaaccaagtcttcctaacaaatttgttgtgtcattgctttctagggaactggaccagcaaatgtggcctttagtggttaatctcatctgtgccaaaatttagttgctaccagagtgaaatttggtgtgtaaataatgttcagaggaaatgtggttggagtgtagtaacttgaatagtgtcgtgcatagaaaacagctcattctgagtgaaactgtttatgtccaatcagttcctgagtcagcatcccactggttcgaaaatctgtaactaatctggtaatgtccttaatttcctcctgcctgtcagtgttccaaagtgttcatctagttttcttttatctttataataattactaccatctttgaaagttctgtttaagaaatgcttaatgggcaatgcgggttagtaactccagggtctgcgtggcctgggcaggtgagatggacaactgcctcattacagaagctttttatcatcaaactagtaagttttgtggagggcaagctatatagattgttgatgagtggttagaaaatcatctggaatttagccagttgagaagctacagaagtttctatttttttttacagtggatgaactgttttgctttttctgataaagccactaggtatatctaaataacaacctcgggctggacgtggtgccttatgcctgtatatgtgaacactgggaggcggaggcgggtggatcatgaggtcaagagtttgagaccagcctggccaacacagtgaaaccccgtctctactaagaatacaaattttttttgttttgagacagagtctcgctctgtcgcccaggctggagtgcaatggctcgatctcagctcactgcaacctccaccttctgggttcaagcgattctcctgcctcagcctcccgagtagctgggaatacaggcgcgtgtcaacacacccggcttaagtttttgtatttttagtagagacggggtgtcaccgtgttacccaagatggtctccatctcctgaccttgtgatccaccagcctttgcctcccaaagtgctgggattacaggcataagccaccgcgcccagcctaacaatacaaaatttagctaggcatggtggcacgtgcctgttatcacagctactcgggaggctgaggcaggagaaacgcttgaacacaggaggcagaagttgcggtaagccgagatcgtgccactgcactccaacctgggcgaccaaggaaacaaccaacctcaggatgaacattgctttggaaataatgcaatgtgtgaccttgaggaaatttcggcttataaatccattttttgaagtagtttttctcctttaaaatggtgaccgtagtaacaagcacagagttgtactgagtaattagttgaatagtatctatggaaaatactagacactcccaagttttccaattttggattaagagaggcaggccttgtgaaagagatactaaccctagtcattacgttagtccatctctttagtgcagaagatccttggcaaagctggataataggctgagagaagaatattcctttaagagagggacactgactactcaaagactttcttttattagtacatgggctgggattgatgggaarggacagatgtagttggcaaccatggttagcatcggatgcccatcccaatggccatgaatgtgccaaaggtgccgccactctgcatcatggttttcccratgccgcccatcagctctcgaccccgcattccgatcctgaggaggaaaccaagatggagctatttggtaacaaaaatatcagaaagagtattaactgctcctttccaattttttgctaacactagtctagcaacccctacatctgattttccacttactggatattatatcttactacctggggtgggtaatgagaaggaaaaagatccatctgggtctycagggtatttttctggtggatgtcgtattaactgccttcagtttgtgggaggcagcagatgcagtgtaaaatacatagagaaaccagcttttttgactggtgttgcctgcagtttaagacccaataaagacatctgtcttttagtttcttggtgttaatgattttggagtaaggtgggggttcaagagtcagctctacaatttacacatagtgtcaagtgtaaaatgggcatctcaacattatttacaggattttgaaaactacagtatttagcacagtgcttaasatagagtaagtgctctgtaaatgrtaatttacaatctagggatatggcaataacagcctctaaatgtgaaaatgacctttagagtgtaaagtttaactgctttatctctgtatcctgtatccagaatagtaaaaccgctgaacgagtttctttccttatgcgcaattggaaaaaaaaataaaagcaacagtagtaactagttactgagcacttaatatgtgccagatgctgtgcaaagtgtgctgatcgaatttttacaactctataagttagatgctactgtcttcattctacacttaaggaaacccagtctccaacttgcctaaagtcaccgaaccagtaagaaaagggccagaaagcattttgactctaaagctcaaattcttaagcactgacgcttccaacctgactttacagattgaaggtggtttggaatgagtctggctcgcgaggggacagagagggaagtcgaaagaaggaggctgtgttcaggctccaggccgaatggggcagggccggaaggtctggttgtcctgcccagagatcaccgcccgcgcccctcacctgagacaggaaaaggtgccgaagagcgccccggccgccatgcccacggsgcaacccatcacgaagcccattttgacacggtcgaagcagcttggctgggactgtccgtagggacccacggccaccggcatctgcgggggataggaaagtgtgggcccaggcgctggcccaagagtcgggcggggacggaagcggtaggctgggaagtgggcccaagggctcaggggaagtaagggaaggaaaatcagtgggtagcccgactccaccaccctcttcgcgttccggccccgcgtcgcccggcgcctacctcacctcgctcgcgggctgggtcgctcagctctacgtctctcacggaaaacgacggggagggcgctcgcggcccgatgaatcgcttccggagcgccgggcagcacttccgggagcctggggcccaggactgcagcggcttcggaaggtgggctctgccagcgggaccatgctgctccgagccgcttggaggcgggcggcagtggcggtgacagcggctccagggccgaagcccgcggcgcccactcgggggctgcgcctgcgcggtacgctcgggtcccgctctccgggaggcgcggacctgtcccctccgcgcggcgacgcaactgaatattccggagccttcctgtccaccctgctgcccagaccctctgacccttctctcaaatgacacatccctcaaactttcttaggcgggtccccgaacggttgaccccggcgcaccacccctcgcaccctgcgcgacaggcccccagagccgtggaggcgcgtccttcagaccgctcctggccaagttacagatgctgctccgggctcccgtgcagaccgttaccttcggtcagaagggactgcacctactctggctccacgttccttctaaacgtctttgccctttagagccttccttcctacgataccatttgaatatcaactcaacaccccctccaggaaccctctctccctctcccttacctccttttacagcgtgtcaggtatctggtgttgttttctttccattgagattcgaccctagcatcccttacacttatctcacctccagccagatttttccttctgccctttggatgccatgcgttcatagttgccttcggtcttacttggctactccgttccattttttatcagttggagaccgtgctcctcagtctgcggttcccgcagatacagccgctgccccggaggtggggccagtgctgcgacctctctatatggatgtgcaagctacaactcctctggtaaggatgaagcttttcccaaggctgcttataggaagtaaatgatgggcgtgatcacgcaaagaaatggctgaatccctggagaagtgagagccgtgaaggtgtgctggaaaaagcactgagcgaggagtcgggaggcttaaattcgaggccactggcattggctttactactcactagcaattgaccttggtcagatcacttcagcgcaggctctatagtattagttaaaagcatgggctctggaatgagcagaacggccacttagtaactgtgtgaacttggacaagtattaaacgggttaaaagactaatgcaagttttcaccaatgtgtgaccaggggtgtttgcctaggccctgtcctgtcccagccccttatagatcacattacctggcaggaatggaaacaccagcagaaacagatgtcggaacaaggcagtgtttgtagactacctgaggggaggcagaacaatccgagttgggatgggttgtgagtgggagtgtattaggttgatatttggtgggtagttttgtgggaacaaaagaatgtttgaggcctcctctaggcagtgcctgaggggttgagagtgtcttaaggcagggtggccaggtctgaggggtggagtgggacctgaattgacgatgcgctcaaggaaaatgatctgttctgttgtgttcaggacccccgggtgcttgatgccatgctcccttacctaatcaactactatgggaacccacactcccggacacatgcttatggctgggagagtgaggcagccatggaacgtgctcgtcaggttagtacacaggagtctaggaggttctaaggtcaaagaggggcagtggcctgtgggaggcatttctttcttggtaggtgtgcatggaggtagaaatggttttggattctttctggaagagattcaaagagcagccttggagtttgactgcaggcatttgattggttcccatatttcctggctaaatgacttgggcaagttatctaatttctttgagccttattttcctcatttaaaacagagattgtggtagtttctactctgtagggttactgggtggattaaataagacaatgctgataaagtgtttattaccacaacatctgtaagtaagaagtactataaatagtaagagctcaatagttctttttttttttttttatgagatggagttttcacatttgttgcccagactggagtgcagtggcgcacgatcttggctcactgcaacctctgcctcccgggttcaagtgattctgctgcctcagcctcccaagtaattgggattacaggcacacgccaccatgcctagctaatatttttgtatttttatttatttatttatttactattatttgagacagagttttgctcttgttacccaggctgcagtgcagtggcacgatctcggctcactgcaacctctgcctcccgggttcaagcagttctcctacctcagcctcccaagtagctgggattacaggcatgcgccaccacacccgggtaaatttgtatttttagtagagacggggtttctccatgttggtcaggctggtcttgaattcccgacctcaggtgatccacctgcctcagcctcccaaagtgctgggattacaggcttgagccaccatgcccggcctaatatttttgtattcttagtagaaatggagtttcaccatgttggccaggttggtctcgaactcctgacctcaggtgatctttccacctcggcctcccaaagtgctggggttacaggagtgacccaccacacctggccaatagttcattaaaaaaaaaaagttattattttgcattgggctggaaaagagcctgggatctgggatataactagaatctgattcttgtaggtgcagaccttcatccagggcaatttggtggaatgcagtggagctcttcttgctccagggctgtcccacctgtgtctgcagctctatttctgcctggggaactgatgttatatatctctgtttcttggcttgcagcaagtagcatctctgattggagctgatcctcgtgagatcatttttactagtggtgctactgaatccaacaacatagcaattaaggtaagagaagggaaccagagggtgtatgtgggctttcctgacctaggagatagtgtccctccatcatttggactcgtatatgtatttcgcagccatccatccccaccccattgtgaagagaaggcttgcagtctttctgatttgttgcttcctttaaccctttgcagtctactctttcttaagtctttgctgctgttggtctgagttgagtgaggcagttggatagcaaaggaggtggccctcaggccattaaccacttgttttttttttgtctggcagttacttcagagagtggataatggtgattgaaccttttctccattcttctttttttttttgatacatagtctcactctgtcgccaggctggagtgcagtggcgcaatctcagctcactgcaaactccacctcccaggttcaagtgattctcctgcctcagcctccagagtagctgggagtacaggtgcccgccaccatgcccaactaatttttatatttttagtagagatggggtttcaccatattggccaggatgatctcaatctcttgacctgatgatcctcccatctcgacctcccaaagtgctgggattacaggtgtgagccaccgtacccggcctttctccattctttttatctagtaacaacaagttatatatgtgatttcagggctgtcctcctctcagccttcctttttctttctgatcagatctatttgcaacaagttcctcctgtttctttagatatctccattttgaagtgcttgtctttgtggtgccctctgcaggcattcacatggtcacccattctgggatcagtcattttgtcctgggtacatagaagatctttggtgctaatgcaaggaaaaggtacttttagtagtcacgttggtgtttcatagaacatagtcagatttcactgggcctggttgccaggattatgtgagtaaatgccaaggctctgagaaattgtggcttgctgtactttgaactctggctccacttgctctcatctttgtctttgaactgtgctgccagtgttggtttctttgaccttggcctgaatataggaggcctaggacgggcttcagggtcatcagcactctgcctgatcatgttaacaggaaggcatccttccttgggactgcagagaccagagagtcggggtgaaggttcctccaaaggtggagatggtttctgaaatggagagcattttcaaaacttcgaaaatattttctttggaagtctccacagattccaaaccaacaggtcaaggatcgctaagagtacctgtgatgatgtttcttttaatctccatgattggtagagtaaaataatctataaattgttaaagaaatctacatcatgggtaactgagataaaataaggtgggtgggtggtgaaatgtcatttaaatgaaatttttataaacaactgtaacattttgaactatcatcaccatcccacaaccattttttctttttttttttttagactgagtctcactctgtcatccaggctggagtgcagtggcacgatcttgactcactgcaagctccgcctcctgggttcacgccattctcctgcctcagcctcctgagtagctgggactacaggcgccctccaccacacccggctaattttttgtatttttagtagagacagggtttcactgtgttagccagaatggtctcgatctcctgacctcgtgatccgccctcctcggcctcccaaagtgccccacaaccatttttacttactgatgtaaatactttttaggataaaatagagtataaatcaattataaatgtttctcatttatgttctttgtcctcatgaacagaccatttttacatagttataattttgtcctatatggtttaatattctgcttttattttatttatgtgtttattttttataagacagggtctcagccgggcccagtggcttacacctgtaatcccagcactttgggaggctgagaccggcagatcatctgagatcaggagttcgagaccagcctgaccaacatggtaaaaccccgtctctactaaaaatgcaaaaactacctgggtgtggtggcacacccctgtagtcctagctacttggaaggctgaggcaggagaatcagttgaacccaggaggcagaggttgcagttgcagtgggccgagattgcgccattgcactgtagcaacaagggcgaaactctgtctcaaaaaaaaaaaaaaaaaagacatggtctcattctgtcacctaggctggggtgcagttgcacaatcacagctcactggagccttgaactcctggactcaagcaatcctctcatcttagcctcccaagtagctaggcttacaggcgtgtactagcacgcctgtctaattttgttattttaatttatttatttatttttttttgagatggagcctggctctgtcgcccaggctggagtgcagtggcgtgatctcagctcactgcaagctctgcctcctgggttcacgccattctcctgcctcagcctcctgagtaggtaggactacaggctcccaccaccacgcctggctaatttttctatttttagtagagatggggtttcaccatgttagccaagatggtctcgatctcctgaccttgtgatccgcctgccttggccaaccgaagtgctggttttacaggtgtgaaccaccgcgcccggcctgttattttaatttttgtagagatgcggctctcattatgttgcccaggctggtcttgaactcctgggctcatgtgatcctcctgcctttgcctcccaaagttctgggattactggcttgagccactgcacctggctttttattctgctgttaaaggtaatagtcttttataagctctggggagagatgcacattttctttccaagtttttaatttttgaaaaataattctgtcacatatggtgtgtttttttaaaaccaatggaaagatttaaaatgaagtgtaggccgggtgcagtgggtcaagcctgtgatcttagcacattgggaggccgaggcaggcaggttgtctgagctcaggagttcgagaccatcctgggcaaaatggtgaaacaccatctctactaaaaaatacaaaaaattagct

SEQ ID NO: 96600 - DNA, 20589 bp, Homo sapiens
gacatttataactttttatttcatagacagttattaggtcctcaatcaacttttcaaaacaaaacaaaacaaaaactctacttaacttataagtagctaaacaatgttgctaatgatacaaatttaagacctggtagtaaaaagccatatacagtaaaaaggaataaagaggaagtttctaactaagcccaaattagtgcaaatcagtgcaaatgtaatcatgtcactcttctgcctaaatccttttaagaacaggtccctattccctagagcaagaatggcaacctcaaaagacagagagggtagccaggaaggtataagggaatgggccaaatctaacagggaaatagaggagctagagggaactatagattttcaaatcctgtgcaggccaaatgaaacagttcatctgtaaaccagaatatggcggataacagaatttctggttcccttggtcttaccctcaagccccaccatcaccttgaaccaaattacattcccaaactatattaccaaattacattaccaagctccatataaaggatggtgtccaacatccttgggacgttcaatgtcacatattcaaaagaaccacactacattttctcagccactggcttgcctactttatctcctggtagtaagtgaggtttttaacagtgaatttgtcttattcttttgagtcacagtttggtctaaatggttactaaacaaatgaattaatggttacattaaaataaaagatatattgaggactttttactataaaaggttttcataaatacacttagaaacctaagaccctacttaataataaacagtatacattatcaagactaattttcataaattcctaaataaaaaccagtttttatttcttattacatacttagatttttaaaatattttaatttggtcatgaacttcaaatgcaaagagaggtgggcagatcatgaggtcaggagatcgagatcaatgtggccaacatggtgaaaccccatctctactaaaaaaaaatacaaaaattagctgggtgtggtggcacatgcctgtagtcccagctacttgggaggctgaggcaggagaatcaattgaacccaggaggcggaggttgcagtgaaccgagatcatgccactgtactccagcctggtgatagagtgagattccatcacaaaaaaaaaaaaaaaaaaaaaaaaaaaggattaaacaaactatcttaaggaaaaagctccaaaattaaatctagaggaaatattactacatacaataataaatatatttcattgactttacccatcaaacttacataaaaggcctccaccaactgcctgaagcacggttaaaattgggaagaagtaaagtgcagcataaatacttttaaatcgatcagatttccctaacccacatgcaatcttcttcaccagaagaggtcggagcagcatcattaataccaagcagaatgcgtaatagataaatacaatggtatatctgtaaaataaaatagagaatttgtaacatcaaaaatgttttaaaaatgtttttaatcttgatcatttttaaatgaaagagcctaaaagaggtttaaaaagcatatttactctatccattggatattcagattggtggaaagctggccaaacaggctgtcatacacggctagcaagggtacaatggttgctttcttaggcagtctggaaatatgtaccaaaaatcctaaaactgtttatcccttttgattcagcaattttacctgtagaaatttatccaagggaaacaaccagggatacataaaaaaacctactgtacaaggatttttattgaatcacttataataaagcccagaagaaaataaatattcaaatgtaagaaactggttatattttatagtatattcatgctgcaatattatgcagacataaaaatctagttatgaaataaatgttaacaaaattaactgtgcctaatacattaagtgccaacaacttacaagatagcatgtcatagtatagccttaatattccttaaaatgcatacacatgcagaaataaaactggaaagataaaatttgtagcagaatcatctcaaggaatagaattacagattattttattctgtgtgtgcttttattctgtttttgaatgtcccatttttaatgtaatttttataatcagaaaaaaaaagctgtagaaagagctatgtgtcaccagatttctagcactttattttgaataatgggacttttatccacatagttctaccttaattttcctgagtattttcaaatcatttttactatcttgctactcaaaccctctccctatacaggggagtgtcctaggaagtcagcagtcatttcagatcacggaccacatgcttcctccccacacagcatcatgataccataatcctgtgttcctatgatgcttttaggttcagtcctgtacagtaatgcattagtacatgtttgatctcttgggtgataatttttttgtcttgttataccacccccaaacaacatcaaaagaaaacaaaatctatccattcctgcaacttgtagttccttaagagctctaaaaaagatgattttaatcaagaggaaaccattatgtgttacctcttctaatgaattagtttcctagtcttgtttgctacctcttatcaacagcaaaagaaaaaaaatctgtccatttccacaacttgtaattccttaagagctccaaaaagattcactttaatcaggaggaaaccatcctgtgtttctccaaatgaactaggaaactagtttctggaagtgattacgtttcccactcctgccttccaccagaagacctcatcccattccactcttcccctctttcaatccatgctgcctacatgtggggatagtttaaatttgacaaactaaagctaattactgctataagagtaataactgctcattttccataactcattcttaaagttttagtaatgtaaaagttatttttttgcagtaagttataatgatagaagcttacatgttttttcatgcctcatctgtttccccttaaaactataattatcagtaaagtcctgtggtatttttcaatttgtaagaaactaggctatatatacattgggaaaaacagccttcatttgtcaatgcactagtgttccaaaggtttctggtaattgtgtgctattgctttttgttgacttgcaaaaaaaaaaaaaaaaaattactatgacttgtggtagccctacaaccttcggaagtgcttagcccagtctgaccatacatttatatttagaatgcttaggtaaataaataatatgcctaaacccaatgctataagatactatataatatctcataattttaaaaatcactgttttgtataataataaaacaaggcaggcaagctgttctacaatgactgttggtaagggtgctgaggaagaaaaacaaacaatcttgattcagggatagtgaatagacaaaaaatgtcctaatcaatgaagctgtgtgatgattctgattgacagagagtgctgccacaagattcttaggctacactcaaatcagcagaaaaagtgctacaataaattagaagtgactattacaggtgcagatgagggttggtagtacctgtttgccatttctcttctaatcttatattttctgaccctcctactgtaataggctttataaatattacaataaataacataaatgagactatcgctaaataagtctgattttgttttaaataagattacattatatcttatttaaatataatattcaattcatttattaagttttccaaataggaccacgttaagttatgcaaggccttaggagagttatatgacaagagggtaattaatgcttagagttaagctctacgaatcaatgaatcaacaaaaaggacattatcagtgttttatatagtattttatatataaattatagctatatatatatatctataaaataatttgccatacctaagaactggcagggagaggccgggcacagtggctcacgcctgtaatcccatcactttgggaggccaaggtgggtagatcacttaaggccaggagttcaagaccagcctggccaacatggcaaaaccccgtctctctactaaaaatacaaaaattagccaggcatagtggcacatgcctgtaatcccagctacttgggaggctgaggcacaagaatcacttgaacccagaaggcagaggttgcagtgagctgagatctcgtgccactgcactccagcctgggtgacagaacgagactctgtctcaaaaacaaacaaaaaactggcaggtagaaaagaagattttcattttttctaagatatctggttgttttgtacctatttgcatttctatgtttttgatgttttattattaagaacttgctcaaaaaggactaatttccctgagcatattatgtactgaaagcctgctacaattatgagaatataaataccagacttctattttccctttcccccaaaaaatatcaaaatgaatttgattcattttctagttctagaatttacaaaaattcataaaaattctgaaactggaatagtctggcataattgcatacagaattttatgaatttaatattttgaaaacaaaacattctaacagaaattacacttatttggggagaaaaaaagaaaaaacactaatccaaacactgtaataatgccatttactataaagtgcctcctatatgtaagttatatggtatctagaatgtgtggattaatttaatcctcacgacaccttataaggatcattattcccattttaccaaagagaaaactgaagttacaagaggctgtttacatgttcaaggtaataaagccgctggcagacccagaactcaaacccacacctgtttttgtctccaaacgccataaaatctataataatcctcagagatttaaaaaaaaacaatgatcttaagtcgaaataaacacttacagtgggtagacggcttcatgagtacagtgtactgtggtaacgtaatctggacttgggttgtaaagcatcgtgtaccagtcagaaagcatcaatactcgacatgaacgaatataaagaacaccaactggatcactcacaagtaaggtgataatagctgccatgctgcattcaaataatgcagtgatgtgttggaaaagtgcgctggaactagagaaggaaaagaggcatgattactagaaaaattgcaatatttaaatggctttaataaaacatgtacatgtgtcaagatacagatttctaaatctataagaaaagtcaaaaactactcgagtataacctttttttctcaaaagggataaataacactgtagcagtattatctaaatgtgtaacagaaaagcagaaattatatctaccctgcatctttagtatcttgccaaattgttgctaaaaatttcttagttatctgtgtatcattttaatcttaatatgcacataaaagatggtatgtaacgtgtttgttagaaagtatagtaattataatattataagctcatctcctacccaataactagaacactgtcaacaatttgtaactacttctttgttcctccccatccatacctctgtctctcccttagaggcaaccatgtaccaaactgcttttaccacttttttccagaaagtttttatcccaattgtatttctgcttcacaactattctggttagttttgcttatttttgaatgatatcacactaatggaagtcttctgagattttttttctactcaaaattacatttccaagtttcatccatgttattgcttatagctgaggttcagtcattttcgctattgtgttaggattccactgtgtgacaatactgtgatttgtttatccattctgtggttagttaaatgtgttgcaaatgtgtacctgtttgtgggctcaattttcactttctttgtgaagcctttttataaacatgttctaaattttaatacaccaggcttttatttttttttctacttagcagtttaaatgttttaaaaagtccttccacaccctgagatgtgtgtgtatctcacacacacacacacamacacacccaaattttcttctaaaaattttaaggttttgcttttcacatttatctttaattcacctagaagagatttctgtgcctaacgtaaggtaggatctaactttacattttcccatttgaattgccagttgtcccagcagcagcattttactgaacaggtactccttcccacccctaccttcccaactaatttgccatggcacttctttcatataaagtttcatatataattgtctgtgttttgggtctctattctgtttcttgagtccatttatctattcctgagccagaagaataatatgatcataatccttgatgtcatgtacattttttctacttctttggtggtcttggctattcctggccctttgctcttccatataaattttaaaattggcttgtcaagtgctcagataaatcctatgtaacttaatggtctgagctatgtcacagtacttgtactgtacatggaatayaggaaatagtttcatatatttatcttatagtcaacctttttattaaactgtcttgttatttctaatatctagtctataggtgattttgagttttctacttgaacactgtttccattatgtatcattgcatagcaaactacctcaatacttagtggcttgaaacaagaaccactgatcatttctcactattttgtgatgtgactgggctsaactgggcagttctttctgctccacatggtgtcaatttgggaagcactggtctagaggcttgaccatgctgcagcatttaaaaggactaactcacatggctgcagtaagtgctggctgttagctggaagcacaaccaaggctgttaacaggtgtgccttggttctcttccatatggcttctctyttgttttcagtactctgcagtttaattatgatgcatgcaggtgtgaatttctgtttattctgcttgggatgtgttttccttctgggatctgtgaatcggtttctcattatttttgtaaaacctgaagccagttatctcttaaaataccagctctccttggcygggcgyggtggctcacgcctgtaatcccagcactttgggaggccggggcrggtggatcacgaggtcaggaaatcragaccatcctggctaacacagtgaaaccccgtctctactaaagatacaaaaaaattggccgggcgtggtggcaggcgcctgtagtcccagctactcgggaggctgaggcaggagaatgacgtgaacctgggaggcgaagcttgcagtgagccraggtcgcaccaccgcactccagcctgggcaacagagcaagactcgtctcaaaaaaaaaaaaaaaaaaatagcagctctccttcatagtctctatttttccagagaccctaattagatactttgggcaaagacttaacaaaacatttatgctgtgcatgagaatctgggcttcaggtaactctctagctcttttcctctggaagcctgataaggatagaatgtcaactatattgctaggcaacactgcttatgatacaaatgatccttgcctggtaaattatatctcgactggggagaaccataaatgaactataaatgcctgatrgggataccatggtttggctttcttgagttcagtgactcttataattggcatgtcacttgcaggaccccagaagttcatggaattgttataagagagactggcttctgtgaggtgtaagactttaagcctggaccactcccacacctacccaacatggatctcaccttcttgcacctgattttccatctccttctttctcagtgcaatattccattatttctatgyatytttttctagttcactaattctatcttcaactgtttaatctgctgactacctttttttttattttggcaagtataaactttcatttctaaaagtttccttttcttccccatcacatgtatttattcctaataatcttattgttatggacagcttgtgactacatccttactttctttatagrtagcagttacatatcctgtaggtgaaagtccattatctgtgtcctctcagagcataaatatattgtttgttgcatgtaccaataagtcctagtgctattttatttagtaaccacagactatgaggccattactagattttaatgagcaagagtcttacagggttaaattgagaatggggaagctttccagcaaagaggctctgctacttttgtcagcagccatggccactactaccttaggcttcaggcccttgagggtctagtcttagcagaggctacccaagattcagtatccagataacactgctgctaccagcaattgacctcagacaaccctctcatcccaactgcctgccttgtcactctggcctaactcagggtgggctggtttgtgttttgaaagagaagagttcctggagatctctccatctccagctgggaccagcaatgtctcacatagtttatctttcccagactttagttatttcatgcaggtgggtcacttggagctcctaattaactcacattgttggaaacagaactcctgtgccattttacaaagatgaaaacactgaaaacataaacacacattcacattacataatttgacattttgcttccttatagaattaatattttcagaggcaaaatcccaacttcattatttcttgccattactttgataaccttcttaactggtcttcttgtcatgttctctttcaacctatctacagccagacacataatctttacaaaatgaaatacaattttagaactcctctcattaaactaattttgagtctttttgtctttctggaaaaatacccccaccagcatcgtcttctctatttcctggccatgctaaatgactttaagttcacttgtgcctccacacatctgggcatgcatcaccctccacctcaaacacattttacctatctgccaaaccatgcatccttccagatcagctcaggggttatccccagtttttatgaacatttgttaagacacctccagcccccatctatctggactgtaagtgcaaaatttcaggaaactgtaagagatggcccttgtggtccttgttaccaatttcctaggcaaagcacagttgtacaactccctctttttaaacccacctcctttcctgtctgagcattagtcactcctcgccttccctcaaaccaccctctagtctctgcttcaagtctctccctcaaaacatagctgacgtctgaattcaaacgcatttggtgaagacatacctatgcctgttagctcttctttactgtgggctgagaacttcccaccaattgactggacaattattctatttcagctttgtcatatctcctttctcaccccatctctcatcattctattaatataacagaaattaaaaactggatgaaagctgctatttttaaagtatttttataaattattctaaaaaattataaatgctttcccaatgtaaataaccaccctggatttattaggtaggccccagaaaactgctgattctatttctatctgaccatcctttccatttccattccaactaccatagtctatttctttgacaacagtcttctattaaatatctcacctctaatctacctaccctccacagaaattttcttcctaaaatatacatcaaatgatgccacttccatacaccagaccttcaccaataaacgattcactcaaatacggagtgatttttttggatgctcattccctccaaatctcatgttgaaatgtaatcctcagtgaggtggggcctagtgggaagtatttgggtcatgggagtggaagcctcatgaatgacttggagctgtgctcacagtaatgagtgagttctcactctgtgagttcatgtgagatttggttgtttaaaagatcctggtggctgggcatggtggctcacatctataatcccagcactttgggaggctgaggcaggaggactgcttgcgcccaggagatcgagaccagcctgggcaacatagagagaccctgtctctacaaaatataaaaaattagcagggtatggtggtacacgcctgtagtcccagctacttggaaggctgagatgggaagatcacttgagcctaggaagtcaaggttgcagtaaccagtgatcacaccactgcaatacagcctaggtgacaaaccaggacattgtctcgaaaaataaaaacgaaaagataaattaaaaaataaaacattaaaaaaaatgaaagaggtacctcctccccctatcaccatgtggttcccctttgcctcctgcctcctctcacactggttcccctttgccttctgccatgattgtaagcttcctcaagccatcaccagaagcagatgccagtactatgcttcatgtacagcctgcaaaaccatgggccaattaaacctcttttctttataaattacccagtctcaggtattcctttatagtaatggaaatggactaacagaaaactgaaactgaagggtagggcagtgctataaagatacccagctttggagctgggtaccagacagaggctgaaagtgtttggaggtctcagaagaagacaggaaggtgagggaaagcgtggaacatcttagagccttaagtggytgtgaccaaaatgctgacagaaatgtagacagtgaaggccaggctgatgaggtctcacatggaawtaaggaagttatcaggaactgtagtaaaggtcatccatactatgccctagcaaagaactctgctgcattgtgtccatgtcctaggcatctgtggaagttggaacttaagagtgatgacttagggtatctagtggaagaaatcattaagcaacaaaacatccaagatgtgctgtggctgcttctaacagcctatgatcagatagatgtgggagcaaaggaatgacttaaaaattgggacttatacttaaaaaggaaagcggagtctaaaagtttggaaaatgtgcagcctggccatgtggtagagaagaaaagcattttcaggagaggaattcaaccaggctgtacagcaacttgctagagaggttagcatggctaaaagagagccaagtgctaatagccaacacaatgagaaaaaggcttgaaggcatttcagaagtctttcagactgcctgtccgaccacaggcccagaggcctagaaggaaagaatagaaagtaggctgtcttccttatttttctcttttaattgggcactctttgttttgttgttgttgttttgtttttagtactcaactttctgagtgacttttaaactgaaatcagaaggaaaagaaggtagctaggtaacaagttgcagtcagatgaagagagtatttcagacagcagaaagagtttgcaggaagggaaagaacctaaagtaggaaagatcctgagaagttggaggaactaaaagaaaatcagtaaggcagaatttgacttcccattcccagcagattaaagttcacatgcttatcaagaaccttcacattctggcctcaacctatctttcctactcccctttatattacttttcttcatttgcaacccactcttgactaccccagattacttccattcctgcctaccacagatcacatatttcatacctctatgccattattcatgctgtttcttctgcctaaaatgttccttttttgaaatctttcagatcccatgaggcataatttatctctctgttctttgtaactccagagtactttgtttataactcttccactacatttctaagactgatttataattatgtacacacttgttttctccacaagattatgactataagccatgtcagttatttttatatctccttccctgatcttccaaacataaaatgcagtgcttagtaaatgtgtgytgatttaatatgttaatatgagtttttgtattaggttacagctrtatcatttttaactacatcatactagattattagtattaaattaaattacaaagaatgtgttccataacaataaatagcttgtaatcataaccaattttgtgtagaaaaccaataaggattatagttgagaagtaaaagtattccttcaagatcactgagagtaaaacagactaaggacagttcccttaaaaattactaagtcatgccctattgttaagttttcttgtcacagttaagaataatctgaagataaagaaaaacatgtttaccacttttaaaacagaagaagcataattacttaataaggtcttctgagtgataattattccmacattagtccagccagrtatgttcatagaaatgtgctaacctctttttccccgagtaccattcaatgaagaaccaatgtaaaaccagaggaagcaytgccataaatccaagatagagccaatcataaagttcaggagattctgtgcaaggctgacaatatttctgtgcattcgttctctgtcctcttgggcatacctataayatataaaaccaatattttgtgtacagatattattttacaacattaacacccccccaaatcattctataagacatcccatttcagtttaaatatttaagtttacatgtgcagcttttagaaataaaaaagagggcataagtaaaataaaaagaaatctatattgtatgtgctatatttgtacaatgctcttagaagattccttttactaagttactaaaatagttgactaacattcaatgaaaaacctagttattaacattatataagaataactgcagataaatgttctggattcatgatgttcaacttactgtacaagacacggtaccaaatcataaattagaaattattataaaattattaaatgttttaaaaaataatatagacatcaaaatgccaacatraacaatgmctatattaatgcctccatattcttttatatttccttattttattttttttttgagacagagtctccctctgttgcccacgctggaatgcagtggtgcaatcttggctcactgcaacctccacctcctaggttcaagcaattctcctgtctcagcctcccgagtagctgggactacaggcgcacacaactatgcccagctaatttttttctatttttagcagagatggggtttcaccatattggtcaggctggtctcgaactcctgacctcaagtgatctacccacctaggcttcccaaagtgctgggattacaggcatgagccactgcgcctggtcctccatattcttttataaattaatgagtataataacaaaaaatgttgtatgtgaaaatatttcaaaagcaaatagattttacaaaatgaaataagatacaaacataagacttaccccacattctccatatatttcagttgagccatttttaaataatagggtcttcccacaataaagtccaaggcatgctggttgaatatcgacagctttttaaaaacaaatgccagtatagtaacatcttttgtgattataaaaaawaattgcaataatagctgaagcatytggcaaaaataacagtttcaaatttttgaataatatgtattagacaaaagtcttgaagcatttttaaatttacatttctccttttacactgtgacactgcagacagttatcctggaaccttgctgttaataccgtgccttatgattaaggtcctcaaccagcagagcaggatctatctccaggactcaaagcctaacccggtatgattagaggatacttctgagtttaactgattataaagttcaaatatacatatatttttaaattagagcaccagtagagggtcaccaccttgtattttgcccagtcaggacattaagcacccacatgtagacacacaattatcattatcacctatgttcataacagaacacattttcacatgggaaaagcagagagaacataatytcataacagaggtatgcaaattacctttataaaaagtttcctacattgtcctagcttttatcatttttgtggaggataagtgaaaatttcatcaaggctgtcactgggccaatattttagaaaccactgcattaaaattaagcccctgatctaaaggcttaggggaaaagcagctattccttacttaaaaaaaccccaacaactaagaacctaatacgttgtctttgaccttattcacaagaaattatggaagttttcttcatcagtgacatctgattcccttcattcattcattgattaaaacaaacaaacaggctcggtgaggtggctcacgcctgtaatcccagcactttgggaggtcgaggtgggcagatcatgaggtcaggagttccagaccagcctggccaaaatggtgaaacyccgtctctactaaaaatacaaaaattagcctgacgtggtggcgcgcgcctgtagtcccagctactggggaggctgaggcaggagaatcgcttgaacccaggaggcagaggttgcagtgagccgagatcgcgccactgcactccagcctgggctacagaaggagactccgtctcaaaacaaactgcggtctacatgtgaattaatttgaaaaattatgcatcttttgactattcttgaacaatcatttcccaaattattcacgaattcacaatctagactgcctggtctacagtgccttctctcctttcacattcaagcagactttttacttccttctccttatgctgctgagagaaaaagagaaacagcattgaataatattcctccagtttaatattttcgcttttaacaaatttcggacttagctttttaaacccactggcctctttaatgggcgcttattttttttgtaaccaattgtaatcacaatgttctaaattaatacatgaaaatgaatatttcaggtttttcaagaatgcagaaggtaaggaattggaaacttctgtatgggctttacatctagtagatgcttaataaatacacgtgaatatcaataatctaaagtttctcaaaatccaaggcctgaaaaccagtatgataaactgaactgaaataaacagcctatcacttactaagcaaaacccaggctccaagcgactgttgaatttctcctttcatttcctttagcgaacgatggctaaagttttaagattccatttttttgcagcggtcctgccctttgtgacgggcgctataaatctacgtttgaggttgaagcagtagacaaattatgcagcaacttgcttctgctttactgttttttctgcactatcacccgcgttttcaattccgaagtcaaccctcaagcaagtgttccctcgacattaaactaagggactgaagagacatttcggaccaaacaacaaagacctggcatttcgccgcagacagcgcgcctcccctagtagcccgttgcggacagaccaccccaaccccgcaggagtgcggagcccggcccgagggcgggcggggtcaaggggcgagcctgcgccgccaaccgaaggccgcctacaaagagccgagcccgaggccagccgtgtaggaaagtagtcgggactaccagaaacgcttcccgggatcttggcgaccactcacccatgggccgcctgaaggtttttttcgagaagcactagatcagcggatctggcagctgcaccgaacatccgggccacagcgagctcggcggctccgcctcccggtaacccgggcgacagctccgaagttcctccctcgcttccgggtttaggctccgagaccccgccccccggacgtggctggttagcgtcccgccctcctcccgcggagtcagtgggtgagggtcgggcttgaagccatagctgcgggaccgtactcgtctcccccgacgcagaccatggagagcgcgctggcggtgccccggctgcccccgcatgatccagggacgccggtgctgtcggtggtggacatgcacacgggcggcgagcccttgcgtatcgtgctggcggggtgtccggaggtgtctgggcccaccctgctggccaagcggcgctacatgcgccagcaccttgaccacgtgcggcgacggctcatgttcgagccccgagggcaccgggacatgtacggggcggtcctagtcccgagcgagctgccggacgcgcatctgggcgtcctgttcctgcacaacgagggctacagctccatgtgcggccacgcagtgctggcgctgggccgcttcgctttggacttcgggcttgtgccggcgccccctgcgggcacccgcgaggcccgcgtcaatatccactgcccctgcgggctggtgaccgccttcgtggcatgcgaggacggccgcagccacggaccggtgcgcttccacagcgtcccggccttcgtgctggccacaggtaatgggcgggacctttccagcccagggcagagctgcaaccgggacgcgactaactacattaacggtttttctgggctggaactctggcaactaacctactccgcgaacccttgcaattaatagaaaggtaaatcactgccaacgtgtgtcagcagccttgcgtatttggtgcgtgtaatttcgattttccctgactcccatccgcctgtggttttgggagacccttgaggagcgaggaattgcgtgttaccctgactcagcgcctccctctgcactggtgaggcattcctagagatttcaccggtggataaagcaaggtacggtggggtcaaggaaagagcgaagaacagccaatgtaccagggttccaggctggctgagaatatgcttggtagacacagaatcacacttaataagttactaaacctggtctcctttcctcacctcccccacttctttgaagaattaaatgagaatgaatgaacaaagcagtttataaatcattaagatacgaatgttgcttttctttaagaacaggaacacacattgcctggtttcaaatcctgataaccccctaaagctgtgcaaccttaggcaaattacttaatctctctgtgcctgtgtttcttcttttccctcatagagtttttttgttaggattaaatgagagtatgcaagatactgtattcctggagatagattgcaaggtttatatgatcgctaaagttccctaggcctattgagccattaaaaggttttgctggattctctagtacagatccttgtacagcttatcatgtaaagcagggcatctctataaccataacccttacaggagggatgacctggcaagctggcatctggtttctcatcagactactacctcccaggagctgaattctatcagtaagaatgctttagtcattgtgactggaagtgagccaggagccagtttaccaggaatagagttatccttttcttaaaaatcttcaagccatgcaaatcatctgttagaaagttggaccttgattccccctgaagaactaggtttcagattagcctgattatgaatgataagtgatagaacaggcacttttagagcaaccttaggcagctgaaatccacgagttaacgaagaatgcctctggagaaattgatgccattttcccagagaatggtgtcacttccagactgggaggccacttgagggagacagaatttatgtttacgattccatttttaaaacctcaacagtttaactagcgtggctaccagaattccccctaggcaactccagcagcagagtagaaacactctagacttctgtaggaaatggcagctggcagcaggaacacaaactacatctcatttctgggtcagttagggcagggtcagtcaaccacttgacctcagtagttcctctcagtagttcctgagagcatcactgtatgacagtacaatgattagtgggcattaatggtcactgagttaagaaaatgaaatgctatattctctactttgaaaaatgcatacaaggcagacatagtgttcaaggtcactgccccacctctccccatctcagtgaccttgtgctagagagtccatgcctcagtatcacagtctgcaaaatgaggatgacaacagtacccacctcagagggttgctgagttcatctccaccccaccaggctaaaatgcaaactctttcttgttcacagtattctaagtgcctagaagagtagtcagtcaatgaatgtttgttgaatgagtaactaaataaatgaaatttggagaagaatatgctgattgacaaatgtaaacatctggtcctcttgagaaacctattgccactggaaattaaagttttggctttcgagtccctaatctgtgccaggaactccccatacgtggaattttcaaaacaactcttttaggagaaatagcagttacagtttgcacaagacaccaaagccacactaatggcagaactagggttggaaccctggcctatcatattgcttccctctcatccttaaaattttttgtagtttaaggagatatgtttcaattttctagaatagtgcttagtgtattttaaagcattttaaaatctgtcttgtccaactaaactccaagaaggggaaaagcctatgttttattccttgtacttctcgtatcttctacagtaatcggcacatagtaggtgctcactaaatcttgagcaaagtaaatcaaattgaaatttcagtgatatgcttgtatagaagaaaagaaaaacccttagattttggattgtgttctggatagaggttgtatattttagtagaaagggtttgggctttggagtcacctggtcctgggtttgaccccaagctctgccacttatttagtgggtaaaccagggaataatgtaaagatagtaagtaaaacagtacctacctctcagggctgtagtaattaaggcactaatgtaatgaattaaggggctagtgtatgtaaagacctgccacataggaagtactcatgggtgaaataaatatcttaatttttaatgttagtaatttagtgattaaaaaatgaaatagtcacagataattggtggacaagagtaactttaaaggaaatttggtccattttaaagaaaaggaaactgaaactcagtgaggtgtagcaccctacccaactgcccaccctaagaaaaccagacccaagattctagaaaggttgggccagggaaatgattgtaggctcagggatgacttctcctgaaccagcttcccaatttcatcctggtcccgggattggtggccaatgccccatttagttgttacaatcaagggaagagggcaggcagactgaaccctgggaccgtcacctgtgtctcctggtaagtgctgatcttcaccctcactttagctttccaccttccagcagtccctcatttctatcaacttgcccattctcttttcattaaacttgcttttcatgttgcgccagcatcaagataaagacatttttgattcagttttgttgttacaatccacagcatgttttactcttttgattataaacttgctctgttttaacacatcatgggttaaaagggcttctgtggactagtgtggactaatagcatactgatagccttctgtggactgatagcatactgatatctttgtatgaccttgtatgaaaactcaggaacacaagatatattttctttcccaaaacttaatttctgaagctgaaactctactctgtccttttggttcacttagcctcatcactccatgtgttgtcccctttcctgatatgtgtgagcaaaggtttcttaaaagtgctgtggccttggagaggatggcacttcagtcctcagcttacacagttaaccagcaaagtggagcaggagcattggctgccccaccctacctggtccttgccctctgcactgcctccccatcctctgtttcttcactcctgctcctgtggtgccctgggggaagttaacacacgtcctctctgcactaaggaccttcagcctccactcttctcaagggagaaaaaatttatctctaggagaaatatttctcccttcaggacactcctttgccaacagatgtctttcccctgagagcttaggcttccctaaaataaaaacatgaaagacaagctttctcccctgccataggcttccctaaaaggcagtgatcaccaagctagcttaaattagggaagaggaaaatttgagaaggggcgaaataaacatcacccagccccctttctttggaaatacagattcaagatttcaaactactgaccttcaggtgaaactttggggatgttgagacttaaaatgctcaaataaaaaccctggtgcaaaatgatgctgtagcagtcaatgattctacaatggcatttttctgtgtttgcctgcaggataccttaaggagatgaaaacatgtagataagtgtatataatttatatagaaaaatcttttattaaaatttatgttttgacattacggctgaagaaaattgatttgtaaataggatccaagaccctcactgttttaaaccatctctcatagtacaagtggggaatagacattttccttcttagtgttcacagggatgcccttgggtttccctctctcggcctcaggggtgtttcctagaaaag

SEQ ID NO: 96601 - DNA, 46651 bp, Homo sapiens
aaccaaaatccaaactatacaacttaattcatgactaattcaatcacagtttgtaacaaaaggaacagaacatttttaccttcaaattcagtgtaaacaataatttatcacatttaaaagaaggctgccaataagcagaactcagcaatttcttgacttaattgacaagcctaggaattctaaaaagtcattaaaaattttaaaacctgtaaaaattattttatctatttcaatccatattcatttcattcagaatattctttttgacaatcagtggaattcattacatactaaaaataacaccatatttatgcacaaataaattaatttttccagtaagagctaatcttcctttaagaagacttcccacatattcacaatacataatatcacagaacacccatatttggcctaaatgcctctgaattgtagcattacaagatggaagttcattgtgcctaataatttgattgagttttgtccaaatgtcttccagagtttggctgttacaaatagtgtgttctattgtccatcttgctctataaagtgagtgtaaatttagtgcctttaaactatcttgcaattttttagacaaaggagaaacgtttttagtacaattattgctgggaagggaaatactccaagatctcctcttgtgctgttttcccttttctgattgtttacccagatttccagaattagtctgttccttcagtgtgtgtgaccaggttaaatgctgctttttcaagctaggttgaaactccaatagatctactgtgcaatcataactgtgtgacttagcatcatgttctgaaatggttaagtactgtttcacatcttcagctgcctcttcagaaatcacaggtggtgatcttttaggtctgagtggaagcttggacccatcatatggaaaccaaggtataaatcttgatagcggacgagtaggaaagtcttgaattgctttttctgcaatttttggcagttgtgtgggatcactctcacatggtcgataatgtaatattacttctgtagtcattctgcagtaatccagttactcttagtgatgagaaaatttcttagttgaactcctcagagctagaatgttaatttattattgcaagattgtctctcttgccaaatcagagggaaacaggacctaaagtagaagtattgcaaagaataagatatggtagggataccctgcctaccaacaggcagggagaaaaggaaaaacaaaaaccaaaaaccaatcccaatgtggtattttaccaaagtgctattggtaaatgtgaatgtaatctacaaacctgaaaattctttctcttaccaaaataagggatctgaactagatgccctataaaatcacttcctgcctaaaaatgctagtagtcaacatgtttaactcaatagatataaaggacttggaagtatcgatattaatatattaagtaataatagtcttaaaactttagcagaaacaaagagtaaatgaatgattcttaaaatattgttttcatatgaattaacaaaaaatgtaatatttaaaaatttgaggcaactaaattgaggacaatgaaatcactgtaaattctaatccaacatggtgaaaacccatctctactcaaaatacaaaaaaaaattagctgggtgtggtggcgcatgcctgtagtcccagctactagggaagctgaggcaggagaatagcttgaacctgggagccagaggttgcagtgagccaagatcatgccactcagcctgggcgatagagcaagacttcatctcattaaaaaaaaaaaaaattctaatctgtctggaagaaaattaatcattttatacttaaaattatgtagatttgccaggtgcggtggctcatgcctgtaatcccagaactttatgggggccaaggcgggcagatcacgaggtcaggagcttgagaccagcctggccaacatggtgaaactccggctctactaaagatacaaaaaatagccggctgtggtggcgtgtgcctgtaatcccagctactcaggaggctgagggaggagaatcgcttgaacccgggaggttgaggtttgcagtgaactgagatcgcgccatcgtactcccattgcactccagcctgggtgacagggcaagactccgtctcaaaaaaaaaaaaaaaattatatggattccaccaaacaaatatatagatagaatatttgatgatttcacgtcattctctgtagtaaaaactaaaaccattaatatggtttaactttgctaatatggtttaaccaggctaagaaccagttttgtgacactgtcttctcctcataatccaggcaattaaacagtatggagaccccaataccatggcttttgaattccagtttggaagagaacaagaagtctagactcctatttttttctcttagagcacagaagtcctcaagttgccccaaattaagtcactgataataaattccagcatatggtgcataggctcaagaatggagccttccaatatctgcaagttaggcttgctaatcaggcccaaagctgtaagagccataaaacagactttttcacatcctaacaacagcagaaaaaaataagttgaatcccttctccccaaaaatcattagagaattacttgatgagggttctcccactgctaggataaccatgagtatggattcttgtcatcatttcacaatagaatcactgtctgattctgaagagttagaagaaataatttcattatttttacctactgatactgcccactaacagatctgacaactctcaaattcataaataattgtgatctttaacatccatattttaaatatggatctaaatgttatcatatatactttcaagaactaatgatgcactaatgtttttcttccctgttccttatactttcacattgtaaaatatggcactgagaaattctcttgttgtctaaagtcaatcagtgttatactcaagggatgactttttttttttttttgagacagagtctttgttgcccaggttagagtgcagtggcacaatcttggcttacagcaaccttcgcctcccagggtcaagtgattcttgtgcctcagcctcctgagtagctgggaccactggtgcacaccatcacgcctggctaatttttgtattttcagtagagacggggtttcataatgttggctaggctggtctcgaactcctgatctcaagtgatcagccacctcacccaaccaagaataacaagatattatctttaacattttacatattaaaagataaagtgaacttaaatgaccacttaaattaatacatttggcattcagcatcagcacattgaaatgtgtgaaaattgttgattaactagaacaatgggttaactataagatggtactaaagaggtttaataaagttgaaactatcagtcaattttgaagcacttgtccgtttaggctgcttattgttcttttttttttttttttttttttttttgagacagggtctcactctgtcacccaggctggagtgcagtggcgcaatctcagctcactgcagcctctgcctcccaggttcaagcggttctcctgcctcagtctcccgagtagctgggattacaccaccacacctggctaatttttgtatttttggtatagacgggttttcgccatgttggccaggctggtgtcaactcctgatctcaagtgatctgccagcctcggcctcccaaagtgctattacaggcgtgagccaccacgcctggcttaggctgcttaaatattctttcttaggtatccttggttttggaaaaaaaagaataacagaaaactaaaaattcccagtggcagtctctgtatcactggaatttaactttttgtttgtttgttttttgagatggagtctcgctctgttgcctaggatggcgtgcagtggcgtgatctcggatcactgcaagctccgcctcccgggttcacgccattctcctgcctcagcctcctgagtaactgggactacaggcgcccgccaccacgcctggctaactttttgtatttttatagagacggggtttcactatgttagccaggatggtcttgatctcttgacctcgtgatcacccgccttggcctcccaaactgctgggattacaggggtgagccaccacgcgcggctgcaatttaactgtttttaatagcttctaatttgtataaatcacacgtagcagttaatagaactgttccaaattcccatcggagtagctggtagaggaattatctctgagaatgctgcttcattctttaggaggcaacacggactcttggaaagagaggcaggccttgcgttgaaacactgcctcaatcactagctatgtgatcttggaaaagttacttaaactctgagaattaatatttactccacatacttgaagtgagattgtgagataaagaacacgacaattagttgcttttcttcttttccctcttctccacgagtaacaatccattttaatctccattttagtctagatcatttctcaggttaagcttacaggtcccatcactgtatcactaaacattacaaagttccacagtaagagacaatctcgctaacacaggcatcattatatgagactgatgagcttctagaaagtctgatgactacatcataatgggaaggataaggcgttcctcaaaatggatgccgtaagtaaagtaagcgcaattcaattgaacccgaatgtttattgagcatttcctcagctcattcaagaagtcattgttaaccatatattaaggcatccaagaaacaaaaagcgcatttgttgtagtaaaaaacaaataaaataaagctgaaaagatttcaaataaaaggtttccagaaaataggcattaaaaaaattgtcctaaaaaaaaaagtgctgctgttttttcctaaataatgatctaattaaatcaccaaacttactcaaaatggctgtgtacaaaaaatgagagttgacattagatctcggacatatttcccacatacacagtgatttgaagtaaactgcagtttgttttgaataaatctaagttatatgttgtattactatgtattgctaaattctctgcactactgtcatgcaatactaattttacaggggaagctgaagcctgattaacttcgtcagtgccacaggaagaaacaagagacagaaggaaaaagcactttggatgcccgctgtaattcacagagatctccacggtaggagcgggacgtcagcttctgcggctaaaatctcgtgactgaagcagcacagatcagaaagaacgatttaccaggtatctatttcgttctagaaaggggcccataaacctaaaaagcatccaggagaaatcgcttcctcccgcttggcggcaaaggacagagcaggagggcgagcactgagtgtttaagaaggatgaggcctacatggcaaaggcttcgataagtagggaatgcaaggaaacagaaaagggggaatcaggttcgcaaaagtttaccttttagcgccagcaggtgctcctgtttagggggattcacttccattttgaccggcacttttgacccacagcctacgggggctggacaggttcaacttgccccggaaggaaacggaaaacctcgcgtttgacaaaaccaaaagtcaaacgcactctcaacctctctctggtggtggtaccttaaattctcctactgtgtcctttacaaactggcttcttttcaacaagtccatttcttctatcttagaaacgtaggcataaaatactttgttttccatctgcaatcacacatcgcgactgcaggaaaagaaaccacccctaggtaacaatacgcggcctcccaaaggccaacgttgccggagttttttttttttaaaaaaaaaaaaaaaaaaagagagagagagagtggcatgctgggatttgtagtttatacaaaaaccgcgttgcatgcagggagatgcccgtaccccctcaccgccctcagttcacgccctggctggtttgcgattcgagaggaaaaatcattaaaggatctggagttttcaccccaaaactttaatcgttttgtcccttctttttttttcttgtctttcctccagcagctgcagactacataatgaaaaataacaaaagtgcccatgcgcgaggctgtgcaactaaccacccgacgattgcggggaggaggagtaagagtcggctragcggcgcccagtgtcctactgcgcctgtgcgccggtggcgtgcgcagaggcctctgggtaggtggctcaaccccgcctctcagttgaggactctgaaggctgtttctgtggcgcttcccctgcgaggatggctaccctggttgtaaacaagctcggagcgggagtagacagtggccggcagggcagccgggggacagctgtagtgaaggtgagggaccttgcgtgctctattctccaycatcggcctcccttcggttcatcctggagacctggcggcatcgccgcggcccaggcttcgataggtgggatgcgcggcctctgggccccttttggcattacaagtctcgtcctstcctctgcatcctttctctcctatggcctgaaattgcctggtcttctgctcatgacatgtcatcatcgggacatttgtgaaaaggagcttgcgggccagtggcagtgacctagaccggtcttttctccaggtcctctgcttttagttaaactcaacagacattaattagcttagtattataaattgagtcatcatcatcgtaactacgtactaagttaggtgttttagctcgttaatatctacttatgaagtagatgtkaattcccattttacagggaggaaacccaggtttaggtaaacagtgtgtggcagagccccgggttgaccggctttaaagtctgtacttttcgctcttgtactgcgtctgtaatcagacatctgttattgggtgagctgccccctcccctgttagtagtacagtctattractctttgcacaagtctgcagcatcgtcatagctgggcattaacgatagagtttatgaattttcttatgcttgaagtttgagattctaccatgtatacatgctccagaatcaatttgctaaaaaatcatttgaaatatgtggcactcatttttcccttccactgttgtgcacggaaagatatggaggggagaactgatcccattggtttatagagtaaccttcaggagcatctctaatctaagagattgataattctcattcctggctacatattaggatcactgaggagttttagtacactactgatgcactcctcctccagttctgatgaggttgacatcagtatattttaggaattaccagaagytattttaatgtgcaaccagggttatgaattactgatcaaggtaatatatgaagtttttttcacatcttgaaaagtagacacctatgattattcaggtaatgttggttttatatgacagcaaatgagacatttcttcccacaatttagtatcagtgaatattggtggttgttgattcagatgacctttaggtactaatgaagttattctacaggtacacggcatatctgatatgcaaaggagccctcattattaggcatgttgtgtgactgagattttatttattgaattgtgcttttgctaagtagagaatacttgaagagcagtttgtgaattaacttgaagtttaagttttatttcataattggaatgggtatcattgcagtatctatttttttgttaccctgtttgccttacagtctcaaaagtgtaccaaagcctgatgtaactccagtttcttacagcacagaatttgatacattggaggctcaccttgttcattttcatcttaacatgtaaaatattcctgaactgtgcaatgaaatagtcctttctgacaaaatcttcatgccataatttgtagtaggtatagtagcataaactaaaaaaatctcactgtcatttctatagatgaaagcaagaagtatttattggaaggtaaaagttgaagtatataatgctaatactgtgtaaaatggccttttgcttgtgaacaagttgataatgacatggcttttatcattagagaaaacagtaacataaaaatctgatattgtggctaggcgcggtggcacacgcctgtaaagcacaaagtgcctgggaagcactttgggaggccaaagtgggcggatcacttgaggtcaggagtttgagactagcctggccaacatggcgaaaccccgtctctactaataatacaaaacgtagccaggcattgtggtgtgggcctgttaatcccagttactcaggaggctgaggtaggagaatcacttgaacccaggaggcggaggttgcagtgagctgagtttgtgccactgcattccagcctgggtgacagagtgagactccatctgaaaaataaaagataaaaaatctgatattgtgaaataactgacatttaaaaatgtatcacagaaagtttcacacctttaatctcagcactttgggaggctgaggtgggaggattgcttgagccccagagtttgagaccagcctgggcaacatggtgagatcctatctctacaaataataataaaaaaaaattagccaggcgtagtggcacatgcctgtggtaccagctacttgggagtctgaggcaggaggattgtctgagcttgggaggtcaaggctgcagtgaaccatgctcaggccactactctccagcctggctgacagagtgagaccctttctcaaaaaaaaaataataataataataaataacaayataaaataaaatatctgattgattacagtttgatttacaagtaataagtttgaagcttttttggcattttttgaagtgtaaaattaagagctttttcctatctagggttttttgctgttaaccacaattcctatttatagatactgaggaaatattttcttkctgtattatttaccgagttgatgcaaaatagtctagtaactttatttttggacctgtgtttggtttgctaatcaatggaattttattagtgctttttgaaaaatacattaacagcataaggaagttcttttaaatctttgtatagtgatgggatcagagatacaggattgaaatgaactaaacaattttaatatggttctttggagtttattgtcataaatttamtttattagagtatcataatayagcatttataaaatgttgcatttattttatatcaaattctattgtgaatttttgagacagagcctcactytgtcgcccaggctggagggcagtggcacaatcttggctcactgcaagctccgcctcttaggttcataccattctcctgcctcagcctcccgagtagctgggactacaggtgcccgccaccgcgcctggctaattttttgtatttttggtagagatgggatttcaccaygttagccaggatggtctcaatctcctgacctcgtgatctgcccgccttggcctcccaaagtgctgagattacaggcgtgagccaccgcacccagcctatgaatattttttctatatttaattgaattttttttttttgaggcagkttctcactctgtcacccaggtgggagtgcaatggcacgatcatggctcatagcaacctcgacctcctgggctcaaatgatcctcccacctcagtttttgatttttttttgtagagacagggtctcgctgtgttgcccaggctggtcttgaactcctggcctcaagcagtcctcttgccttggtgtcccaaagtgctgtgattacaggygtgagccacagtgcctggcctaaagaatttgataacgtgaaactttcccctttttaaaaaatgtaggataaattgaagtatgtgtatatatgaataatagacagaattatacgtggatagctgttccccagttgtttgcctttttcatggggaaccagtgttccaatgttactggtgtcctatgtatccttccaggaagacaatacgcttatacaacaatacaaaaaaaaatttgctctttccccacctttatgcaaaaatgaatatattctattatttttctttttgttttaatcatatgaaatcattctgtgtatatatgaaaaacttcatctttctcactatcctatatagttttatagtattatgaatgtgccacaatttattttccaagctgatattgatgtatatttactttctttccaattttttgctaatgcaaatgatgctttaaggagtaacatacagattttgtcacacgtgtctagtatgcttgtaggataaattcctgcaactagaattactgagttatttaaatttggtaagtattgwcaagttgccctccatagaagctgtattgctcaataaacatttcatagcaattagtaatgtatgagagtgtctgctttcccacaycttcactaacaaaatgttaccaacatttttgatctaatctgaaaaaagtattttgatgtagctttaatttgcatttttctttctttatttttttgagaccgagtgtcaytctgtcacctaggctggagtgcggtggcgtgatcttggctcactgcaacctccgcctcccaggctcaagcaattatcctgcctcagcctcctgagtaaactgggcttacaggcgcccaccactatgcctggctaatttttttgtatttttagtagagatgggatttcaccatgttgtccaggctggtctcgaactcctgacctcagatgatccactcgcctcggcctcccaaagtgttgggattacaggcatgaaccaccatgcctagctttartttgcatttttcttattatgagttagattgaacatcttttcacgtaaagaattttcatcttcttttctctgaacaatgttatgtttcttatttttattcatttttatcttcccaaacccttatttacattgaaggactaaatttaaatttcttttgaaccatgataagatgcaaagcaattatgaattatcactgtatggtgaaagatatttgcatctcaagcactaagtccaagttaattgtagagttaggtttaaaatcatagtagatttagtctgatttctgccttgggttttctgttttttacctcgtgttgtgtgtttgatgatggtgagcttaattgtttttaaattattttactggactttatgtaagcagtaggtacttggtatttaaaatacccagttcctgagggttctttggtccaacagggaaagacgggctaaaagaccaaggtattaaagtgttttgggtgttacggtagacgcttatacagagtacatcggggcccaaaggacaagtatagtcctttcctcagtgttagcatgaagagacatgaaacagtttctcatgttctgagaactataagctgttggatatagttggagcatagggtcagaagagtatggcagtgaagcaataggacagggaccagattgtagcaggtcttgaatgacaggagtttgaggtatgattgaatagtacagtgtgggtatttttaaaaaattaatgcaaggtatgaaacactacaaatatacttagaaataagtgctgaaaatgctttattgctataaatacaatttgttgactatttgtaaaacataaacttatggacttgagaatcagaatatgctgataaatggcctttcttttgactgactgtgtagccttgtgcaagtcatgtgtctgtaactagagctagaaagacaaactagtttctaattcagagctatatttattgatagagaacaggaattgaaatttaagatgattgctttttttgcctttgtattatttaatgtacattagatagtagaagatacttgaaagttacttgcagtcttttcttaacaagttctttatcatttgcaggggtaattgttatctcagtacatattttagattatttttgttgaaattaatgatagtttatttgtgttgaaattaatgatgggttaggtagttgcagagaaattgcttaagaacccaccttcagtagaattacatattgtttgtacagattcagatgtaatgactgaaatcataattttcaaaagataacaaagatgttaatttacagcatctttgccccaacacttagtatttcaaagatatttcattatgatataattttgacagggtcggtcaaatggaatgacttaaaagtgattcaagattttacaacctacatagtttttttttcatagaggaataaagtaacaatgttgattcaatatattaggtgaattttcttatatacctaaaatatgtatgcttttaaaattgtttaaagagcacatccttccttttcaaatattaggtgctagagtgtggagtttgtgaagatgtcttttctttgcaaggagacaaagttccccgtcttttgctttgtggccataccgtctgtcatgactgtctcactcgcctacctcttcatggaagagcaatccgttgcccatttgatcgacaagtaacagacctaggtaggaaaagtatttgtatggatttaagattgaaaattgttcatgtaatgcaaatgtcataggaaacaatgtccttccrcttgatttttagaatgataaaattcccagaaagtttcagaaagcctaagtttctattaaggtcaataatcttcaagctataaactatctcactcttagttactaattttattttatcttctgagatgtttatattcaatacttatctgtaaagagctttaagacacctgagaaaaacgtgctaccctgattcaaataaataagaatgtgtatcacagagtgaatcatttgcctgaagccataaacccaatagaacaatgttttctttacaaataaataagccaataatgaaaatacagataagtcatttgagtctcaccatgtttttatttactaatatcaaggacagaagkgtttgtagcttgtgataattactctttattttctgttaaaatgagtttgaagggtttgtggcttttttttgcagttttctgtatacttttaaaacttttctttacgtatttcaaactaagttattttcagataccagatttggaaataatagcatttactaacatttgaacagttattttacaaacgtaagttctgtaagtttactctttttgataagggagttttctccaaaagagtttaaggttgccattttttttccaggtcagttgcactatctaagacagttttaatatattcatactatttttcaagtggaacacattcaaaataatttatccaccaaaaaaggaagcaagagtacctataattttaggctggaagactttgaaatgctaagaaacatggttttaaaatattttctggagaaagaaaaggatttttaaggttttggtgatytttgatgtatataaatagtctatttgcctgacaactaatagacagtaataacattatagatagcattaacttaccagtagccaagaaataatagggattgggaaagtctctgtacttttatttggtcttttattatgtgaaatatgcatatatcrtactatttctttatataaaactatacttaggccaggtgaggtggctcatacctgtaatccagaactttgcaaggctaagatgggtggatcacctgaagtcaggagttcaaggccagcctggccaaaatggtgagaccccttttcttctaaaaatgtaaaaattagctaggcatggtggtggatgcctgtaatcccagctacttgggaggctgaggcaggagaatcgcttgagcctgggagatggaggttgcagtgagcctagatcacgccattgccctccagcctgggcaacaagagcaaaacttggtctcagacaaacaaacaaaaaaactatgcttaaagaaatagtaatgtttttcaaatagagaatagaacctttcttctacttttttttttttttttttttttaaagcagagtgttactccgtcacccaggctggagtgctgtggcgcgatctcagctcactgcagccttcacctctggggttcaagcgattctcctgcctcagcctcctgagtagctgggattacaggcacctgccaccacgcctgactaatttgtgtatttttagtagagatggggtttcaccatgttggcctggctggtctcgaactcctgacctcaagtgatccacctcagcctcccaaagtgctgggattacaggcatgagccaccacacctggctcttctacctttttgaagagcactttaccttctctacattaataccacaatgtgaagagttactatcctcaatgtttaacaaaactagaaatttatgacagggaactagactgaatacatccatcctcctctctgacttctctgaatcctgaatcagaatttctctctagtccaagaagaatatgagtagttattaataccattcagcaatattcctgattttcttctgctcatatggtgaaattacacttccttgccctcttacgcatcactgtgtgatgttcattgatcagtgaaatgtaagcagaagtgaagtgttagcatccaggtagaagttaataagagaaggtttatgattttcaaagtaaattcttctccttgctgcagtgaggtggtccagatggttggaggctcggtaggctgtgtccctgtttgtggtcagtggggaacagagtctctcttgtcttccctaatccctgagatgttgcatgatgcaaaaaataaatctttgttgtgttaagccattgagattatagagttgttttgacacagaattaagtgatataaatattaggcactacctagtaataatgctagaggtttatttgtatatattcattatatagtgactggatatttagaaaattgtcaagactatatttttaaatgatcacttagtgtacttcttaacctttatgtaaatagatagaactcagcttgttgtagaatatgtgttaaaaattaaggagaaagccttctaggggcaaggctgaggatagatatgttcagtccagtttttttgggagaaccacaacacagaatggctttttttttttttaagagccaggaggaaggggggccctgcaggcaatgactccatcaaccttttatatatttattcatttaatgaatatgtattaggtggcagctatatcagatgttatttgttgcataggagtttaccataacaaatattccttctgctaaaggatctgacttttattcataggttcaggaagagtgtgtatgttgtcctgggttacaatgttatatgtatttcttaaggtaggttgctgcaaaaagtatttgaaaatgcttgttttagcatgtatagtaaaagtcaatgacaaaataggacttgtaaaattaaatgatagagaaataggctgggcacggtggctcacacctgtaatcccagcactttgggaggctgaggcagtcagatcactttaggccaggagttttgagaccggcctgaccagcatggcgaaaccccatctctaccaaaatatacaaaaaaatcagctgggcatagtggcacacacctgtagtcccagccacttgggaggctggggcacgaggatcacttgaacccggaaggtggagattgcaatgagcagagatcacgctactgcacaccagccygggcaacatagcaagactctgtctcaaaaaaaaagtaaaagagatttaaataatttttttaaactgtggcaaaatatatgtataacataaaatttgccgttttaaccatttctaagtttagggacattaagtacattcatattgttgtgcagcctttaccaccataatttttttwatgtgtatttagattttttttttttttttttgagatagagtcttgctctgtcatccagattggagtgcagtggtgtgatcttggctcactgcaacctccacctcccgggttcaagcaattctcgtccctcagcctcctgagtggctgggattatgggcgcctgacgccacacctggctaatttttgtrtttttagtagagacgggatttcaccatgttgactgggctggtcttgaactcctggccttaagtgatctgtccgcctcagcctcccaaactgctgggattacaggcgtgggccaaagcacctggccaaaaaataataaattttaaagtgtgtttctacttggaaggctgaaggattcttctgttttttaagagagcattaacaaagcaattattttggtattaaaaatggggaaaatttgaattttaaaaatttagacattaactactgaactatattagaaattacttttgaggtatgggtaaaatgattaatagtccattttgttagatttagtttttgtttttatatttattctaggtgattcaggtgtctggggattgaaaaaaaattttgctttattggagcttttggaacgactgcagaatgggcctattggtcagtatggagctgcagaagaatccattgggatatctggagaggtattgatcatacttggtgaaatatttgttacgagcatgaatttttcttttaatagatgccattattagcacaatattacttcatttatttcagcaggtaaatttctagaaacacaacttttcattacattacagttctgaaggccaacactattcccaagagaaaaaactagaattatttgaaaatcctatgcctaaactatgctttatgtgtgaacttttttttccttatcataattcagttctaccaagaataaagtgaaaagaggaagaagattatggaatagtaagaaagatatgtaagcaacagtagagaagaggatgcaaaagtagtcaacagtaaaactcaatgagagaaagaaaaactcgatgtaagaggccatttaatacagaggggaaaatgccttaaagatagcagtaacttctgagggaattgttactgttatagcttcaagaaaaggttaaactttgtatagatgtactgtctttatccatacaggtagatgtctagtaaatatcagaatccatgaacactggattttaataatgtaaaagtatatttttagcacttatgtgtttgcatagctgcacatatgtactataggacatggctttcgtaggctgttatgggtaaaaatatatttggagtaaatatcagttaatgattttggtgatcaacttgcaaaccacatattttgtatgaaggaaaaaaaatgtcggattgctttcacttctctttcattagatgatgatttctttatactaaagtgaatcagtgaaatgaatttcmaactgcaacactctgttttctaaaagttatgcagttctttctgtgctaaatctttaatctttatttcaaaagacattactgttagctaatgttgacattatagtttataatttatttatttgtcaggtctgggaaacagaagacctgaatttttatggtacatgtgtttatttctcataattgcaaacaaaactcttccactttggattcattttttatttaatgtgataaagaatgacaccattgatgtatttaaacatttttatttttgaaaaaatttatactaaatttctccccttccaattatggccttttaatattgagtaaaagtgttcaaaacattcttgattatctgacatgtaattttttatctacttgaaataaaagtaattatttcataattagttattttttgtaattcctgaaaactagaaataatatttacatgcttacatataggttttatttatttgtttattgttattttttaagacagagtctcactctgtcacccttgctggagtgcagtggcgtgatctcagttccctgcagcctccacttcctggcttcaagtgattctcgtgcctcagctacctgagtagctggtattagaggcatgtaccaccacacctgactaatttttggatgtttagtagagatggactttccccatgttggccaggctggtctcttactcctggcctcaagtgatcacctgcctcagccttcttaaagtgctgggattacagatgttagccactgagcctggcctatttttttttttatttgcttaaatcagtggttttctgccgtgattgtgcaatagactcacctgtggagctattaaaataacatggcgtataattagaaaaatatatacaagtctagggttcatccacaacctgttgaaataagaatttctcttccagacagctatgtttttaaaagcttacagctaattctgatgcatactcctacattttctaaatagcatttgtgcttctgtccttcctatacatcatcmtgacaactaatatttaaagctatggggatgtatttaatatcagatttttgtagttttacagaaagacttttgacttctctatggtttagtttcttttgtgtaaagtgaggggatttggtggaagagatctttgcaccgaatatgaatctatgagaatagttctatttttggcttcaaattcataacatatattggccagttaatcttggaaatagcttcttacccstagaaatgaatgcttctcagatgagtattgaatgacctttgttcttaatgaccaatatattttcatatgtaratattgttcagttaagcaaaaaggattatggattctatatttaaaaattcgtcatgttatactgattgggttcaattttaaggcattaattttttgtttatcagagcatcattcgttgtgatgaagatgaagctcaccttgcctctgtatattgcactgtgtgtgcaactcatttgtgctctgagtgttctcaagttactcattctacaaagacattagcaaagcacaggcgagttcctctagctgataaacctcatgagaaaactatgtgctctcagcaccaggtgcatgccattgagtttgtttgcttggaagaaggttgtcaaactagcccactcatgtgctgtgtctgcaaagaatatggaaaacaccagggtcacaaggtatgaatttaattattaatcagttggatcactgtagctactttaccagctcagtattcgttttcactgacctggttctttattctgaaagtagggattgaagaagagttaagtgatgagtgattgggtttggtagcatgaaaataaatgagagatttaatttctgaatgttataaaaaaaaaaaaacttcaaagaggcatcatgattcttcacaaaaaaatagctttcgagcaggaaacaaacattctgtttgcttgcatgttttcataatgcaccagattgttttgacaatatttatgtctgttagctcttacttaggatatgattttagagatagtctcttggttttttgtttagcaataaayggacttccaaattttaaattacttctttgcagtacagttttcttataaaggagtgaaagtaaattagtatttttctgtgtcataaaagtcacttgtggctgatgcttttttgtattaatagggatttaaatagttttttatattattagtcaatactatgagttcttttctctaattatggtacattttatagcattcagtattggaaccagaagctaatcagatccgagcatcaattttagatatggctcactgcatacggaccttcacagaggaaatctcagattattccagaaaattagttggaattgtgcagcacattgaaggaggagaacaaatcgtggaagatggaattggaatggctcacacagaacatgtatggattttttttcttcttcactttctcattcttttttatttttcatattttcaccttctactaagtawttaatgggcaattacaatttgccagtattgcaccaatcattagaaagttttttaaaagtccctgtctttcaggaactcattcatcatggaaaagagagagtttgaaatatggtaactattttatggaggagaagtacagggtgctttggcatcacaaaacagggacaatgatttatggaggtcagagaagtccttatagaagaaatggtgtttaaactgagatttgaagaatttcagtcagggaaaagagcagaacggggaatgagttgtcccaagaagggaacaatatgttaaaatgtttgtaagtgaggattgtacatattgtagagacttaaagaagctcactgtagttagagctttaagtattgaatgggacatgacaagaaaagaggatatggagagttcaaagccaaatcatgcaggatcttgtcagccatgttaaagagttcagaacttagtttaaggacagtgatgagccattgaagaattgacttaggaatgatatratcagattttcctcaagaaaggttgttttaaatgtagaaaatgaattggaggrgcaacaaaattggaagcaggcagacctattaggatgttgttaaagttttctagttaaaatactagagatgtttatggcctataatacactagggtagtgagagtggacacaagtcaatggatttgagattttaaataagtagaatagataggtcttagtgattaattgttaatattgattggataggtaacttagaggtgatgaggcatgatcagattttgggtgtattttgaagtcagcagaatttgctgagggactagtgggctatgaaagagagstgataatgatgactccggttgtttttgcttcaacatcctgaaggatggagttgccatttaccaagacagaggcaattaggtttgggaataggggagactggagattaggcattccattttgcttgagatgtcatttataaacagttgaatttccaatgtctgtgcattaggggaaagatctagcatggagatttatattttggaatttaatatagatggtatttaaacaatgtctygctyggtcacccaggctggcatgcagtgttgtgatcaccactcactgcagccttgacttctggggctcaatcaatcctcccgcctcagcctcctgagtagctgggactacaggcacatgccaccacggctggctaattttttccattttttgtagagacagagttttgccatgttgcctaggctgaaattttaaatatttcacaggtaaaatctttattaacattacagttgcttaaaatttattttcattttcttaggtaccagggactgcagagaatgcccggtcatgtattcgagcttatttttatgatctacatgaaactctgtgtcgtcaagaagaaatggctctaagtgttgttgatgctcatgttcgtgaaaaattgatttggctcaggcagcaacaagaagatatgactattttgttgtcagaggtttctgcagcctgcctccactgtgaaaagactttgcagcaggtaggtagtttaaatgtggttagggacttagttgtaagtttaagtagataattaccagaggtatacattagtgtgttttattaatattttgtgtctgctgtatgcagtaactttgtgcttaggaaatggtctgcaaccttgaattatttcactagtatggaattatcagtgtcgttcacgtgcctttcccaccataagccatgggttcttgaggccttctaacttcttgccattcttcagttatgccmaatccttttactcttctttgccaagcatatatgtagttttttttttttttctgcttggagtgcatatatctctcttttctaatagtggaaatcttccttctccttcaaggtccagcttaaatatttgcctttctttgaagctttctatttgttggtctttttttgagtgcctctctaccatgtactgcctacssctgctataattcagtggttcttcactgttagagcaaacgtatgttttgtgatggttgagataccataagaaatttgttacccagtttgcagatgacttacttttttaaataaatgagattcagttattctaacacaaatgtcagctttacccatttgtgttttggatctgttttcataagtgtgaggtataagaataactattgccctaggaatttcagaaaagctgcagtctgtgttatcttcactgatatattgctaataattgtgttgatttcaaatcattgtaggctaagccttktaccattgtagagctttttctcttaaatatgtgattacacttacatgagagtggccagtctatagcctcatyagtcttgggttatcatttagtccttaccacactgaattgtaacagttgatatgtatgctatttattaagttgattttcagctccaaacctactcttctatcctctawtttgtgatactagggctagaactctacagacctcataattgtgttgccagctgggcccatgttaggtactgtcaagagggggcatagttactcatgtgaggagaccacccttctcggaggtttgagtttcagctccatgagccactcctgcaagtttctaagttttaataattctaacttcttccttttattcctttagcactggaagtggtagctatgttatttcatacmattgctacctccttaatacctcagagttccttttaaccttttagctacctagttaataactacacctagttaacagtttttattttaagttctttctattcaagtaatggtgtgatttgtgtcttccgatttgaccttgaatgacacaatatgcctatgtgttttagatgctgaccttgttcatctttgatgcatcttgttcatctttgtgtcactaaattctttgcatctagatagaaagagcttaataaatacatgtttaactcatggcggataatgaagctacatagcaaaatcagagtggagtcatgtcctaaatcatatttacttgawcacttaaaagtattttcatatttattttatgaaaaagtttgttcatagttactgaaatatttaagtattttagagtttctgaagtgttgtgccaaaatgactggtatattagtccattttcacactgctttacagatactacctgagactgggtaatttataaaggaaaggggcttaatttacaggtttgcatggctggggaggcttcaggaaagttagacaatcatgggggaaggcgaaggggaagcaagcaccttgtttacaggacggcaggagagaaagagagagcaaaggagaggtgccacactttaaaaccatcagatgtcatgattaatcactatcatgagaacagcatgagggaaactgccccaataatccaatcatgtccctcccttgacatgtggggattacaattcgagatgagatttgggtgaggacacggagccaaaccatatcaactggtaatttttaatgatacagtattatctatgttaatgcaaaaaaatcaaggtcttggattcatttttcatatggacctattagttttgttctattttataactacagaatactaaccaatgttctttaaagttcccactacagagaaaattgaacagaggaatggatggaacatcacaaattgatcttcacttctgagaacataatttaatcatccatccactctaaacaaattatgcatcatctaaagttcttggcatgatactggatgctgaatatttattcatttagcaaatatgtattgagtagctaacatatgccatgtatttaaaatatatcagtgaacacaataagcaaaaagccataatcttgtgaaattagcattctagcaagaagacaggcaataaaccataaccatatctaagtaagttaattatactatatgttagaaagttctgagagctaatcaaaaaagaattctgcaactacatgtttatgtttgtacagcagattgcattaataagtagagtagtcagggtaagcattattgagggaaggtgagatttgagcaaagattcaagtaaaaagttgaaggaattcrttcaggccgtaactgggagaagaacattgtagttgaggaaatgttatagcaaaaaccctagggcagcatgcctggtatgtttgaggaacaggaaaataggcctcttgactggagtagaataagcgaaggacagagtaataggagctgaaatcagaggttaatagagaattatatgtaaggaaggccctgtgaggcattataaggacttcaattkttttttttttttttttggccgggggcgggaggaktgggttgggracagggtcttgctcccaggctagctagagtgcagtgatacagtctcgtctcactataccttctgcctcctgggctcaagtgttcctcctgcttcagcctcctgagtagcctggactacaggggcaagccaccacatccagctactttttttgtatttttcgtagagacagagtttcrccatgttgcccagactggtctaaaactcctgggctcgagtgatccatctgccttggcctcccaaagtgctgggactacaggtgtgagccaccatccttgggtggacttcaacttttactgattgggataggaccattgtagagttttgagtagaagagtgacttaatcttatatgttaaaaggatttttctggcctatgtgtctaaaatagattgaaagaaggcaaaaatggaaggaaggaattyaacagttaagcagcagttgtagaattccaggtgagaggtaatagtggcttggataatggggattagaagtgcccagattctggatgttcaaaaggatttgttaacagattgtacgtagggcatgcgggaaagagaaagcaataatgacttcagcgtttgtcctgaacaactgaaacagtggaattgctgtcarctaacatgagtatctaacagtgagcaaaaacagataatactaccgttctcatggagcttgcatattattgggagatctctttcatataaagactatgttggtatatgtatagatagtctggaataatattcaagaaactggaaagttcttgactttgaggagtggacctgtattctttattttttttaacgaatacatgtatatctgaaattaatttttaaactttttatagacmtagaacatagatatagaaatgtatgcataagtattcagttggctgaattttcagactgatcattaatgtgtaactagcactcagatcaagtaccagaacattgtcagtaccccagtagttccctcatactcacttctggccactacctgcctttcccaccatgataaaccactatcttgacttctaatgtatatcttaattttggttgttttggtaattaaatgaaatcatacagtatgaattctccatgccatgtcttcttatactccacattatgtttgtgaaatttctatcatcacgtgtagctatggtttattctcactgtgatgtagtgttccatttatctatatgctacaatttatccattctttcgttgctaagtccttaaattatttattaatgctcaattattattyttgtcaaatttacatttaactttgactactataatgttaaaactgcttttattgtgagttggtaatataagtctcttttccttatttcttataaaaagtttataagaaatattgttttgcctcttataggatgattgtagagttgtcttggcaaaacaggaaattacaaggttactggaaacattgcagaaacagcagcagcagtttacagaagttgcagatcacattcagttggatgccagcatccctgtcacttttacaaaggtaatgtactgtactttatttttaggtattttttctgacaaatcataattgatttacgtttcatgataatcaccttaaagagacaaccatgaaattcatgaattaggggctttttaagaaaacttttatcagtggaaaatagaaatggtgtgctcacttcggcagcacatatactaaaattggaataagaagattagcatggcccctgtgcaaggatgacacacaaatttgtgaagtgtgccatatttttaaatttaaaaaagtaaaaataagaaaatataaatggtatatrtatggtatatataatgaatcttcctgtatccatcacccacttgagcaattataaacttatttcatctccccttttacctactccttttcctacctgcaatctcccagggtattttgaagcaaatcctaatatcatattatttcatcccaatatcttatttcatctatgaaatattttagggtgtatctccaaaagataaggacwctttttaaaaacataattggggccgggtgcggtggctcacacctgtaataacagcactttgggaggccgaggcgggtggatcacctgagttcaggagtttgagaccagcctgaccaacatggagaaaccccatctctactaaaagtacaaaaatttttggcatagtggtgcatgcctataatcccagctacttgggaggctgaggcaggataatcacttgaaaccaggaggcagaggttacagtgagctgagatcacgccactgcacttcagcctgggtaacaagagcaaaaccctgcctcaaaaacaaaacaaaacaaacataattgggcatggtggcataccttatagtcccagttactcaggaggctgaggtgagaggatggcttgagcccaagacttcaagaccagcctgggaaatacagtgaaattcccgtcacttaaaaaaaaaaaagccaaaatatcattattacaccaaaaaagtttaataatgaatctctaatattttcactaatattatcaacttgttagtattcaaatttctcagattgttttcaaaacaatttttttaatggttgctttattttagatacaatccaagcaaagtttcatacttgggatttggttgatatatttaaacctcttttaaagtgggttctccctgattaaaaagtgttcatgtgtaccattttgctttccatttttaggggctggtttttttttaatttaattatgttttcacaattatgtgaaatgtttatgtgatccagagtcaaatgttcaaagcaaggtttattcagagaaatctagcttttatgcctggtccttctaccctttttacttcattccccatagaaaatcatttagaattttttcttagttttagtcatcattttaaaaagtatagagacatatgtttatatatttgtatgcacaccacttggatttaaaaggtggaataccttacacactttttttttcctgctctttttacttagctgtacatcctaaacatcactctgtarcagtagaaagtgacattttttgttcctttttccagctgcaaggtacttcattgtgaggatatgccacatttatttatcgtagtaaaaaacacataataaaaaatttgctatctcaaccatttaaaaatgtacaattcagtactgttaagtatattcacattgttaaacagatatccagaaatttttcattttgtagaactgaaactctataccctttaaacagttcccctctgccccctctcatcggtccctggtaaccactattgtatttttcccttatgaatttgactagatacctcatataagtggaatcatacagtatttgcctttttgtggctggcttattccacttggcctgtcatcaaaattcatccatattgtagcatgtgaaaggattttcttccattttaaagctgaataatattccattgcatgtgtgatatggtttggctgtgtccccacccaaatctcaatttgaattgtatctcccagaattcccacgttttgggagggacccagggggaggtaattgaataatgggggccggtctgtcccatgctattcttgtgatagtgaataagtctcatgagagctaatgggcttattaggggtttctgcttttgcttcttcctcatttttctcttgccaccaccatgtaagaagtaccttttgccccctgccatgattctgaggcctccctagccatgtggaactgtaagtccaattaaacctctttttgttcccagtttcgggtatgtccttatcagcagcgtgaaaatggactaatacagtaaattggtaccagtagagtgaggcgatgctgaaaggatacccaaaaatgtgcaggcaactttggaactgggtaacaggtagagggtggaacagtttggagggctaagaagaagacaggaaagtgtgagaaagtttggaacttcctagagactcgttgaatgactttgacaaaaatactgataatgatatggatggcgaaatccaggctgaggtggtctcagagggagacgaggaactttttgggaactggaacgaaggtgactcttgttactgttttagcaaagagactggtggcatttgcctagacatttgtggaacttcaaacttgagagaggtgatttagggtatctggtggaagaaattkctaagcagcaaagcattcaagaggtgacttgggttctgttaaaggccttcagttttataagggaagcagagcgtaaaagtttgaaaaatttgcatcctgattgtgcaatggagaagaaaaacccatcttctggggaaaaattcaagctggctgcagaaatttgcataagtagcaaggaacctaatgttaatacctaagaccaaggggaaaatgtctctaggccatgtcagagaccttcatggcagcccctcccatcacaggcctggaggtccaggaggaaaaagtggtttcatgggctgggcccagggtccccatgctgtgtgcagcctggggacttgatgccctgagtcccagctgctccagctgtggctgaaaggggccaatgtagagctcgggctgtggcttcagagggtggaatccccaagccttggcagcttccatgtggtgttgagcctgtgggtgcacagaagtcaagaatagaggtttgggaacctctgcttagatttcagaagatgtatggaaacacctggaagcctaggcagaagtttgctgtaagggcagggtttggaggggcgaggggcagaatgatatgcttgagattttgggtgtgcccccacccaaatctcaacttgaattgtatctctcagaattcccatgtgttagggagggacccagggtgaggtaattgaatcatgggagctggtctttcctgtgctattcttgtgayagtgattaagtctcacgagatctgatgggtttatcaggggtttccgcttttgcttcttcctcatttttctcttgctgctgccatgtaagaagtgctttttgcctcctgtcatgattctgaggcttccccagccatgtggaactgtaagtctaattaaacctctttttcttcccagtcttgggtatgtctttatcagcagcatgaaaatggactaatacaatgtgtataccacattttgtttgttcattcatctgttgatggaaacttgggtagcttccacytcttggtttactgggaatagtgctgctgtgtacgtgagtgtacaaatatctcttcaagaccctgctttcatggtcttttggatatatacccagaagtgaagttggtagatcatatagtagttctgtttttaattttttgaggaatccccatactgttttccataatggttgcaccatattacagttccaccagtggtgcacaagggtgcagtttctccacattttcaccaacacttgttattttctgttttkggatagtagccatcctgattggtttgaaatgataccttatttgttttgatatccatatctctgatgactagtgccattaaccatcttttcatataattgttggccatctgtatattgccttgaatatgtctatttctgtccttcgctcactttttgattgggttgactatttttgttgttgaattgtaggagttctttgtatattctggatattaattccctatcagatctgtgactttcaaatattttctcccatttcataggtcaatttttcactctgttgattttgtcattttatgcacaaaaattgtaaatttgatgtagtctatttttgcttttttttttttttttttactgtgcttttcgtgtatccctgaagtcactctcaaatgcaatgtcatgaggcttttcctctgttttttcttctaggagttttatggtttggggtcttaagtttatggccattttgagttaatttttttaggtggtgtaagatacataacatccttttgcatgtagatatccagtttccccagcatcatttattgaagagactgtcttttcattgagtggtcctgcacccttgttgaagatcatgtgaccctattcctgagggtttatttctgggctctctcttctgttctgttggtttgtatgtctcatctttatgccagtaccacatagttttcattattgtagctgatatggcttggatctatgttcctgcccaaatctcatttccagttgtaatccccaatgttgaaatggggcctggttggaggtgactggatcatgggggcagtttctcatgaatggtttagtatcatcccccttggtactgtctttgccataataggtgagttctcatgagatctggtcgtttaaaagtgtgtggcacctcccccaccctctctcttgctcctgctcctgccatgtgaaatgcctcactccctctttgctttccaccatgattgtaagtttcctgaggctttccctgaagccaagctgatgccagcatcatgcttcctgtactgcctgtggaactgtgagccaattaaacttttctttataaattacccagtctcaggtatttctttatagcagtgcaaaaacagaacaatacattagctttgtaatatattttgaagtaaggaagtgtgagtcctccaacttttttctttttcaaaattgttttggctattcagggtcacttgagcttccttataaattttagcttaattttttctatctccacaaaaaacatgattgggattttgatagggattgcattgaatctatataaattacctgggctgttattcatatcttaatattttatgtctttcaatccatggacatggaatgtctatttatgtcttaatttattttagcaatatttgtagtttttagtgtacaagtctttcaccatcttggttaggtgtacgcctacatattaggttggtgcaaaagtaatagtggtttttgccattaaaagtactggcaaaagccgcagttgcttttgcaccaacatagtatcttaagtctttcaccatcttggttgagtttattcctaagtatcttaaacttttttttctgtacatgttcagagaaacttctttagtcataaactataaaaatgatccctgaaagtataattttgatgctattttaagtagaattgtttccttaatttccttttgggatttttatcattaatgtatagaaatgcaactgattttcatgttgattttatatcctgaaactttgttgactttattctaataggtctttttgtgtggactcttcagggttttctacatacaagatcatgtcatctgtgaagagatataattttacatcttcctttacaatttggatgtcttttattattyttcttgcctaattgctctgtgggcatcttcttgttctttatcttagagaaaaagctttcagttttttgagtatgatgttagctgtgggcatttcttatatggtgtatgttaactgaggcagtttcctgctactcctagtttgttgaatgtttttattatgaaagggtattgaattttgttaaatgctttttctgcaactattgagatgattacgtgctttttttctctcattctgtgtattatgctgattgatgatgaataattcttgccttccagttataaagcccatttggtcatggcgtacaatccctttaatatgtgtttttttttttttgaggyggagtttcgctcttgttgcccaggctggagtgcaatggcgcgatctcggctcactgcaktctccaccttccgggttcaagcgattcttctgcctcagcctccttgtagctgagattacaggcrtgcgccaccatgcctgggtaattttgtatttttagtagagacggggtttctctatgttggtcaggctggtctcgaactcctaacctcaggtgatccacccccaacctcggcctcccgaagtgctgggattacaggcatgagccaccaygcccggcctaatgtgttrttgaattcagtttgctagtattttgtagtttcctcctggttgcacctcatcctcactatgttggatatggggaagggcagggatgagtgcacagaatgccccaaattttattacccctttcactggaatgcyttcttggttttatggcctgggtgctgtagtttcttaactgttctctagagttctcacagaagtagttctgttccatatattgttttatttctgaggtgtataactggacttaagtatagatttggagccataatatacatggtaattaaagctcatgaagagaatgaaaatatgtagaatgagaaggaggcctcatatagaccctcaagaataccaacatttaagagctggattaaagaaaaattagaaggaacatccaaaaatgggataaaaccaaaccaggaaaagtttgtatcataaaatccaagcaaagagtgctcaaaggagtaagcaaaaataacacatatattttgggaactgttgtaaggacttttatatgtattcttaaaaattaatcctttcaagaatcctatgtaaattttgtactattttaatcctccttttatgagatgaaagaagtgaagcagagaaatcatgcagctagtaatatataaaaatgttcattatagcattatttgtaatatcataaaatcagaaattacctaaaatctatcagttgggggtttagttaaattgtggtttatgaaatgtaaagaagccattaaaagaaaaaggttggtcaatatgtattgacaggattccataatatactgttgagtgaaacacattagtttcaatgtgtgggtaatacttttttaaaaaaaaatttgttttgtttgtgtatgttggccagtatgtgcatggaaagtgtctggagggatatacatcagattcatagtagaaatttctgggaattgagcagcactttttcattttaattgatttacccttattgtgatttttttagtatagcataaaaacatgtttaagatttagaggattcatttgagttagaaaatctgagaaaattaagtgggtatgtatattctgttatacaaagacaaaktcagttttactaaggcaagatttagccatggggaaggatttcatcttcttgagatcagactcagtattttgaggaatacaattcagattgcaatggttgaggaatgaataggagatgtagaaataataaaggtgctaaatgctattactttctaactgcatgtcaaacatatttaaaaatatttaaattgtaggataatcgagttcacattggaccaaaaatggaaattcgggtcgttacgttaggattggatggtgctggmaaaactactatcttgtttaagttaaaacaggatgaattcatgcagcccattccaacaattggtaagtatgaatattggtttttaccttaatagacaaaccctagcttacagccaagttcttggggtcttatttgatactgatctgtcatggtggtgggctcttttctggctctaagatatcagcatctcagagaaaaaatgcaagattgtatgactatgggattgaaatgtggatggggataaaaagaagaaacagagtattggtgggacagttggaaggaatagaggattggtgatcctggctgagggtgtggggtggggggtagtwgtggaacagagctggaaggtacatggatcccaaggtcctaaggaccttggtggaggtttagagggctaggagctgttacaggtatacattcaccaygtaggagtaggaatggggttgattaggcttcagtagatattgctgcatgtagataatttgataagtcacagttataaactggkggttgtctgtgtttgatatgtcattcattgtaaatacaaatatagtataaaagtaactttttttttaaaacaggttttaacgtggaaactgtagaatataaaaatctaaaattcactatttgggatgtaggtggaaaacacaaattaagaccattgtggaaacattattacctcaatactcaaggtgagagttaaaaatgacatttaatttttcacatttttaggatgacagttttcagtgtactgatttaactagcaaagctgatacttatgattaagtcgttgactgtatacttaagtacctgtggccagtttcttaacttgtaaaaaatgaaagtagaaagattaggatatatacttttagtttattcctgatataccattattacagaataaaaaccataygtagcttagatatgtagtcagttaagagtactcttgcttctcttaacagagartgtatattaccagtattatatgggtgtgactgctggtagcgtagtggtatagagttgaatttatgttgtatgattctgctgaattcagttaaactcaacatttatcccattataatctcactatagccccactcccacatttctttcacaaatagttattacctgcagaagaacttacagtagcttgcttttgaccaaaccgtattatatcatatctatactctacataggttttagtcacatttgggtcttactctacacttctgcctcatagaccccaacataatgcttacgctcatgccgcttattctgtatgttattctgctttccaccaagatgagagactgaataattatttttactttgggatttttgatattattatgagccataattaatagaaaaaatgtatttttttttttgagacagaatcttgctttgttgcccaggcaggagtacagtggcatgattgcatttcatggtcacctctgtctcctgggctcaagcaatcttcccaccttaacttcccaagtagytaggactaggtatatgccaccacattcagctaattttttttttttttttttttgagatcgagtcttgctctgtcgcccaggatggagtgcagtggtgcgatctcggctcactgcaagctccgcctcccaggttcacgccattctcctgcctcagcctcctgagtagctgggactacaggtgcccaccaccatgcctggctaatttttttgtatttttagtagagacggggtttcaccatgttagccaggatggtctccatctcctgacctcgtgatccgcccgtcttggcctcccaaagtgctgggattagaggcacgagccaccgcgcccggccacattcagctaatttttaatttttttttaatagagataaggtctcactatattgcccaggggtctcgaactcctgggctcaagtgatcctctcacctcagcctcccaaagtgctgggattataggtgtgagccactgtgccctacaaaaatgaaattttgaatatgaggaatggttgaaagtctggagatagttaacttagacataatactttggagaaataaaaatggtgatggtttttatcttttagtcttttattcaaagactaaatattagaaaagtagtattcgaagaacaagtagcatccataggtagaggatcatgaggcatattttgaaattcgttatgtaaaaagttatttgatatacagaccaatttgcatttgatagagcaagtgttgtaaatcctttcctagatggggaaactaaacctgagaagttatgtaaactacttgaaatcatactgttaattatttgtaggtgcccctgccataytaggcaccctctgtgtgaaaataatgatggtagacaaactctaaccataacataataatgatatcattaaatatttggttcatttactgaacyttagcaagtgactatttttgttttttttattttttttkgggtagctgttgtgtttgttgtaratagcagtcatagagacagaattagtgaagcacacagcgaacttgcaaagttgttaacggaaaaagaactccgagatgctctgctcctgatttttgctaacaaacaggtaatgcatttttatattggaatatttattttagtagttttgtgcatgtcaaaaggcaactggaaatatttcagaagacaatcagttcaatagatatttatagtttcttctgtgtattttgagtacaatctatgtgaaaatgctgtgctgggtacctgggagtatacaaaatagaaataaggtagttaatgctcaccagaaactcctgtgtatgcatatgaacacataagagatctgaatacgaagaagactgataagtaacttaagtaacacagtgttacgggaattaggaaagtagttctaaatgtggcatgttgtaagattgtaaaakgtagaatttgagttgaaattatgcatgaggctgagtcagtatgtgaaaggaagaacattatagacaragaagataatagcatgaatgtttttagtttagggaacatcaagcagatctatatgtcaggtctcagtagaggatgaagagaatttagaataacagacaaggccatgctgtaaaggtctgacagtgctagactgagaaatttaggttttattctatgagcaaggaggagtcatcaaaatgttggattagtgggtaataagatcatatcagtgtttcaatactataattctaggggtagaatgaatcagggcaaaggactggagacagggagatgcagtaaattgcttaaataattcaagtgagcattaacaagagyctgaattagaggaatagaaaggcggaggcagatggaaaagactttgaggcagaactggtgactgaatggggaggatgaaggactgggagtagctgaagattcctagaccttgagcctttctaggaggatgagatgcttttaagtagaggcagaaggagagtagaagtggagcagaggagatgtcatgggaggggaagagtaggatgaagaataaagaattttccccttaataaaaaaggcaaactattaagaactggtatatttaagacatgcaaataagtcagtgaaataccattttctgctcatcagatagttaaagatgaaagtgttttataatcctcagacttatatacaactgttactattattattttgagactgagtcttgctctgtcaccaggctggagtgcagtggcacaacctctgctcactgcaacctccccctcctaggttcaagcgattcttctgcctcagcctcccaagtagctgggattacaggtgcttgctaccacacccggctaacttttgtatttttagtagattcagggtttcatcrtgttggtcaggctggtctcaaactcctgacctcaagtsatctgcccgcctcatcctcccaaagtgctgggattacaggtgtgagtcactgcgcctggtcaacactgttcgtgggttattaaactgagacattttcttggaggacaatttggcaatactcatcaaagtcccttaccctgcaattctacctttatatatctggtagacagatatccaaaggttatcctacagataattttgcaaatatacataaatgtatgtcaacttttgtgtatgtatgtttatgtatgtatgtgtatatatatggatttataatagcacataagcataaaacttcaatctgaacattcagtataggactggttaaattatgttgcagccacacaatggaagggaattctgatattaaaaataatgcagaccatctgtgctgataatggaaagatactcatcttcaacatgtttacgtaaaaaacaaacagaaaaccctgcaagttatagaaagtctaaactatgttcctgtttgtgtctctttgcatgagtgtgcatggaaattttctggaaaaatatgttgtaactggtggttgctcctgggaagttggggcaatgggtgttcagagtgggaatgtagtgaactcttcaatatataaccctatatataaaccatttattaaggtttctatgtgttaattttttttttttaagttgatgccttacacttaggcaggccaggcgtggtggctcatgcctgcaatccttgcattttgggaggctgaggttggtggatcacttgaggtcaggagttcgagaccagcctgactaacatggtgaaacctcatctctactaaaaatacaaaaaaattagccgggcatggtagcacatgcctgtaatcccagctacttgggaggccaaagcaggagaatygcttgaaccaggaggcagaagttgcagtgagccaagatcatgtcactgcactccagtctgggtgacagagtgagactctgtctyaaaagataaaaaaattacttaggcagtatgtttccttttaggttgcaaggactttattgatttcattgttaagctagccttacaaagtatatacatacacacacatataaattagttaaaccaaactaattttttctattcttattaatctcagamtaattactgaaagatgaatctaggtttttkgtttaggcttctgttagaacactgtcaacaaatttctctataaatggtgataattasaaaaattataatttggatggactgataaaaaatatgtgtatatatctttcaggatgttgctggagcactgtcagtagaagaaatcactgaactactcagtctccataaattatgctgtggccgtagctggtatattcaggsctgtgatgctcgaagtggtatgggactgtatgaagggttggactggctctcacggcaacttgtagctgctggagtattggatgtkgcttgattttaaaggcagcagttgtttgaagttttgtggttaaaagtaactttgcacatagtatgttttaagaaattatacatctcaaaagatggtaatttaggatgcatatatatatatatatatataaaggaatcttggattgggaattcagtactttgctttaaaaaaattttgtggcagaattaaatttctaattgagcagattagattgaattaaatagaaacttattgaatatacattcttttaaaaagtatatttgttatttaagtttttcagataatatgtgaccaatatactgggaaagaggtagtcacagagaaagggtaagtgaaggtttattctttcagtgaaaaaagaatagccaattgagtgcctaatgagacctctgtgtgaagcaagtgaagtatagctgcttcttttaacctgccttttcactgaatgttggcagcatttagtagtagaaatgacagttgcttaatgaaatagaatccaaactacatatttggataataggattactttatgtttatgttcagagttaacagaacacctttaatgctaagaactataaggtacagaaaattaatactttatatagtgttttattaactttctcctacagcattttgtataaaacacaatgagggagtgaaatgttacccaattaggcttgtcaggttagtaataaactgaacagtaataaaactgtggaagtaattggatctgaatttatgaaagacccatttccaggactgaacctaggtcagagctctaaattggtccttctatttttcaacaaatttaaagtaatatttctttctaatataatattgcatcctttgtgggaatgactataggtaaaatgtagtaagtaacgcagaaccagggttggctttatttaaaagctagtgacctaaatagaaagcgaacttcaagagaagttgtaagtacagtggcaaatgcttattacttacttcaaactgtttcccaaaataagtgcatttattttgacaataaaacttaaggctgttcatgagaaggccttgaaaagytactctagaggaaaaatgtctaaagaaaaaaaaaattcaaaaagtttacattaattattcagtgttgtgagtaaataaaaatgtgtgctctttactgtttttcatttttaaagaatattattatggaagcacgatttatttaaataggtacattgagacttttttttttttaatgttctgatacattaggatgaagttaaatcttaaatcttattagttgaattgttgtaaggacagtgatgtctggtaacaagatgtgactttttggtagcactgttgtggttcattcttttcaaatctatttttgtttaaaaacaatacaagttttagaaaacaaagcattaaaaaaaaagcctatcagtattatgggcaatatgtaaataaataaatgtaatatttcatcctttatttttcaggtaaaaggtcatgctgttacaggtgtagtttgtgtgcataaataatacttccgaattaaattatttaatatttgactgatttcaataactgtgaaaaataaaaaaggtgttgtattgcttgtgagaacttgaactgtttactagttaattgaagaaaaagtgtaacactaaggtgaacttgcttcccttttcactaattttgctaaactttgtaatgcacattcttagcatataactgaacacarttgaaaaawtgtgcctgattataatgtatgtataatggtaggtgtttgtgtgtgattcatttttaaagaaatatttttctcaagctcctattactatttgtggttgtattatttcactaatcattagttaagactgtgctagtcttccctgggaaactaagaagagagcttttttatatacagtatattagaattttcctagtagctgaatttctgtattaggtctaaatattactgtatgttatataaagcaggtatgtcaagtgtatagccgtagtctataattcaggaatgctttataaccatcagaagccattatttgcactacatatatgataagtatagacagcaataaaatgttaagatcatttttaagaagtcccatcattattcttgaaagtctctttcttgaaccatctacctaatattattgctagttgtaaccaatttaagaagtcattatttgtgctgtggttaggagagaaaataaaacaaaatgggtatgggttggcatgcctgtcaaatttgagatgtagtttatttgatacagcaaaattttagaaataacgttttgaatttgcaacataggccacatttactgatgagaacagatactaaacttgatcttaactacacctgatcttagccaaaaggccgagaagtaatgtgcaggccacatttaaataagtaatataaccatagtgttttgaaggcggagctaaagttttacattgaacgaagtgaaactttgttactgccttttaaattttaaatgtaaacttgtttcataagaaaacatagtattttaaatgaccattttagaaaatggcttgcaaaacttagtggtagctcatgaactaatactgctaagagaaaggctttttatgtaacactgggatacttctcaattggcaaagtgctaacaaagaagaagacagctgtattcttccctaaaagaataaaggatgaaaaggactaatgaataaggatgaaattatatcctgataacttaaaacatgcttttaaaaagacatgggcaatgtatgtttttaggtctgccgattaagtttttgatattaatcgaaaaattcattagtcaaatatggttttcactcaaagcaaaataattgtatttgttggggaatgaggcatcatcaccacttggtggcaatattaccaaaaatttagattaaatttttaggaatgaataaagctaggtaggtaagactaaacaactaaaattagaaacagtaaatgtcacattgaaaagtcattttcatgtctaactttaagttctacttttaaaaaggagcatacattacaggagcacaatctggcataatctcctatctatctcacaactttgtagcacgaaataaataaagaatcctgctgatcaatagaaggaaaagtttaagccgatttaaaacttaagaatataaattccctacacaggtctgttgagaatgttcttcctgtaagtttctgaaagaaagagtctttctttctggaaacgaagcagtgagtcttaatagttatgaagttagttataagtgtaagtgaagaagatcaatataagaatttgtgctcatattgttttactgctccaatttctactaatctctccattgttagataccaaaatttttatgtatacttcttaatggtatattttctaaagatatactataacttgaggacagaaaaaattgtttacctatgttagaaaaataatctgaaaatcaacctgcatataataaactaaggactcaggtattcacttattctgaatctttcatttgaaagaatatttcataattattaaggaatataacactttgaccaaagtaacttcctgtttattgaggctttactcaccactacttactaaacagttatcaaaagactaaaatatttggcattgaaaccttgtaaaacaaaggaaatgacatataatatcatatcctagtatttttttcttataggagggatctgcactcttctaaacataagggcggaatatctggcaggtattcaaaattaaagcacagttgtgtaccactgtcattatttaatagagttgtcatcgcacgggataccttctaagacctccagtggatgcctgaaacttcagatgatactaaaccccatatatattgtgttttcatatatatatatctatgataaagtttaatttataaattaggcacagtaagagattaacaacaataaaatagaacaactatagcagtatactgtaataaaagttagtgaatgtggtcttgctgtctgaaaatatctcactgtattgtactcacctatttttggatcatggttgacagtagaaagaaaaccatgggaaagggggtggaggagagtactgtaattatttaatatttaatttgaggctgattagaaattacctataatgagtgctatttgcctgagtttagtccatttcaatttatcacctcccaggattagaaatattgcgagaaaagtcaaaggtaatttttaaaaaatagcctttaataaaaaatacaaaaatactgtatctttgaaacatgatctgtatattcagcaagtcctaagcttcctaatgtaaaataatctgtttaatattgtatttttatttgcaagtacattaaaacaaatcttattttacttgacagtaatatttatgatgctgacatcctcatagggcttatctgttttgggattgactttgacgttggagatcctctgtacaacttccattcctttagtcactcgtccaaatactgtatgcttattatcaagccaaggctgtgttggaggacaaatggaaaatcttggtaaaccccaatttctttaaattatatcctctggttgagcaaattaaagagaatttaagtttacgctcccctttagcatatatttaaaaagaagtacaataatttctcagcaataaaaatgtagcagcttttaaaagttatttccagtgtgttaaaaaaaatagaagcatagtataatgtttaattaaatatctgcatctttcagaccaaagggaactggaagatcttccctaaaggtaagttacttcacatggcttacagaattgtggctaaggctttaaaaggtctctggaggactcttacctgaacagtttattcagaggcagtttgaaatagtttatgcagcacatactttggcattagacaggtgggagttcaaatgctagcttggctacttgaccttttggcaagttaatcatgtctcactgtttcttcatctattattgaaaactggggatactgatagtagaagtactgtgaatactacataaaactatgtgcctggcagatggtagttacatttttcccttcttcatcacttagtgcttaattccaaaacaaaaactaggtaatttttataattttgtgttatggcatagcaatagagctaggttaccttatactgtatttcatcaaatctaatgtattctgatttcagagatactaaaatgtgggggaaattgtctcaaaattgtgaattcatatactctaatctttgtattctaaagacaaggaaataggctcacagaagtgaaataatttattttaggttacatcatcagtagaggcagagttgagattgaaactcaagtatcttgaatcgtagtccattgtatttcttactacagtggcagtattgttttaccaattctaaactgattagtcacataattttatattcttgatcattttcatatttgtattctgctagatgatataaataatgcagaaaatacagaataatgcagctcttctactgagttcactctcttacatcataacctatcaatctgtagtttataaacaatgatactgtacttaccgttggtactaccgttatgaaaaactgggatccattagtatttgatcccgcgttagccatgctgagtgtgtacggcctgtcatgtcgtaatgttgaatgaaattcatcttcaaattctcctccccatatgctttctcctcccataccagtacctgttggatctccagtctgaatcataaagcccttaacagaaagtacacaaaaacattacattgtccttttcgatatatgtacgctttgaagttttatttctgccaagagtgctttgtattcagtgtaatattaactgtcactataaagtgatttgattaaacccttaacacttaaatttggatgatgtatttccattgcccaaccaccaccttgattgaaacataaatgcaaaggtcgtcttctcatttatagacatgttctgtctttctcaataacccaaataaagccagttaatactatcaattttaggatctgtatgttatgttttatataattgccctcctcttctccctctccctttccccaaatactctggatttcctggaaagccttttcgctaattcctttaggaccctgagatctgacttttcatcctgccgtttctgacctgccagaaaccaagcactgtatcagtgccccatccactttatggaaagctgctcaacaaaatccaggggctgagttctctctcctcctctggtatattacaggttctcacagatcagatggcactgtggctcctctatgattgaaaaatcatatcttctagatctagaccctatctagccacgacaaagaggttacctaggttactgatgtaatctcagcatgacactttattcattatcttaccctttactttagctgctgacaaaatattgcttcagtgtttctaatcatgccactattcctgttgattctagatgttgatatttatgaccatccactcctcctttggcttccatagtgtatttttcctgttcctttccactaaactgattaagtgtgagagaagaagattccttgcgcttaaatctcttgctatgtaataatacagtatttcttatatgacatgaaatttatgtaacttaccttaattatacggtgaaatgtatgcccattataataaccatttctgctgtgaacacagaagttttccactgtcttagggcacctattaagacatatgttacaaatatgaaacctattcagagcatcttaaaacagttttctttgcagttctgcttcctaatgatgtttcctttccatgtcttctgaatgtttcagaaggacagttgtttttttttttcataatctctaatctcaggacaagcacggagggtcatgtaagtagtatattcttattgttcaacttagttatctttagaacatgactgcttaactaatatttgagtttgacagtattaaaatttcaaggtcatttagcagtcaaaaaaaatacagccatagcaccttaaaaatatgtttttttcttaagagacaaggtctcactatattgcctaggctgatcttgactttctggactcaagacatcctcctgcctcagcctcctaaagtgctgagattacaggcctgagccactgtacctggcccaatatcttaagttagtttactccatatagtattataggtctgcatgtagtagtataggttaagttcctgggaaaggtcattttcttacaaaagcattgttatgctacagcgacatactcttggccaaaaccttaatcatagaaatgacatctaaatttattcaactttaaatgacaatcacactcagagtacgaagctttctcaataatattaactgaaaattatgcaattatttcatacggttcattaccatgtaatacttctaagagctggaaatggacgaaccaagagaatcttgtacccaagtacatcagcaaacaaggccgaagagtacatgggttttgagcacttaaagtgagactgtccaagagtctagagctgcctagttatttgttgagtaccaagatatggtataaaacgttcatattcaaaatgttaataaataagaacttttaagtaaaagtgttgtaaaagatgtcattttttgggtcaagaatggccagagatactctactgtatttgacattgtatgttaattttacagtcttttaaactgtccagaaaactgttcacctttttttcaattgaagcccttacggttttgttg

SEQ ID NO: 96602 - DNA, 13085 bp, Homo sapiens
agaaaaacaatggttaaatcaatgaaacaaagagatagctatgttaaaagattaataaaatttagcaaactcaagcataaattaaaaggaaaaaacaaattttaaatatcataatgaaacaggcgatatcactacagacataaacacacataacaaaggactatcaaggaatattacaaacaactccacacacataaattagacaatagacaaaatggacaaaatgcagtgttcctcctgcaacacaaactaactcaactcaccaggcatgaatagatcatttgaataactctataaccattaagaaaatagaattcataattttaaaactaccaataaataaatatttatgcttagatggtttaactggagaattctaacatgtttttaaaaagttaacaccaattctacacaatcttttccagaaaacagtaaaagagagagcatttcccaatttattttttgaagctattattacagtgataccaaaaccaggagagagagagagagtgtgtgtgtgtcacacacacacacatatatacatatatatatataaagatatgtataacttacttgataaatagagttctatagtatatttttcaaaatttacccatgtccagcgggggattgtttccagaaaaacaaacctgattaaatctcaaaaagtcaatcaaaataatccaccatgttaacaaacaaaagaaggaaagttacattatatcagttgatgcataataaacatttaacacatttcgatatccattcatgataaaagctctctataaagcaggaatagaggaaacttcatccacttgataaaaagcatctacaaaaagctaacactatacaatcacgtgttgtttaatgatgcggatacgttctgagaaatgtgcggtcaagtgattctgacattgtgtgaacatccagaaaggacttcacgggtaagagcatgcatgaggctgtcgtctcctatgatagcaatgccttcttctggaatacctcttgatggacttgcctgagactgtttagcagttaactttttttaataagtaaaaggagtgcactctaaaataatgacaaaggccaggcacagtggctcacacctgtaatctcagtactttgggaggctgaggtaggcagatcatctgcagtcaggagttcaagaaaacgctgaccaacatggtgaaaccccatctctaccaagaatataaaaaattagccaagcatgatgttgcacacctataatctcagctacttgggatgctgagacacaagaatcacttcaacccaggaggcagaggtttcagtgaactgagattgcaccactgcactccagcctgggcaacagaacaagactccacctccaaaataaaataaaataaaataatgacaaaaagtttagtagagtgtagtaaatgcatagtaaaatacatagttgtttgcttttaaccacgctgggagtgcagtaggattgtttacagcagcaatcccacaaacatgtaagtaatgcattgtgctacaatattattacggctatgacatcagttggcaatatgattttttcacccccattataatcttgtgggaccactctcatatatgcagtccatcaccgaccaaagtgttatgtaggacatagctatactaacatcatatttagtggtgaaaaactgaatggttcctctctaaaatcaagaataaaggaactatgtctgcttttatcacccttatgcaaaacagtgctagaagttatacactgcaataagacaagaaaataattaaaggacatacagatcagaatggaaaaaatagaacagtccctacttacaacagacatgactttctacatagaaatccaaataaatctattttacaaacctccttaaattaagaagtgagtccattaaggtcacagaatttaagataaacacaatcaaattaattctatttctatatacagacataactcattttatcgttctgcaatttattgtgcttcatagatattgcatttccattgtgttaaaattttgtggctaacctgcctcaagcaagtctatctgcaccatttttccaacagcatgatctcattttgtgtcctaggtcaaattttaataatctgtacagtattttaaatgggtttattattattgtctgctatgatgatctgtgataggtgatctttgatgttactattgtaattattttagggcagcataagcacgtccacataagacagcaaacttaattgataaatgttgtgtgtgttctgactgctccaccgacaggccatttccctctctctcttcctcttctggcctccctagtccctgagacacaacaatgttgaagctaagccaattaaccaccctataatgtcctctaaatgttcaagtgaacgtcattaaattaaaagctagaaattattaagctaagtgagaaaggcatgccaagtaagtataaatccggagttgtccaacttgagctgaagtgctattagatctaccaagtcataagactgaatggtcactgcaaccatctatcctataatggatgcaatatgttttagggcaagagaaaatgcaaaagacaaaagtaggctgaatgaacagttggcccagatccctatatcactgatgcctctctctcagcttatacatacagtctcctaggtccttccaaccagctgataccttagtaaacaagccaggcctaatgcaagggcactttggctaggtatattggcacaatatgtcaaccactcagatgtgggacctcaaatataatccatgagggtaaacctactctgataagtagaatacatagattcatcgccatccatagaaagggttcagaaaacaggagctggccctgtgcttttacagagctttatccttcccataagggcaggaccagatattatcaaaaaaaaaaaagaaaattttcaaaagtaaattttgctcaatccttatgccttatccattcttcttctagacaggtcaatgagccccacagattatttaaaatgaatctccaacatctacagattggtgcttaaaaataaagtgtctgagtttctatgtaaaatgacctaatgattaagaccttggaattcaagtttattctcccaacagcttttgggtatttgggaaagcagactacactaaaagaaatgactgcaggaattaatgtcaaggttttattttaaccgccaaacaaacctagacatggatctttgcatctcccaagtgttttctgaatgtttggggaaggaatagcataaatattcatgaaactctaacaaattcacatattttggtagctgtgatagccacgtggtcccaggatattactttagataatatatgtatcctttcagttacaaaggcattttctgttcttgccttagtctcattctctttatcactgtggcttcctcagagacagaatgagacagaagctcaattctctgcccctagaagaataacagtggttgggttcttcatgtctctatggaaatcatgctggtgcaagtgaagcctattttctcatgcgtcacacaaagctctcatgataattggaaggtactctgtggaggtgatgacttaataacaccttcccttctcaaaagcacttgaagaagcaagatccttccttggcatttctcagatgggcagcagagttcccagcaccatcagtaaactcagccacactgtagaaatgtttgccttttctatatgaagattatctaggttcttacacagcagtcatctctagacacctggatttcctaactgcctttgtgagttctggtcaaatataatttaaggtcattttcattgcttgtttgcttttaccgtcacactttaatatcatgcaaaagtacatttctactctcttaatgctcaaattttgctcaccaatagttttagataataggataatatgactaaaatatattaatagatatcagcatattatctatcagtatattaatatattaaagcaatcaatatgttaatggttattttggctggtagctttttttaagttcaagaaatatctgtgtgcaactgactctggtaaatgttcaacgttaacaaaaaagaccagcactttttttctttaaaatttttttttcatataattactattttaaaaattttttaaaagagatgaggtctctatgctgcccaggctggtttcaaatgcctgggttccagcgaacctccttcctcagcctcccaaagtgcttagattacaggcatgagacaccaagcatagcccagcacttaatttttaaaaaggcttaaagtgtcacatacagaagctcattaagttaacaagtgtacagatgcttgtttacttattacgcacaatcttacgaggccacacaatctgagcgatgattaggagctcaaagtttagatccaatctcaggacaacatgaaataaatgacaagaaatcaataaataactaaattattttattttttcaacatgagcataatacttatccttggaatggtggtaggaaaaatccaatgcaaatgaaatactttttagtcggttttgcaggattaaatttataattttatggacatttaaatggaggattattgctcatccttcctatctccaagacaatataattttacataaaaaatgagaataaaatttaagcaaaaatgacaatatcatgcttatgctaacattttaattgtgggatcaaggaggcctgagttcaatcagagaattcagagactctttctgcagcattcctcataaattcatcgaactattgccaatcacctgcatagacaatgcttaaaactgtgtattctagagtgtttatcaatagtaagcccaaatccaacaaaagttactgatcctgttttcgtgtttagataatgacacggtgcaaatctattcagtcattcacataaatgctcatctaaacattgtgggaaagtaaataacaaaaaataatgttctgggctaaaaaataagtctttacacttggataagaaaagattttgtgagatatatgctgtggaggtgatgatcagtgcaagagtggaaagtttaagaggtgaatgaccactggtgtatttggctgatggtatgtcgaaccttagtatagcccgcccttaattaaaccttccactttaagattaaacttaatgtggttttaagactttgacatgtgtatcagttagtgttcattgtttctgaaacataacagagaaaaactctgaataatacgaccaaggaaaagaagaatttatttgaaggatatgagatagctcactgaatcaaacaaaaactgtgtactacattgacatgtgacattcatccctgaaaggcctgagccaaattttttttaaaaaaagaccaaaaggatatattaatatgtgacatgtttatttttaaattttagcctttattaaaaaattaacgtaataaaaaagaaacctatgtatacgtgtgcacgcgttttttttttcttttctttttttttttttctggagacagagtctggctctgtcacccaggctggagtgcagtgttgcgatctcggctcactgcaagctccgcctcctgggatcaagcaattctcctgcctcagcctcccgagtagctgggactacaggtacacgccgccacgccgggctaattttttgtatttttagtagaaatggggtttcaccgtgttgtcaatgctggtctcgaactcctgagctcaggcaatccgcccgcctcggcctcccaaagtgctgggattacaggcgtgagctaccgcacccggcctgcatatattttttaaacatttattttagcgttaccaaattgtcttgaagcattcatttaaaaacacaaaaactcactgcagctgtctgaacacttttctacttcaccaaagagtgccgaacaagttaaaatgaatctgtttttaaacacttctcctaaaccatgagcattaacttgatttcctctgtcatagggatatgggrgacaatataacatccatcasagagttcctcctactgggatttcccgttggcccaaggattcagatgctcctctttgggctcttctccctgttctacgtcttcaccctgctggggaacgggaccatactggggctcatctcactggactccagactgcaygcccccatgtacttcttcctctcacacctggcggtcgtcgacatcgcctacgccygcaacacggtgccccggatgctggtgaacctcctgmatccagccaagcccatctcctttgcgggccgcatgatgcagacctttctgttttccacttttgctgtcacagaatgtctcctcctggtggtgatgtcctatgatctgtacgtggccatctgccaccccctccgatatttggccatcatgacctggagagtctgcatcaccctcgcggtgacttcctggaccactggagtccttttatccttgattcatcttgtgttacttctacctttacccttctgtaggccccagaaaatttatcactttttttgtgaaatcktggctgttctcaaacttgcctgtgcagatacccacatcaatgagaacatggtcttggccggagcaatttctgggctggtgggacccttgtccacaattgtagtttcatatatgtgcatcctctgtgctatccttcagatccaatcaagggaagttcagaggaaagccttcygcacctgcttctcccacctctgtgtgattggactcktttatggcacagccattatcatgtatgttggacccagatatgggaaccccaaggagcagaagaaatatctcctgctgtttcacagcctctttaatcccatgctcaatccccttatctgtagtcttaggaactcagaagtgaagaatactttgaagagagtgctgggagtagaaagggctttatgaaaaggattatggcattgtgactgacagtgacctaggaagttacatcattgagcggttcttaacccatctctgcactggtgggacctctgccctcaatggacatgagaattatctgagacatttatttaaaatggagctatctcctgccctacctttaaatgactgatttcagcagatgtgggatgaaattctagaaattgatctcttcaagttgtgctgcagccactccacaccaggacaataccccttacaatatcctcattagcttttgatccagtcccatacctcccataatgttttcctcaaaacactggtcccttcagaggactttaaaaataagttctatagtcaaataagtttgagacttacttcacatcagatgcctctgtctagggatcacaattcatattagcatagtgaatgctgtaaatatttctctaggaaagaataattctataccagctttaagccagtgttttctaaacttatgtgagcacataaaatttcctttgtaatacttagtaacagtttcctggaacaggagatcttgatattaattgactcattgtgaatacttcctacagcccccttctagggcagaatgatttcttttttccttgcaaagtgagcctctaaagagatgtagttctgagcattatgcctcgatcagtctgtaaaaatccgggttctgtttggatacagaccgtgagggaccctgtctctactgttcaatggtagatcatctaaagaaaataaatgcaatcctgtccttcatcatggatcggcattcctgctatagaagcttcaggagatgacctcattcaacctcacaatcttctaaatttgagatttttaagaaatatgattcagtatacatctgcctgtgtttgccgctgaatgaaatcaatctaatttttctaattcagggttttcaagataaacccagatttctcaagaaagaaaaatctagaaagatttcaaaatccaccacctacacacttaaaagttgtagcagcttcttatgccatgggaaacatgtcattttgagatgatgttttttctaggtttaagtttggtcttaaacatttatatttaatttctcattgtcttagttcaaagaatttacttttatattttaaaataactttttacacaataactcagtgtcatatcatgttagatataaaactatgtcctaaaactattttatcctttttttttttttttttttttgagacagtcttgctctatagcccaggctggagtgcagtggtgcaatctcggctcaccgcaacctctgcctcctgggttgaaacaattctcctgcctcagcctcctaagtagctgggactacaggcatgtgccaccacgcatagctaattttcagtagagacagggtttgtatttttagtagagacagggtttcaccgtgttggccaggctggtctcaaactcctgacctcagttgattcacctgcctcggcctcccaaagtgctaggattacaggcatgagccatcctgcccagcctattttatactgcttatactatttatatagtataaaaatagttttaaaactattttatggtatactttttataaagtaaaaagtatactgtagtataatttttatactatataccatattatatttttataaagttgtttccatttgctactaactttttcttttgtatgtcagtttcctgatttctacatttcctgcaggtcacctggaacatcaaaagaaaaagaaaagctgtaatattgatgggtggcctactgtgcaacaagattttcatatagtgtttttggtgttatatggatgtttcttctcgcagtggatgtgtagagtcagagcacagatgggcatactctcaaaccttaataactgtgccacattgccctttgagtttattctaaaccttagcaagtcagagatcacactgtatggaactaacttctatctaaattgcatgattgattgataggagatttccaaataacatttggactgccttacatccagtaaaagaactcagcaaaatacaaataaatatgataatatcttagacagcaaatcttctcatcccacaagaggcaggaaactgctagaggaagctgccttggagaggattctttcctcccctcccgaaaggagctgaactcaaaatctctccatttcacaatagacattggagaacattttcaacagtggatttgcaccggtgttttgtgtcctagaaaaacgttcccttcaggtaggttctaataagccccttgaacaatttcccaaattgatcatcctgccttcagaacttctgaatcttcccttcaaaacacatacacacgcacacacacacacccacacacatacccctaatcttatttaacactgctggaaataaaaatctatgttctaatgagaacaaacatcagacagaatatgataaaagcaagactatcctagaaactgtggcttctaagttaaccataataccttcccggtgatgcactatatagtttcaccatccccatggcttcatgggctcccttggggctgaatgggtcactacatacctttctaacaggcttccctgtttcacactagactaggggtccccaacccctgggccatggacccacacctgtctgtggcctgttaggaaccaggccacacaacaggaggtgagtggtgggtcagtaagcattaccacctgagctccgcctcctgtcagatcagcagtggcattagattctcataggagggtgaatcctattgtgaactgcccatgcaaggaatataagttgtatgctccttacgaaaatctaacgcctgatgaccaatcactgtctcccatcgcccccagataggaccatctagttgcaggaaaacaagctcagggctcccactgattctacagtataacgagttgtataattatttcattatctattacagtgtaataataactgaaataaagtgcacaataaacgtcatgcgcttgaatcattctgaaaccacccccccttcccgcccccaccctggaaaaactgtcttctatgaaaccggtccctggtgccaaaagggttggggaccactgcgctagaccatcctcgtccatgtagcatcttgaaggacctctccaaaagcaaatatccctatattcacctcaagccacctgtatctaccaacagcctactttcttcaagatcaaagtcacactccttagtcatttcagacaaggtcctttgtacacatgatggcttcatacactcagtgctccagcaatgcagaactacttgcaactgcaggaatctagttcttccatctggaaacctgcctccttctctttacccttccttgccctagagctactgctggctttaaaaaggtgctcaggccggcacggtggctcacgcctgtaatcccggcactgggagaccaaggagggcggatcatgaggtcaggagattgagaccatcctggctaacatggtgaaacctcgtctctactagaaatacaaaaaattagccgggtgtggtggtgggtgcctgtagtcccagctactcaggaggctgaggcaggagaatggcatgaacctgggaggcggagcttgcaatgagccgagatcgcgccactgcactccagcctgggcgacagagcgagactccatttcaaaaaaaaaaaaaaaaaaggtgctctgggtagatcattgagagaaaaaaaggtgcctttgaaggacgcggcctggcagtgttcaaggcttggcaagcagatggcacttttggcaaaaacaacaacaacaacaaccacaaaaaacgaatccccttcctcctgccaatgcagcccctgttaaggcttggtgagctgagcaaagattccatttccactcccactcaccttgttggcaggatgccactgtacaaccgacagactgcacagggcagacctgctgtatggcaacacgtatcctatcccatcataagtcttccaaaccccgatcagcaaccacccctaccaggaagcattctctgatgctccttgacattcacacctgggtctgtaatttttgcttccttgagccttgtacgtggttctagtgcaatagttatcccatctgattatagctgttatcttcctacctgggcaaagatcctttggtcaggtactttgttggttatctctagttcttaaaaaggtgcctgaaatttatttgtcagttgctgatccaaaattaaaagctaacattcatgttcttttaaaaaagcacttaatacttctactatatcaaaacatcaggtttccccaaattagtaagatctaacacattttaggtaaaataaagatgatgatgatgaaaatggattatacaaactgttgaaatttgctttaattgtacaaaggggacctaacctaattatcaaatgatgcacattattactaaaaatgatgtactttcactagaaaataagtagctggaggcttgtgttttaagagttggagagagtgaacccaggatttaatcagattagattctcttttttttttgagacagagtcttgctctgttgcccaggctggagtgcagtggtgcgatcttggctcactgcaacctccgcctcccaggttcaagcaattatcttgcctcagcctcccgagtagctgggattacaggtacacgccaccatgcctggccaatttttgtatttttttagtagagatggggtttcaccatgttggccaggctgatctcaaactcctaaccttgtgatctgcccgcctcagcctcccaaagagctgggattacaggcgtgagccaccgtgcctggcccagattagattcttcacttgctctcttgttaaggctgtattcaaaatttcctttgatgtaagttagtttactttgtatgttaatggcaagaaaataataaaactaggctaatcttgtgttacagatgagaaaaattagactctaagatattaatttttccaagttcccacaacctagctatgtggggagcctggccatgaactcttgggttgcagttcttttaacatttcagtgctggtttttaaaagaataaacagctcaccatttgagattgagtattaatacatgatacccagaggtatttgggtgggcgagctctcactttacagctctttctccttctgtaccagtgacctaacttgtttggtgttagacttttaacagtaaatatctggagaatgtaccccaacttggacatatatttatttatatattacatacctaaattactaacagttgtatgtacttaatattagtagagcttaattttgttcacatatttaaggaaaatactttctagagaatgtcctgagccacagtacagccacccatctacacaaagggctaataaacttcgatcccaaagagaggggtcagcaccatctagtgaaccagtgtgaaactgcactctcaggcccaacaggggtttccaggttatcttacagaataggcttagccaaatccccagttcctgatcctgaatgttggagcctaattcccttgtcccttgtcccttgtgttctttcatctccttttcctttcttttcctttctttcctttttttttttttttgatggaatcaaatactaatttgatctgtcgcctaggctggagtgcagtggtgcgatcttggctcactgcaacctccgcctcccgggttcaagcaattctcctgcctcagcctctccagtagcttggattacaggtgctaccatgcctggctaatttttgtatttttattaattttttgtatttttcttcacgttggccaggctggtctcgaactcctggcctcaagtgacctgcccgcattggcctcccaaagtgtcatctcctttttctttgtcaaacatatctcttagccactgtattgccattgtcattctatccccctggcattacattcatacatattaaataggctagaaaaatgccataaagtccagatactttttacatctacttatgcataaggaaaaaagtgctggtatgaaatacaaaaataggaattatcagctatcacaaagtgtatatttatttgtttactggcttattttcagttttctccactacagtacatgagagc

SEQ ID NO: 96603 - DNA, 54753 bp, Homo sapiens
  misc_feature (1)...(54753): n = A,T,C or G
taatacacagggtctcactctgttgcccaggctggagtgcagtggcatgatcttgactgactgcaacctccacctcccaggttccagcgattctcttgcctcagcctcccaagtagctgggattacaggtgtgtgccaccacccctggctaatttttgttcttattttattattattatttttttgtagagacagggtttcaccatgttggccgggctggtctcaaactcctggcctcaagtgatctactcagctcggcctcccaaagtgttgggattacaggcatgagccaccacacccagcctgtatgtgactgtttcttaatgaaacagtctttgtttctgtaacatggttttagctggtatttataactactaccgcccatttgtagaataagttagttataaataccagctaaaacccttattctgtattccctttgccttcagcaagcaccttagctagttgttgtggttctttacctggcagggtgacccaaaccttcattcctgaagagtctgggccatttgtagtcctgtctagattgggttgttgtagtttcccacagaccttaatctcggagcatggtaatactgagagacgccctaaggcaccgcccatattccacacttactcttccttaccttcactagggagtagtaggccaatttccccttgatagtctggatcagtcaccccagcaacatagtaattcccttcttggccttttgactcagatgcatgaggagcccaaagtggctgggtgtcagtctgaatttccagttcagtggaatcgttgtggttcctggtggcagcattcctccctgtggaactaagacctttaggccagcagagcataaaatcttgggaataggcagcaaaaattttgctagtgggtcactagggataatggtgagtgctgccactcccatttctgccccttgattcctggatgtatgaatcctggctatgggagaaacagttccatatattggatgccgattcagagcacctataggttgtcccagtccggctaagtattaccacctagctggtgctgtaactgtgatttcaaaagaccatttcaccactctgtcaagccagctgcttcaggatggtgggcaacatggtaagaccagtgaattccatgagcatgagcccattttcacactttcttggctgtgaagtgagtcagagcactgctgggtcagagcactgctgtatggaacactatgacagtggataaggctttctgtaaatctagggatgatggttttggctgaagcattatgggcagggaatgcaaatcctatccagtgtctattctagtaagagcaaaacattgccccttccctgatggaagccatccagtgtaatcagcctgccaccaggtggctggctgatcaccccaggtaatggtgccacaatcaggggctcagtgctggtctctattgctgtcagattgagcactcagaggtagccacagccaggtcagccttggtgagtgggagtccatgttgctgagccatgcaaaaacatttatgcctgctaccatggccaatttcttcatgagcaatgacaggggtgactgggcaatgacaggggtggcaggggccagaggctgactagtatccacagaataggtcatcctatctacttggttattaaagttctcttctgctgaggtcaccctttggtgagcattcacatgggacacaaatttatcttcacaccttctgccccctcaaagaggtttgttcaccacctcacatgccaatctcttctggaaacaccctcacagacacatcacagacacacccagaagtaatgttttaccagttctctaggtattccttaatctagtcaagctgacacctaaaattaaccatcacaatatggacccctctgattaagtgttctagtcaaatcagaatcttgttggattctgaaaatctacgttttaatctatgtttctgaatctacatttcagatcatgttggatctgaaaatctacattttaagaacctacttaggcctgggtgtggtggctcatgcctgtaatcccagcactttgggaggccaaagtgggaggatcgcttgagcccaggagtttgagaccagcctgggcaacatagtaagaccctgtctctacaaataaaaaaattcgcaggatgtggtggtgcacacctgtgatctcagctacttggaaggctgaggtaggaggatcatctgagcctgggaggtcgaagctgcagtgagtggtgaaagtttgaaaatcactgtcagagcccaaagccctggtcttgttattgtatagtcagcgtcagagacaactgtgaagttttcttcactctggatgcctaggtgttaatctgggattgaggacttctgcctctaaaaacaatgattccagctttggatataagatccagttgtttatgacccctacattcttggttttgctctttaaacaacttactggccattagcgttatcttctgcactaggagcatggggtcagcaagctactacctgagatcaaattaaacccctgcctgcactttactgggacacagccacactcatcagtttacatctcctctctggttgctttagtgctgcaacaggagaagtgattagttgtgacagagccttatggcctacagaacctaaagaatttatctggccctttacagaaaaaaagttcgctgcctcttgcactagaacattgaaagggaaaaagtagagattgttttacattttacctgttaaggcttgtctggtaaaaggctgatatacaaccacaaacaacagccagtaacattaagtgtgtttttattatttattatttaagacagagtctcgctctgtcgcccaggctgcagtgcagtggcaagatctcagccactgcaagctccgcctcccgggttcacaccattctcctgcctcagcctcttgagtagctgggactacaggagcccaccaccaagcctggctaattttttgtatttttagcagaaacagggtttcaccgtgttagccaggatggtctcgatctcctgacttcgtgatccacccgcctcagcctcccaaagtttttacaggcatgagccaccgcgcccggccatgggtttttatttttaaggggcacagtaagatattctatttgtctgaaactacctatgtatgcagacttttggggaacctaaaatttatactgtgtggatcccaaatacttgcatccagatcatgtgtggtaactatttaaaatgcagattcctgctgggcactttaggaggccgaagtgggaggatcacttgagcctagagttcaagaccagactgggcaatgtagtgagaccctgtctctaagaaaaatttaaaaattaaccagatatagtgattacggctcactgcaacctccccttcctgggctcaagccattctcccgcctcagccatctgagtagttgggactataggtctgtgccaccatgctcagctaatttttttttttttttttagaggtgggtttcgtcatgttgctcaggatggtctcaaacttctggactcatgcaatccgccagcctcagcctcccaaagtgcttgattacagcatgagtcactgtggcccataaaaccattttgttgcataccaaaagtaagatggtggtgtcttgaagaaaaagaacttgagtgactatttgaattggaagctgaactagatgctcttttttcatgcaacatcatttttatttgaaagtataagggacaaactatggctatttgtatgtaagtatttagcagaaatttatttgaaaacaaaggagacttgtcacttcaaggaagacaatttatcatttgttgccaatgataaaatttgaccttttaagaaaaaagcagaatattggaaaacttgtacctgctactctgagcttgacagcttcccaatattaaagacttttctgatgagatcggtaatttttaaaaaattgtataataaaatatattaacatttggaagatctacatagctcagtgaactgatactttcccaaatgaacaatacatgtcttaagtcacacatgggtaagagatccattcaaagtgcaagataggctgctttgcctatggagtagccattcttttattcctttactttcttaataaacttgctttcactttactcaaaacaacaaaaataaaacaaagtgcaagacagaaaaatggattttaatagtatcagaatatgtgaagtttactgatatattttcaaactgcacattgcaatccactttttttttgagacagccctccaaatttgagaacagctggtatggaggctacaacaggatttgaagatagaaaacctaaattcaagttccagttctgtcacttacctgactgattttagacaagttacttaggtgcaggctctgaagtcacactgtgtgggttcgtgattttagctccaccccttgctaaatcggcctgcctgggcctcccaaagtgctgagattaacaggcgtgagccgctgtgcccggccttgcagaagctattctaagtgtaataaatttgaagggaaggtgttaacttggggatatttgtgtgtggctgttaatttgcaaagagaataaatgtgttataaaaaattgttttctttttctgtttgtgaagaaataacaaaactgaaataggccgggcaaggtggctcacgcctgtaatcccagcactttgggaggccgaggcgggtggatcacgaggtcaagagatcgagaccatcctggccaacatggtgaaaccccgtctctagtaaaaatacaaaaattagctgggcgcggtggcgcatgcctataatcccagctattccggaggctgaggcaggagaatcgcttgaatctgggaggcggaggttgcagtgagccgagatcgtgctactgcactccagccgggtgacatagtgagactccgtctcaaaaacaaaaaacaaaaaacaaaaacacaaaaactgaaaaaaaatgccctataatctagttagaatataggaaaatatctttttaaataccaaaaggtattaaaatgaaatactaaggagagtcgggcagggcctgtactcgacctcatgactgcgggaaatttctctttttttctttttttgagatggagtctccctctgttgcccaggctggagtgcagtggctgcgatcttggctcactgcaacctccgcctcccgggttcaagtgatcctcccacctcagcctcccaagcagctggaattacaggcgcgagccaccacccccggctaatttttatatttttagtagagatgccgtttcaccatgttggccaggctggtcttgaactcctggcctcccaaagtgttgggattacaagcgtgagccactgcgtccagcccctttcaacttttcacctcagttatgtcttcctgtttggacagcagtatctcatctccaacctccctggcatcttttaaatcctgttaaggttgcctctacaaaacaaaacaaaaaaaaattattaattttattgtttgtttagagactagtgtcgcagtgttacccaggctggagtgcactggcgccatctgggctcatgcagctggcaccaatgggctggggcgctccttcagcctcagcctcctgagtagctcagacccaggcgctgacaccacgcccgacacctctacattttttagggatacctttttggtaacctctaaatcataataaatgcacggaggacgggccaaagcctttttgcctggcaaatgctagtgacacccgttctcagcacccagaagcagaggccaggagcggggcggctgtggctgcgccctccgccctactccgctaatcccggggccgcgcagtccctgcgtccggtgatcaccgcgctgctcctggcgcactagtagggtctgtagcgtatcccgaggatcattccgactttcccgccccgtacgtgaggggccgccttgaagcctcttccgccacggacactcgaaactgatcttgaagcccctgccgtcacggatactagaaactgatctcgaagccccttccgccacggacactcgaaactctcccccactgttagacctcagcagccagcagcccgccgcccggcgctgcagctccctgcccgcaggagccacgtctcgcgcgactccccccacctctcgcgacacttgccgcccgtgccctgcggccctgcacgccccacccgcggtcgcgcgccgcgctccccgccgcctcaccttttcgcctggcatccgggcccgctactcgcccactgggagcgccgtggcgcctggtgttcggcgcgagcccggcggggctgcaggttccgccctgctccgccgcgccccgcccgggctggggtaaaggccgcggccgggccatgcagtgtcctcctcagggagggcaggagagcctgaggagtggcggggccgccaggtgagaccgcgtcgggcgggcggctggaccgagggaggccaggctgggtgcaggtgggcggcgcagcgctgcggggccgggatgcggggcgggggaacctcggctcccgggaagccccgagcctgggggaaccctgggcaccctgtgaaccctgtggtctgcactggctgccctgctgctgtcgcggggctgcgggcggacgacctgagcccgagctccgagggcccggagcggggcgccagggcctagggtcgcgggggccaggggcgcgccagggtggctgaggtaagtctgtgtggggaaaaggacaatggagccgaaagccggcgtctgccgtcccgccgggcccgcgcgagatgccctcctgccccccgccctacgaggcagcttagaagtgtccttctggtgcctgcggcgctgatcgttgccgagtggaaggagtgttggagaggtagaaacagctggtcagagccgcctctgcgggaggaggcttttgaggtcgcttgttagctttcatctgagattctggctatgggagtgggcgtgcgtgtgcgcaccgtggccccaggcgaggtttcgtcttttcccaatttgtaccaccacccattaagcgacttcaaggatccatcaaaaatgattggttcctaagcgaacagttttattttttgtattttaagattccattagttgtgtaatggtaggggcctggagcccaaaaccttggcgttactaggacagggcatgacccagctgacttggagtaaattttctgcctttaactacatttagattggaaaytagggtaaaatgtttttgttgcaatctagtttcgagcatgtggtcctgtgattctgggtttgttttataacttatggactgagtaaaattacccagtttactgagagaattgagaactctgtgcaatggttgatctaatagaagcattttatttaaagcttccacccatccagttgctaatttatgttatttctcttttaaattatgtagattttgttgttgttgttgttgcagaaatggctccgtaaaatgattagttttgtgcgtgtgtgtgtgcgaacagttacacagttaagttcrttttcctgatagttttcttttgtctttagagagcgaaatgtcatcagtgcagtcacaacaggagcagttgtcccagtcagatccatctccgtcaccaaactcatgtagttcctttgagctaatagacatggatgctggcagcttgtatgaaccagtttctccccattggttttattgtaagataatagattctaaggagacatggattcctttcaactctgaggattcacagcagctggaagaggcatatagctctggtaggtgaaaattatgacttggaatagacaaagactctcccctcttcaaactataatataatggtccttatagtgagtgctatgaaaaccaaattttagatttttccagttacataatttcttacagcattttatatagaacttctgcactaatacctagccaatcaataatattcaagaatttggtctgtattttgaaaacagtatctattattatttctgcatagttacccaataatttttttttccttagagttgggggcctaattatattgtctaggctggtcttgaactcctaggttcaagcaatctttctgactgggcctcccaaagtgctgggattacaggcgtgttacaccctgtgcccagccccccagtaatatctttaatgttctagcttatgttttactttgttttataaagaatgtgtaaggctgggcacagtggctcacacctgtaatcccagcactttgggaggccaaggcgagcagatcacttgaggtcagagtttgagattagcctggccagcaatggtgaaaccccttctctactaaaaatacaaaaattagctgggcggcggggtttgtgcctgtagtctcagctacctgggaggctgaggcaggagaattgctcaaacccgggaggcggaggttacagtgagccaagattgtgccactggactccagcctgggtgatagagtgagacttgtctcaaaaaaaaaaaaagaaaagaaaagaaaaaagtatgtatagagtggggtgcagaagaatgaactctctaacttgtcacttgtcttttcttcttttataaaacaagaatgattctatttatactgaatcatcatgatggttattaatttaccttatggttcctcaagcaaattcagaaaaatcacattatataatttttttaaggggcactgctatctttccccagaaaaagaacaaaactgggtagtatttttttcatatttcattaaaatcaggaatggttttgacggtttgtaaagtaggtagtgaaaaagatatgaattaaattccattttgtttggtgtttagtcaagtaggaacttttcattcatgtgtttcataacattatttagagtataactgagaattgtatgttgggagatttattttgaaatatgtacttcttttccccttttcaatccttgaaaggaaaaggttgtaatgggagagttgttcctactgatgggggcagatatgatgttcatttgggggagaggatgcggtatgctgtatactgggatgaactggcatcggaagtgagacgatgtacgtggttttacaagggggacaaagacaataagtatgttccctactcggagagcttcagccaagttttagaggtattcttttgactctttttttacttattctttctttctcttatttaataatcttttctttcctttgtaatttattttgtgaaatttccagaaagactttggttctgtctgcatcacattataaaacataataaagcatttctatttacaagcaagtttcaggataaagtagtcttattttcagattttttttttttttttgagacggagtctcgctctgttgcccaggctggagtgcagtggtgcgatcttggctcactgcaacctccacctccccggttcaagtgattctcatgcctcagcctcccaagtagctgggattacaggtggccgccaccacacctggctaattttttttaaggggcactgctatctttcctcagaaaaagaacaaaactgtttgggtagtattttttttcatgtttcattaaaatcaggaatggtttgacggtttgtaaagtaggtagtgaaaaagatatgaattagattccattttgtttggtgtttagccaagtaggaactgttcattcatgtgtttcataacattatttagaatataactcagaattgtatgttgggagatttattttgaaatatgtacttcttttccccttttcaatccttgaaaggaaaatattgtaatgggagagttgttcctactgatttttattagagatggggtttcaccatgttggctaggcttgtctcgaactcctgacctcaaatgatctgctggcctcggcctcccaaagtgctgggattacaggtgtgagctactgtgcttggcctttttcagattttaaaatacgatggaaatggttgtggtgttttaaggtgtaaaaaaagaaaaaaatactccgggcctggtggctcacgcctgtaatcccagcagtttggggggctgaggtgggcggatcacctgaggttgggagtttgagaccagcctgaccaacatggagaaacctcgtctctactaaaaatacaaaattagctgggcacggtggtgcacgcctgtaatcccagctacttgggaggctgaggcaagagaattgcttgaacccgggaggtggaggttgtggtgagtggagatcgcaccattgaactacagcctgggcaacgagcaaaactccatctcaaaaaaaaaaaaaaaaactggtgggcacagtggctctcacctgtaatcccagcacattgtgaggccaaggcaggaggatgacttgagcccaggaatttgagaacagcctgggcaacaaagcaagaccccaccactacaaaaaaaagtacacgcgcacacacacacacacacacacacacacacacaaatacaaatgcaaactgtattatgctatggtcacaggattgatcttttttagcttttatttttcttgctctgaaaactgaaatttttctttaaattggagtagagcgttagtattttttgttgttgttgaaacaagagtgtcgttctgtttcccaggctggagtgcagtggcacgatcttggctcattgcaagctctgcctcctgggttcttgccattctcctgtctcagcctcccaagtagctgggactacaggcgcccgccaccacgcccagctaattttttgtatttttagtagagacggggtttcaccgtgttagccaggatggtctcaagctcctgacctcgtgatccgcccgcctcggcctcccaaagtgctgggattacaggcgtgagccaccacgcccagcctttttcttgtttttggttttttttttttgctttttttgtttttgtttttgtttttgtttttgagacagagtctcactctgttgcccaggctggagtccagtggtgcgatctcggctcactgcaacctctgcatcctgggttcaagcacttttcctgcctcaccctcctaagtagctgggattacaagcgtgcctcaccacactggctaattttttttttttgagacggagttccactcttgtttcccaggctgtagtgtagtggcgcgatctcagctcaccgcaacctctgcctcctgggttcaagcgattctcctgcctcagcctcccgagtagctgggattacaggcatgtgccacaatgcctggctaattttgtatttgtagtagagatgggatgggatttcttcatgttggtcaggctggtctcgaactcccaacctcaggtgatccacccgccttggccttccaaagtgctgggattataggcgtgagccaccgcgcccggctcacactggctaatttttgtatttttagtaaaaatggggttttgccgtgttggccaggctggtctcgaatgccagacctcaggtgatcttcctgccttggcctcccaaagtattgtgattacaggcatgagccaccacgcctggtctagaacattaatattaatatattaaaatgtgaacactaattatctagcgtagatgatggaattaggagtatttttccccctttgtcctggtgctactatcagttgtaatttcaaaataatttaaaaataggctgggtgctgtggctcatgcttgtaatcccagcactttgggaggccgaggcaggcagatcacctgaggtcaggagtttgagaccagcctagccattatggccaaaccccgtatctactaaaactacaaaagttagccgaatgtggtggcgggtgcctgtaatcccagctacttgggagactgaggcaagagaactgcttgaacctggggggcggaggttgcagtgagccgagattgtgccactgcaacccagcctgggcgacagagtaagacaaacaaaacaaaacaaacaacaacaacaacaaaaagatttaaaaataaatttgataaattggagtaggatattcttattgaaactcattaatacatagtattcttgttaataggttcagtttaataggaaagctactagagaactctaatgaaatgtgttttcttttaaggaaacttacatgcttgctgtaactttggatgaatggaaaaagaaactggaatctcccaacagagaaattattattttacacaatccaaaggtaaaacaaagcatttctcttgtcgggataaaaagttaattgcgctattagggagaactcaattggtttcttttgctaagcactctgtgtaggataacctttgtcaaattttatattgaattcacagttatgaaacttaaaaacttgtagccactactgttatttacccaactcagcttatacaaaataattttcttatggaaaattatgccactgtagaataagaaaatcactgacatattatgtgagcatgtcttccatgtagaaagggactattgacagatctgttagcctaatatattttcacggttctcatttcaagccatacgagttgtatatcaaaactccagttcagattttactgtgtggtttgaaagacatgattctacacttaaaactgcattgtatagagatgattgtattgcagaatatttttattgctctgatctgttctgtttaagcttatggtgcattaccagccagttgcagggtctgatgattggggttcaacacccayggagcagggtcgaccaagaactgtgaagagaggagttgagaacatctctgttgacattcattgtggtaatgttaatcgtttattttttcttacctttggatgtatttgtttactccttaaattgtgacctttttctgtggatttagattacctcaaggcttaaaaatcatctttaatcatatgggtttattccaagttgagattagcatcacttcgtctactaagaatcttaatagatgtaaaaatatcttttaaaacatatggtaggatgggtaaaatttggcaatactatccaggaagtcactaagtacagatgaactgatttagtcctaattccaagaagtgtgattccacctacttgactagaaatttatacctggtaataactccttgtccttgaagattttcaactaaggaaaactgtttttcagcaggacctgattatgcactgctatctaggtagggtcacttatggttttataatatatttaattggattataatattccttttttcttgtctcttggacaaaatcctagctttactgtaatttaaaaagatgagtttaaaatttcaggctttaaaaacataccaaacattgataaaaatgaaatactagataaaagtattttatcaatgttcagttgcctggattcaataactgtattatggttatgtaagataatatacttaggaaatacacattatggtattaaagggttaaagaggtatggtgcatgcaacctgatgatgtatgtagtctgctttctaatgattcagaaaaataaatgtgtgtgtgtgtgtgtgkacacacacagagaatcataaagcaaatgtaattgttaaaaagttgaatctctgtaaaaagtatgtgggagtgtctgtactatgctttctagttttctgtacatttctagttatttagaaataaaaagttttaaaaacctggctgcacgtggtagctcatgcctgtaatcccagcacttggggaggccaaggtggaaggatcacttgagcccaggagttcgagaccagcctgggcaatatggcgaaaccctgtctgtacaaaaaatacaaaaattaactgggcatggtagcacacatctgtagtctcagctattttggaggctgaggcaggaggatcactcgagcccagaaggttgaggctggaatgagtgtttatcatgccactgcactccagcctaggcgacagagtgagactctgtctcaaaaaaaaaaaaaaaaaagtttttaaaacctgaaaaaaggccaagtgtgttggctcacggctgtaatcccagcactttgggaggctgaggcgggcgggtcaggaggtcgagaccattctggctaacacggtgaaacaccctgtctctactaaaactacaaaaaattagccaggtgtggtggcgtgtgcgtgtagtcccaactactcgggaggctgaggcaggagaatcgcttaaacccgggaggcagaggttgcagtgagccaagatcgtgccactgcactccagcctaggcaacagagtgagacctcaatatattaaaaaaaaaaaggtgtcctctaaaacctgatagtattcaaagtttaattgttccaattagggtgtcttattctaactggctaatggttctaaacataaactagaattgtattgtggaaggttgagactgatgtgatatgaatttcaaacaacagtgtatttttttttctttaaagtattgggtggtgcttgtttataagaaccagaaagttagggtaggaattcaactgcaagactgttgttatattgtcatgtgattaaaaaaaaaatgaaacagttctcatgatgccgacgttttgaagtttagctttctttttttttccttttcctttttttttgtttttaaatatattattttctttcctgagacaagagctttgctctgttgcccaggctggagtgtagtggtgtaaactcagctcactgcaacttctgcctcccnnnnnnnnnnnnnnnnnnnnacctgtgacagagcaagactctgtcacaaacaaaaaaaaaaccataatttaaaaaaaaaaaaaaaagagtttttttttttggagacagagtcttgctctgtcacccatgctggagtgcagtggtgtgatctcggctcactgcaacctctgccacctccagggttcaagtgattcttctgcctcagcctcgcgagtagctgggattacaggcatgtgccaccacacccggctaattttgtatttttagtagagatgaagtttcaccgtgttggtcaggctggtctcgaactcctgacctcatgatctacctgccttggcctcccaaagtgctgggattacagccgtgagccaccgcgcccagccgagttttctttttcagagatcagaaaaaaaagaaaaaagtcctgaaaaaaattttacagacttatttcaagataaattagaaaccaagtaaaatcagtgtatttttgctaggtacttaaaggactattttgtatcttttaaattatctgttcatcttttaacttgctcatatttataaccttttcatgatgaatgatattagaatacatgactaattatacagaataattttctttttaatttcatttataggagaacctttacaaatagatcacttggtttttgtagtccatgggattggaccagcttgtgatctccgctttcgaagcattgtacagtgtggtaggtttgcaaagcatgtgagagaatattaatcagtgctcttgtgagctgagataaagccttgtctttggtctattgtcttagctgcataagaagatttggagagttaaagacaggtggcaaggtagtaaagcttctcagcttagacctgaagtgctaggaaattcctgagtctaatagtttatactcttaactattgtaatagtctcaaatgaacaagcagttaatccctataaaattgtgttttatgatgtggtggtcctatttctaactatttcaaatttacagggaaccataaagatgatagagtttaatgaataacagaagcatcaatcatttttgtaattcatactgtgataaacctttgatattgtaattggaggatttaagtcattagtataactagattttgaaaggtgtcctctaggctgggtgcggtggctcacgcctgtaatcccagcactttgggaggccaaggcaggtggatcatgaggtcacgagttcaagaccagcctggccaagattgtgaaacgctgtctctactaaaaatacaaaaattagccgggcgcagtggcaggcgcctgtaatcccagctactcgggaggctgaggcaagagaatcacttaaactcggagggcagaggttgcagtgagccgagatcgggccactgcactccagcctaggcaacagagtgagacctcaaaaaaaaaaaaaaaaaaaggtgtcctctaaaacctgatagtattcaaagtttaattgttccaattagggtgtcttattctaactggctaatggttctaaacataaactagaattgtattgtggaaggttgagactgatgtgatatgaatttcaaacaacagtgtatttttttttctttaaagtattgggtggtgcttgtttataagaaccagaaagttagggtaggaattcaactgcaagactgttgttatattgtcatgtgattaaaaaaaaaatgaaacagttctcatgatgccgacgttttgaagtttagctttctttttttttccttttcctttttttttgtttttaaatatattattttctttcctgagacaagagctttgctctgttgcccaggctggagtgtagtggtgtaaactcagctcactgcaacttctgcctcccgggttcaagtgattatcctgcctcagcctcctgagtagctgggattacaggcgcacaccaccatgcctggctaatttttgtatttttagtagatggggtttcgccatgttggccaggctggtcttgaactcctggcctcataaaatccacctgccttggccccccaaagtgctgggattacaggcatgagccactgctcctggcctgaagttagccttcttttgatgaaatattttgtatggtaaaagcaagttgttaggccaggcacggtggctcacacctgtaatcccagcactttggggggccaaggcaggcagatcacctaaagtcaggagttcaggaccagcctggccaacaggacaaaaccccatctgtactaaaaatacaaaaattagctgggcatggtggtatgtgcctgtaatcccagatcctcaagaggctgaggcaggagaattgcttaaaccagtgaggtggaggctgcagtgaggtgagatctcgccactgcaccccagcttgggttacagagcagtactccatctcaaaaaaaaaaagttattaaagaaacatcttttcctatatgcattcataatttttcctgaataccactttatttttgacggaagtcagtatgtgttctgtgcaaatgtagttagagtataattacatgatttgttgcatccagattctacagatttgttacttcattgttgatgcataagttaattttcttttccagttaatgattttcgcagtgtttccttgaacttgctacagacacattttaagaaagcccaagaaaatcagcagattgggagggtagaatttcttccagtcaactggcacagtcctttgcattctactggtgtggatgtgtgagtaatacttaataccttcgagttgttagctgtgattatattttctgatcattgctatgcttggggacgtttttatgctatagctgactgaatatttaaaatttcttagagatatgctattaaatgctgatcagtcccttggtttaattagccctggttaggagtggagagctgtgtgtatcttcagtatgttttactggctcactagtatttactgttacagcttcattgtatctttagcattaaagccaaatattgctatcttcccatagtgtataaccatttccatcttcagatgtcaaaagctagccataccccaagatgtacaaagtattttgttgttccttttgttattatatttaaataatatttgtccaaatttagaaaaaaggggggatttctcaaacattaaactactagcatttaaaacttgaggtataattggtacagtgacttttaagtgatggctttcttaaggtacaagaccattagttttgtttgtaaattttatggtaatgacagagaatgttgcttaaattgaggatatctagctatggggctctccagcaagtagtgtgtttctaatgtagttctagaatagaaccaggagatgcaggaagtagtcagcattgtttccatgctggtctcagaaatggcttttctgattctgtgtctcagttctcagtaccctgtgatttgggtatattctgtttgccaaacactgtggtggggtccggattcttcaatatttgagcagatgctaagaggttactaagggcacgtagcccttataaattgcagaagtggttgaatatttgaggaatctttctgggaattttaagaaacctttaactggatgttagattttgtcagcgtggtcttcctctcccagatatgaattctgtttgcttttggcacctggcactcacacctttttctgcttttagaaattgtgcattgagagagggagctgatctctttatcgtttgacctgtaattaaaaaaccttactgctgagaattccaggaaaagccttttacattttttgttttgtctttttagaaaacttttttttattagagataattttgttcacagaagtagtatatatgatgaatccttgtatactgattacccagccctaacaagcctcaacacatggctggttctgcctcaaccgtatcttcataccttatctaatgccccttcatcaccatatgatttttatcttagacatcctgtaatttcatctgtaaatgtttcagtttgtatcttttttttttggttggagtgcagtggtgtgatcacagctcactgcagcctggacctccctgggctcagatgatcctcctgccccagcctcccaagtactgctgggactacaggcatgtggcaccacttgcagctgattttttttatcttttttttttttttttgagatggagttttgctcttgtccaggctggagtgcagtggcgtgatctcagctcaccgcaacctccgactcccgggttcaagcagttcccagtcttggcctcccgagtagctgggattacaggcatgcgccaccatgcctggctaattttgtatttttggtagagacagggtttctccacgttggtcaggctggtctcgaactcttgacctcaggtgatccgcccgtcttggcctccccaagtgctgggattacaggcgtgagccaccatgcctggcccaatccagctgatttttctattttttgtagagatgggcttttaccatgttggccaagctggttttgaactcctgggctcaagcaatctgtctgctttggcctcttaaagtgctgggattacaggtgtgagccacagtgcctggcctgaacagtatattttattttttattttatttttgagatggagtgtcgctctgtcacccaggctggagtgcagtggcacggtctcggctcactgcaacctctgcctcctgggttccagcaattctcctgcctcagcctcccaggtggctgggactacagtcatgcgccacaatgcccagctaattttcgtatttcttagtagagacagggtttcaccatattggccaggctggactcctgacctcatgatctgcccgcctcagcctcccaaagtgctgggattacaggtgtgagccactgcgccggcctgaacagtattttttttgttgttttttttgagacagagtcttgcactgttgcctgggctggagtgcaatggcacaatttcggctcactgcaacttccgcctcctgggttcatgtgattctcctgcctcagcctcccaagtagctggggtaaaggtgcacatcaccacacccggctaattttttgtatttttagtagagacggggtttcactctgttggacagactggtctcgaactttggacctcgtgatctgcccgcctcagcctcccaaagtgctggcattacaggcgtgagccaccgctcctggccctgaacagtatattttaaaggacttaaaaaatgtataaccataacactattatcacacttaaaaatttcttaatatcatcaaatacctagtctgttcaaatttccagttgtctattatatttttatacatattttatacatatttttatatacattaattatataattatatacattaatttttgtatacatatttatataattacaaacatgttttaaactgggatccaaataaagcccataccttgcaattagttgatatgtcttttattataagtctctcttgggctgggcatggtggctcatgcttgtaatcccagcactttgggaggccgaggcaggtggatcatctgaggtcaggagtttgagaccagcctggctaacatgacaaaaccctgtcactactaaaaatacaaaaattagctgggcatggtggcacatgcctgcaattccagctatttgggaggctggggcaggagaatcgcttgaacctgggaggcagaggttacagtgagctgagatcgtgccactgccctccagcctgggcaatagagcgagagtctgtctcaaaaaaaaaaaaaaagaaaagtctctttaatttattttcttgattaccacttacctctctgtctacatctgttgttttcttgcagtttatttatggaagaaatgggtttgacttgagggttttttatactctgaattttgcttatcacattcctctggcttcattacacatgttcctttgtcctctttttgttttttcctataaatcgacaattgtttgttataaaatgtttaagcttgaaggcttaaaattggaagcagctattaagtgtatttaggtttcctgcttawattatttttccttttttcagagatctgcagcgaataaccctgcccagcattaaccgcctcaggcacttcaccaatgacacaattctggatgtcttcttctacaatagtcccacctactgtcagactattgtggacacagttgcttctgaaatgaaccgaatatacacactttttctacagaggaaccctgatttcaaagggggtgtatccattgctggtcatagtttaggtaacaaaatgagttctgtgtgaccagagaagactatcacattttaaagacacctgtttttgaagcacaatgtcttttatcagtatgaaattcagaggtctagaagtggtctgtggtcaggaaatttggaaggggttggaagggtggcggtaaattggaaagaaagactccttgctgtatagatttgcttacatatgtaattggcttatgccttttttgtataacagagagccatttagtgctaatgcttagaaattgtcccttcttctattttacttataggttcgcttatattgtttgatatcctaacaaatcagaaagattctttgggggatattgacagtgaaaaggtaatttagatgttcagctaggttttcttgtagttttccttagtaaggatttatagattttagacttattttttgtttttagctgagtttagtttcatgtcatgacattacatttacacttattttcattttaacagacttttaattatctctgtcattcttggatgatagaaggaagatagtaacatgcttctacaaataataattgttatattctaaaccatagttatcttattttcttttgtgaatatgcaccactggctgggcgcggtggctcatgcctgtaatctcagcactttgagaggctgagactggtggatcaccttaggtcaggagttcaagaccagcttggccaacatggtgaaaccccatctgtactaaaaatacaaaaattagctgggcatggtggtgtgtgcctgtaatcccagctacttgggaggctgaggcaagagaatcgcttgaacctgggaggtggaggttcagtgagctgagatcgtgccactgcactctagcctgggtgacagagtgagactccgtctcaaaaatatgcactgctgatctgttaatagagttatggaatcattgagctaaatgaagtttgcatatgaacaaatgaatgaattggctacaaattgatatgatttatagaaactctgttcgaaagtattggggacttgatgtttaaacattattttagtaaaaattcctataaccatgtatcatctgtaggattgatttggtacctatttctcctgttggaccatgagttcctccagagcagagcttttgtcttagactattttatttctatttctatttcttttttttctttctttttttttttttttttgagacagtctcttgctctgtcacccaggctggaatgcagtggcatgatctcggctcactgcaacctctgcctgcagggttcaaatgattctcctgcttcagcctccccagtagctgggacaggcgcatgccaccgtacccggctaatttttgtatctttagtagagacagggtgttggtcagactggtcttgaactcctgaccttgtgatccgcccacctcggcctcccaaagtgctgggattacagatgtgagccaccatgcccagcctagactgttttatttcttaagcactgttttcctaatttcttaagcactgagctcccttaaaattcagcaaatgtttgttaatgatgatgaatattttactaatttctttaaaaacatattttcaattgaagttgcaaaaccttggaacctcttaatttatatcttgcataaatgacaatttgttaaagttaagatacattgctgtggaaatctatgtatttctttactgcaaaatagtattaaaggaaactaaatgaatttcaagaatatgagctttataatttaatttttaggattcgctaaatattgtaatggatcaaggagatacacctacactagaggaagatttgaagaaacttcagctctctgaattctttgatatctttgagaaggagaaagtagataaggaagctctggtaaaaataatcttttaaaactttatgccaagccattttcagtatttttgtttatcgtgtttactaagagcctaccctttagacactttttagtcataaatactttatgattaatgttccttagcattatttatttgctttttatcatatcaagtgacctttgctttgtggaagttcaaaggtcagatggccatattgatattcatagagcaatggagcagactaaccagtacggctcatagaaaacatgagtgcaagaacaaacaaataaataaccattagctattccaactctaattttctgttgtactttcaagagctctactgttatttgcgagtagctgggattacaggtgcccgccaccacgcctggctaattttgatatttttagtagagatggggtttcactgtattggccaagctggtctcttggccaggctggtctggaattcctgaccccgtgatccacccaccttggcctcccaaagtgctgggattacatgtgtgagccaccgtgcccagccagctgatttgtttttttttttttttttccatttttgtcgtgcctttttctggtttgtgatacattcactcatttaacagatatttagaaaatgcttactataccaagtactggatagaytggtgaataagacatatgatccctgacctcatagtgtttatagtttactggggaagacacatgttaaataatcacacacatcatggcaattacaataagtaagtaggaaaagtacaccgtgttgtaagaattaacctggtctcataaggtgcaggaaggcttccctaatcaaatgagtgatagctggctgggtgtggtggctcacgcctgtaatcccagcactttgggaggccgaggtgggcagatcacgaggtcaggagttcgagaccaatctagtcaacatggtgaaaccctgtctgtactaaaaatacaaaaattagctgggtgtggtggcacacacatgtagtcccagctacttgggaggctgaggcaggagaatcgcttgaacccaggaggtggaggttgcagtgagctgagatcacaccactgcactccagcctgggcgacagagcaagactccatctcaaaaaaaaaaaaaaaaaacgatgagtgacacttgagatcttgattgttagtctgttccatacttgtgtgtttgctgtatgttctcagtgcttgcgttcatcagcaggagtataatccttctcaggcatgtgacatctaagtcagtatagaaatcaaggaagtttttttgttttgttttgtttttttgagacggagtcttgctctgttgcccaggctggagtgcagtggcgcgatctcggctcactgcaagctctgccttccgggttcacgccattctcctgcctcagcctcctgtgtagctgggaatacaggtgactgccactgcgcctggctaattttttttgtatttttagtagagacggggtttcaccatggtctccatctcctgacctcatgatccacccgcctcggcctcccaaagtgctgggattacaggcgtgagccaccgcgcctggccagaaatcaaggaagatttttatgtcctgaagtccttagatacccaacttctctgttttttttttttttttttaacaataacaatgtctatattattgtaacattgatattataagtattgatattttctattcttttttaggctgtttcatgaataaaacaggtccttttttctggaagttattctatgatgttttactactagagagacaggcagcaacagagtgcctaggccttgttcctcttaggggacaggattgattttattttgtctagaaataagaaagacttgattttctatgcctaggctttatgtacagaccgagatcttcaggaaataggaattcctttaggaccaagaaagaagatattaaactatttcagcaccagaaaaaactcaatggtatgtgcctaatacagcttgttggactaaacaattctttgatgtccatagtgtgtccttgtgctttgtgggatgtttactctggggagccaagcagttttttggtaattgatctttggctctttttttttgagacagggtctcgctctgtcactcaggctggagtgcagtggtgtgatcccagctcattgcaacctctgcctcccgggttcaagcgattctcctgcctcagcctctcgagtagctgggactacaggcgcccaccaccatgcctggctaatttttgtatttttaatagagacggtgtttcaccatattggccaggctggtctcaaactcctgaccttgtgatctgcccgccttggcctcccaaagtgstgggattacaggtgtgagccacccgcctggccgatctttggctctctttctagaaattaaacacattttcttttttacattctttttttttttcttttcctggaaatgaaatctcgctgtgttgcccggggtggagtatagtgggtggtctcggctcactgcaacctccaccttccaggttcaagcaattctcctgcttcatcctcttgagtagctgggattccaggtgtgcaccaccatgcccagctaactttttgtatttttagtagagacggggtttcactatgttggccaggctggtcttgaactcctgacctcagatgacccatgtgcctcagcctcccaaagtgctgcaccgctcctggcccttctttttttacatccttaaaagtattattagcttcagaagtcttctctcctctggaattctcctascatttatttatttatttattttttgcttttttcttttcatgagagttttaccaatatctacttcacatcacataccataaaattcacccttttaaagtttacaatttaatggtttttagtatattcatagagttatgtaaccattaccactatccaatttcagcacatttccattgtcccttagggaaaccccatacccatttgctgtcactccccattgctccctgcccccagcctctgtcaaccactaatctactttctgtttctacagatttgcttattttggacattccatataaatggaatgtccttttgagccatgtgtctgacttctttcacttagcataatattctgaaggtttacctgtgttaacagtacttccacattcagtttttctggtcactgaatttctaactccatatcttattagttagtttttttctttttgagtcggagtgttgctctgtcgcccaggatggagtgcagttgcacgatcttggctcaattgcaacctccgcctcctggattcaagtgattctcctgcttcagcttcctgagtagctgggattacagacacgcgacaccacacccagctaatttttgtatttttagtatggggtttcaccatgttggccaggctggtcttgagctcctgacctcaagtgatccgcccacctcagcctcccaaagtgctgggattacaggcgtgagccaccatgcctggccagtagttagttcttttccaactttttagcaggtggctcatttctttttaaagactcagttcttggcccagcccatcgacatcctacttcccttgattacagaggcacagcacttcatagaactctagcaatcctcagcattatcttcccacagtgccctgctattgttttctcttatgattgttgcctaaagtttcaacgctactgaaatggctatgtacaactttcatcattttagagcatctaagaatgtcaattaacaatttaaggcaataatttaatcttgttttctgaggaaatcttcctagaatttttggctgccatttcagaactttcccaagggtcctttcaaaccagtagaaaactatataatcctttggctatacttttactatatagtagctccccatactttttttttaaatagagactatgttgcccacgttggacttgaactcttgggcttaaacaatcctacctacctacctacctcagggtcctgagtagctgggactacaggtgcatgcygtcatgcccagcttctccacataactattttttattctttagggtattaagagaccagccccgcagcctgcttcaggggcaaacatccccaaagaatctgagttctgcagtagcagtaatactagaaatggtgactatctggatgttggcattgggcaggtaactaattctctttgatcattttacagcctgctatttgtatggtagaaacagatgtaacttttgttattaatgagagatgcttttattttcctcctttgaggtgtctgtgaaatacccccggctcatctataaaccagagatattctttgcctttggatctcccattggaatgttccttactgtccgaggactaaaaagaattgatcccaactacagatttccaacgtgcaaaggtttcttcaatatttatcaccctgtaagcattgtacagctattgtggttttacctaaatatcagggcttattgttaaagaacataggattttctgttgtgttgatttttttttcctattccattgtctagcaatgagacaacttataatagtattgatttggaagtgatggagcagaactgtacatttttttaaatgaacttatgattattgtttaagatacatagttctggttgtacatggtgactaatgcctgtcatcccagcactttgggaggtcaaggcaggaggattgcttgagcctaggagttgaaggctacagtgagccatgattgcaccactgcactccagcctgggtgacagagcgagacctcatctcaaaaaaaaaaaaaaaaaagttatatagtttccagactgtgcttagcagaggtaaaygtagctcttgtttttcctatgtagtttgatcctgtggcctataggattgaaccaatggtggtcccaggagtggaatttgagccaatgctgatcccacatcataaaggcaggaagcggatgcacttaggtaagtccgagcatagaacttgataattctagaccttttggccagtgcaaagggcatcattcactctgttcagctatgttggaccctaagctctttgtaaatcatttaatgttctttatttatatgtttcagaactgagagagggcttgaccaggatgagtatggaccttaagaacaacttgctaggttcgctgcggatggcctggaagtcttttaccagagctccataccctgccttacaagcttcagaaacaccagaagaaactgaagcagaacctgaatcaacttcagagaagcctagtggtcagtgacactgtacacattgaccagctgccagataagagggatgccatggtgtggcgtttttcatagttaatttaatttaatttcacatttaatttcatagttaatattgcattcttttgctttagttttcaacttctaaagagctctattcctgcttgcatttagtataaacccaaggcaaatgacctagctatcaatggtataggtaatgagatgtgttgcgcaaaagcaaaaaaggggattggacaaaattactgtgacctgagaaggagcttgaaggagattgagaggaggaagatgggagagagctctctgaacagagagtagctcattctctggtaaacttggagtgtgaggagaagttaacaggataaccctgaaggccaaaaggttttagattcttattatggttcttccatatccagatgttaacacagaagagacctctgtggcagttaaagaagaagtcctgcctatcaatgtggggatgctgaatggaggccaacgcattgactatgtgctacaggagaagcctattgaaagttttaatgagtatttatttgctttacaaagccatctatgctactggtaaatgttgtttatttttgtctgttttgtttgtttacctgtttcatmgatatwtgatagmtgtagaaaaaggaggataggccaggtgcattggctcaggcttataatctcagcactttgggaggccaaggtgggaggattgcttgagttcaggagtttgagaccggcctgggaaacatagcaagacctcatctctacaaaaactaaattagctgggcgtggtggtatgcgcttatagtcccagctacttgggaggctgaggcaggagagtcacttgagcccaggagtttgagaccacagtgagccatgatcacaccactgcactctagcctgggtgacagagcaagaccctgtctcaaaaaaaaaaaaagacctgtgtacctttggaattaaaatgacttctcatttagacagcacaagcacaatcatgtcatttcaagaatctggtttaaacacactgttgttttattttgcagctgggtagaacatggttgaggctaatgatgccaacaaccataagttcaattatcttggtgttaaaaatgtgtcttttggccatttaggtgcacatgaatgaactggaacaaatattactgttgctggaagtcttatagcaaacccatttgaaagcatttatggtagctgtgacagaattaattattattattttatcattatttgagacagggtcttgctgtgtcacccaggctggagtgcagtggcatgctcatggttcactgcagccttgacctcctggactcaagtgatcctcccccctcagtctccctaataagtaggatgaccgttgtgcaccaccatgcccagctaatttttgtacagacagggtttcgccatgttgcccaggctggtctaaacttcaagcaatcaatccgcctccacctctgcctcccaaagtgctggaattacaggcatgagccaccacgcctgggcagaattattattaaatataattggttacctgatggattgtagaatggattaatgatgcttattgaaattcaggccgggtatggtggctcatgcttataatcccagcactttgggaggccgaggaaggaggattgcttgaggccaggagttgaaggctgcagtgagccatgatggtgccaccgcaccctagcctgagtgacagagcgagaccatgtctgaaaaaaaatagtataaaataatactaattaatccctgaagaagttgacataaaaataaagtaagggaaataagatgggtcagagataagtgttttaaaaatgaaagctcagaccagcatggccaacatggcgaaatcctgtctctaccaaaaatacaattagccaggtgtggtggtgcatgcctgtagtcccagctactagggaggctgagacaggagaattgcctgaacctgggaggcagaggttgcagtgagcgagatcacggccaccgcagtccagcctgggtgacagagcgagactccatctcaaaaaaaaaaaaaaaaaaagcaagctcaaaggtcctaagaataatttttcccttgaattctgatgaggaattatcatctgatgcaatcactatcgtttgtatataatatatacagtagaggccaaaagcaatcttgtaaggggctaaaataatgctaagaatgatctctggtgatctggcttgatagaaaagaaagcagagttcttttaatatttctgtgtgggcagtacattcatatggtttgaaattcaaagaaagaaaaataatgaaaagcctcttttttattttgtttcttgcaatcagtttcttccccatatacaactaatgtaaaatgtcttccagccatctattttatgcctccataataaatatatgtatgtgaatatattctttcccttattttaaaaacataaatagtaaattaaaggcaatgttctgtgccttgttttttctactagtatatcttggcattttttaacctattatatgttgtttcctcatttttttttttagctgcatagtcttccgttatgtaaatacaccataatttatttaagccgtcctctactcatggactttcaggtttccttttcttttgcacacaccttgttcatgtcatttcacctactcatgagtatatctgtaatgtaaaatacttcgaattgaaatcaatggcataaagggtatatacatttgtaaaatttgataaatattgacaaataagaggttgtacctttttatactcccagcaataatgtacgaaagtgtgtgtttctccacagcttttccaacagttttaatatttttaaatctttgccaatttgttgggtgaaaatgtacaatatactgtacatattaaaagaatacacatttgatgagttttgacatgtatacacctgtgaagccatcactacaatcaacttaacatattcatcactctcaaaagtttccttgtgccttttgtaatccctcccttcttttctcttccccactcctcctaatttccagggagccactgctctgttctgccactgtagattagtttgcttatgacttgtatttggaatcctacagtatatacttttgttgtttggcgtttagcttatttatttatttatttatttttttgagatagtcttgttctgtcatccaggctggagtgcagtgacacaatcatggctcactgttgcctagatctctgggctcaagggatcctcttaggctcaagggatcctcccatctcagcctcccaagaagctgggactgcaggcatgtgccactgggcctaattttttttaaatttattttcgtagagatggggtctcactatgttgcccctgctggtgtcaaactcccggcctcaagcagtcctcttgctttggccccccaagctgttggtattatagacatgatcaatgttgtgtatatcaatagcatatcctttttattgctgagtagtattccattatatggatatatcagtttgtccatttacctgttgatggatattttgatagtttccagtttttggctattaacaaagctgctaggaacattcatgtataagactttacatggacatattcttgggtaaataggaatggaatgggtggatactatatggaagtgtatttttaaaagaaactgccaaactgttttgccaccagcagtttacatctccatcagcagtgtttgagagtttcagttgctccacatcaacttttttttattttttatttttatttttgtgaggcagtctcactctatcacccaggctggagtgcagtggtgcgattatagctcactgcagccttgaccttggactcaagccatcctcccatctcagcctcctgagcagctgggagtagctaggaccacaggtgtgtaacactatgcccagctaatttttcaaatttttttgtggaaatggggttttgccatgttgcccaggctggtcttgaactcctgggctccagtgatcctcccacttggcttcccaaagtgctgggattacaggtgtaagccaccatatctggccaacaagttttttttttttttttttttttttttttgagaaggagtctcactctgtcacccaggctggagtgctgtggcacgatcttggctcactgcaacctctgcctcccaggttcaagcaattcttgtacctcagcttcctgagtagctgggattacaggtgtgcgctaccatgcctagctaatttttgtattgttagtagagatggggtttcaccatgttggccaggctggtctcaaacttctgacctcaggtgatccacctgcccctgcctcccaaagtgctgggattacaggcatgagccactgcgcctgctcaaaatttttatttttatgtaatcaaatgtgttgtcatttgctttttggtttctggaatttgtgtcatactcagaaagatcttccttactttccaaaaaaattcttaccacagtattttttttttttttttttttgagatggaatctcaccctgttgcccaggccagagtgcaatggtgtgatctcggctcactgcaacctctgcctgccaggttcaagtgattctcctgcctcagcctcccaagtagccagcattacaggtgtgcaccaccatacctggctaattttgtctttttagtagagacagggtttcaccatgttggtcaggctggtctcaaactcctgacctcaagtgatcccacctcagcctcccaaagtgctgggattacaggcgtgagccactgcacccagccaacacagtatattgttatatatataattttttttagaaacaggatcttgcatgcagtggcttctcacaggcatgatcttagtgcactagacccttgaattcctgggctcaagcaatcctcttgccttggcctcctgagtagttgggactgcaggtgtgcaacaccatgcctggctattctaatattttatatctaatttttacatataaatctttgattcagattcaggtccttttttccccacgtctcaacactattaatagatttgagattctaaattaaattaattaaattcttttttttttttttgagacagagtcttgctgtgttgcccaggctgaagtgcagtagtgcagtagttggctcactgcaacctacgccatctgggttcaaatgattttcctgcctcagcttcttgagtagccgggactataggcatgtgccaccatgcccagctaatttttgtatttttagtagagatggggtttcactatgttggccaggctggtctcgaacgcctgacctcaggtgatctgcctgcctcgacctcccagtgttaggattataggtgtgagccaccgtgcctggccacttaattaaattcctatacataaatgggactatttctcaacttcttacttgttgatttgcttatttatgtaccattttaatatctgatagagctaattcccacttgttgatacaggaatttcttaagctggggtctgtgtatatgagtttgtgggagatgagggaagtctgtgaatccaatgaaatacacatttataattgtggttgcaatgtgatcctttctggggaagaatccgtaatttcattagattctcaaaaggatgcatgactcaataaatgttgaaccacagatctagaagaataatagaggcttatatccttaaggcagtccctcatgagtgttaatctttttaaatcaaattttgttatgaagtgtggatataagtaattgcttgtgcatacgtagaataatatctggaaaacgcatgagaaattgataacattggttgtcagaagatgggaactggtggtggttgaggaacaaaggtgggagggagacttcgttactttcttatattgttggaatttggaaccttatgattgtattaccttttccaaaaagtgcataatattttaaaaattaaggtgaccaactggataactcttcaatagtgtctctagaatgatctctgtggaaaaggaacaattcttggttatttcttactggctttttttttttttgaaatggagtctcactctgtcgcccaggctgaagtgcagtgrcactctgcaaccttcggctcactgcaacctttgcctcctcggttcaagcgattctcctgcctcagcctcctgagtagctgggactacagtcgcatgctgccacgcctggctagttttttttttttttttttagacggagtctcgcctatctgccaggctggagtgcagtggtgcaatctcggctcactgcaacctccgcttcctgggttcaagcaattcttctgcctcagtctccccagtaactgggactacaggcgcataccaccacaccctgctaatttttgtatttttagtagagatggggtttcaccatattggccaggctggtctcaaactcctgaccttgtgatccacccaccttggcctcccaaagtgctgggactacaggcgtgagccaccgtgcccagccctagtttttgtatttttagtggagatggggtttcaccatgttggccaggctggctcaaattccagacctgtagtgacttgtccacctcagcctcccagagtgttaggattacaggcatgagccaccgcacctggcctctcttcctagcttttttatattactagacttaatgccagagttctttgccaggtcaccttccaaaccactgccaattacattacttctgaatctcatttctttgcagaagtaaaaaataaacttgcaagatggttgtatggattaaatgagataatatatgtaaaacatttggcacaagtgttagttccttttctcaacataattttttctctttatagggagtctgaagatacagtattgctcgtcctcaaagagatctaccaaacccagggtatcttccttgatcagcctttacagtaaaaatgacccatctatggctgcttaatgtaagttttaaaatgtcatatatatagtgtaattcttacatattaacatgttataatgaactatggagcctcaagctctttttaaatatactagctgttgcctgtcaccaagatctaggctgctattcatttttagagggactggtagaaattcatggggaaaaaaacacagtagcccatttagaggaagattagtgtatgtctgttttgctagagattttgtccaatgacacctgtcattttttaggatctaaactcagagttttaatggttctgttatctaagagttactgtggcaacagttatgattttaattaccaaccacccatcctgagatttaaattactcagccttttagatgtgaaattacaaagtctgtgtattcgactctggcattctctgtggttgccttccagttgtgactgcagctcttctcccactttcttccctagacggacattgagggatccttccccagaaaatccacctgtttgttgctgcaattttcctctcctcagctgcgtcatttcctgcatgttgcctgccacttactcaccactggggtctttggaagataatcttcctctttggaaatgaatggaaaagcaaaaggccctattacttttaaccactggcttcatataaacacttgccatttttttctgcatagctgggggtggtttgtgtctttaattctttgatgatagtttatagttgccacactttattgattagtacttgacagggtgtaaagcctattttgggtttgatttgttttgggtggggtagacatgtttttaaggaacttattgcttatctttagaaaatgttctagtttggaaacagattcttgagattcagaaggcattttggagtacacttatctcttgtttgtgttgaactgaaggctaagtctcagtggacatggaaaagacttttgggtgatttatttttgaacctgcatttctttcttatgtgtagtgtatgaagaaagactagaatgtagctttaaaaaagtgttgtttactctcttagaactgacagacttattgccagaaatcactgatgttcattgtttttgcaactgtttgagctgctgtaagagtctaaagttgacaagttagttcatgttaggtgcatctttataaagcaaagatgttgtatatcctaggcctcccttttatatttgatagaagttatttgctaatagcttctattcttacgttgaaaatagttgtaaaagctgatgaacctgaaattgtgtagcctctacaggctgctgaggttctaaataaaaccttttagtggtgcctttatggtgaaacagaatttgtcacctgccatttctacttgagctaaggtagtattgtgtatcctctttccttcttaggtatccataatccacaaagcatatttaaaaggctcttggcacgggcagcattggttgagcaggtaggtttggctagggggaaatgtttaacttgttctgaaagaaaaacttatgtctgtagggtccaagaaacagctattccagagtcagtgtcagctgagtctggaacatatgaagtgaggtttacttctaagaacacaagtgactgcacactaattttgtcaaggcatcttttcactactttgctgtagatttttcttcttcattggtcagtttgtcattgtctttgtagttctctttatgataatcctttatacttgctctcagattccacaggcctctgtttatagagtggcaaaggcaggcgagctgtggtttattgtttataaatttttttataaatgttatggtattcaaagccactgacatttaatatttactgaagccattccttagacagcagtggtctttatccctttctggaaagaaaaggaaaatgaagggtaattactgtcaccatggagattgtagaggtaaggttggggtataggtcaggcctggcctttctttgtcatctgcttatagtctagtgctaagtatgccactaagtttcagatatatggaatactttatttttttaaaggtatataaactctgagttattgagaattaagtattcactgtatattaaggggaagcttttgccaagttgtggtcttcaaatttatgtttactcttcctattggcagaataggtgctatttaagagtaaaccaaaggataagcagagggagtccctataaccaaagatggacagcatagccctggatagccagataaaccactctttgtattaagaaatgtttctttcctagtggtgaggggtgggtaactgtgaaagagctttatatcttgtctattcatggtattatagctgtatattcccaggatgataagcttgattgaaatcctgtatttagtcatatattatttgcgctgcttcatttgtatcatgtgcaatctctagaccaaccctatttttaaactctggtacagcatcattttgtacatattcccagctgcagaactagtatcacttatctcagcaaaagagattgtttgcatggaaagattaatagcactgattagatttctaatattttgcatttttgaaatgtttgttttctacgtgattatatttaaaactttagtaaatactaacatgaaaccatattgactagtggcctacttttacctggactcacccgtctcaaagtcaagaaaatcagtacagtcacgattttctctgtctttatgtattactaaaacaaaaaaataggttttgggcaaagaactaatatgtaagttctttcctgttgactggtattttaattgtcataggcagaatttaagttcagaatttaaagcatggcaattataagagactttcctttggtatttataaatattagccagtactatagataacagcagttgaatcacttagggcggatggggaattcaatgttttgctttactaaagttccagccccttaatgtactttaaatatttaaaaaagcacacatttaccattttatttgaatatcaggtttactgaaggaaaaagatacattgaaaatataggaacatacacataaaagacaaygtcatatttaaagtataatcacaatmaagagaaagggagctgtaggtcctatggcatccattctgatgacatcccataattgttccttatattccattgtgaagaaggggcagaaaaagattcatctgtccttcagatgacgatacctgtcatttttcttttctaccttagtcacttggcagtgttggtgcatttgagcagatcttcagtcatgaatggaaggaaagaagctcacaagtacagttatggtcaaatgaggtagaaacagtcatctgttagtagtgctgaaaccacactcctgaccattttcttctttattattgttttcacttagtaattcaacaaattgtttatgcccacggtgttcaaaatgcacagcagtaccagatggctggactcagataagatgcacacaaaagtgataaattaccctagattcgacattttcctatttaaggcttgatggaattgtcatcagagaaggtaaacagaatcaaagtaatttagttggccatgccctagattttaagattttgagctatatgaaatggaaattaagttttgataatgaactctagcttctgagacaaggtggggctatgtaaaggcttctttgtgacaagatccttctaagaatggcatttaaattaaatgtaaaaacactgtagatcttcagatattaatctgatagaccagattcataaggtgttggacacctttgaaagatccttttactagaacatgtggcatacagtagtggaaaagaaccgtaactcctcaagatagatgagcaggggcaaaagtgtgtaatcatttggaggcagaatacagtgtggcttatgtcctcacttgcaccttggaaggggaaaaaaaggctagaatttcttgtcttgtgcatggtccggttaggagggctagttcacctgttctctattgagatagattcaattttttttttttttgagatggggtctcactctgttgcctaggctggagtgcagtggtgcgatctcggctcactggaacctccagctcccaggttcaagcaattctcctacctcagcctcccaggtagctgggattacggcacacaactcctggctaatttttgtatttttagtagagacagggttcaccatgttggccaggctggtcctgacctcaggtgatccaccctcctcagcctcccaaagtgttgggattacaggcatgagccaccacgcccggccagattcaatttttaaatatcaaaacaataagaatccccaggcttctgtgcagtggaaagtacaagtttgtcttgaaatggtttatggcattctgcatcagtcagaggaggataatactgccgatagcagacataggcaaatgtcattccaatcatggatccaactagtacatctgaagagagtggaaacaaggtcttctcttaatattaggctcctaaatcctattacatacacatagcatagaggacctggccctccaggatactctactgtggggctaaaataacctcaattccagacttatgatttctaaataaaatctttttattctcaattttatcatagttacagtattatcattgtcaggttgctttctgaacaccaaatcaaaacacatcttaagtaagtataataagctttgttcagagtgtactaaattagaatttttctaactcagaagagtaacaaaggtccacttattgctattcatctgcccattttcaccatttaaagggtcctagaggaaggaataaagtattttaagagttgcttctcgccgggcacggtgactcacgcctgtaatcccagcactttgggaggaccaggcagatggatcccgaggtcaggagattgagaccagcctgaccaacaagtgaaaccctgtctctactaaaaatacaaaaattagccgggcgtggtggcatgtgcctgtaatcccagatactcaggaggctgaggcaggagacttgcttgaacccaggaggtggaggttgcagtgagccgagatggtgccactgcactccagcctgggcgcagagctagactctgtctcaaaaaaaaaaaaaaaaaaaagagttgcttctctttgcaaaaaactagtttatttaaaaatttaaaatagggttcctgaggacctgtgggcaatacctccagcgttttttttggaattgtgtcaggttcaagccattctcctgcctcagcctcccaagtagctgggattaaaggcgtgtgccaccatgcccagctgattttgtatttttagtagagatagcgtttcactgttggtcaggctggtcttcaactcctgacctcaggtgatccacctacctcaccttcccaaagtgctgtgattacaggcatgagccactgcacctggcctcaatttttgtatttttagtagagacggggtttcaatatgttggccaggctggtctcgaattcctgactacaggtgatccgcctgcctcagcctcccaaagtgctgaggtgtgagccaccgcgccaagccaggtgttctgtaatttggatattttacttactatagcattcagcttaaatttgtttggtttaattataattttatgttttcttgaattttacttatgtttttgaacaaaagtcctatgacaatgaacctgatttttaagagagtaaattgaactttgaggttttaaatttcctgtagatgcagtttaacttgaacttacaatgcttcaaataatggaaaaattaggatgtttatctttggtaaactctttttgtcttatctttcctataattttaaatgtacttagtacagaacccagaccatccatactcattaatttgttcattcagcagatatttagtaagcatctcctctgtgctaggtgctaggaataaaatgagtgaaatatgcaagcttccatagcctgagtactttgcttaccttgccagtgatgcttgtagtcacatgtgygggacagtgcaatcacagctgcaaaaagtagaggtgacagaaaggcacagaacctccaagatttcccacggccttgtggtgtgaagcagtgtaacttccctgccaggtagaaggacgcaaaggccagaccagcaaatgcaactggaacaagaaaaacttttaagtggtttgtcttttaaaggaagctacctcattcatccccacataggaggctaggaagcatgagtatgtttttatttatttattttttgagacagtcttgctctgtcgcccaggctggagtgcagtggcaccatctcggctcactgcaacctccaccacccgggttcaagcgattctcctgccttagcctcccgagtagctgggactccatgtgtgtgccaccatgcccagctaatttttttatttttagtagagttgggatttcaccatgttggctagcctggtcttgaactcctggcctcaagtgacctgcatgccttggcctcccaattgctgggattacaggtatgagccaccacacccggccatgagggtgttttaatccttttttgtgtatacttatagtgtaagtcattgtgaaggaaagggaaacaaaaagaaaaatgaaggacttagtgccccaaagttaatgttttatctgagtatagttttcggtatactagctatatgtatcaacttgttgatgctttagtttcctcatctataaatgggactcataaatacaatagtccccacctcattggattattgtgagctataattaggtaagaaatgaaaatgcttcaaagtacctgacacatagaaactcttcgttaaaggtatttttattgctagtacaagattgcaggatctaggcaaataatataacaattaaatgtgcaaatctcatgaaggtaaactacctttctgttctgtaatatttacccaaatagtcaaggctcagacttgttaaactgtggagttactaaagaaggggggattttccaaattgtagaaacargagtagtcagattttcccatccctactagctttctaggttaaattcaatgatgtgaaaacaagcatagggtagagtccatatgatattcatacaggaagaatgtccactggggaagctctttcggccctcattcaccacgtccttatcccctgtacacatcaagtcagaatgggctagcccatcagggaagcagcggtagaagaaatctgggcgtggcctggaagaaagcagcatggttggaacgtaaatcattaactccagaaattatttttcagttgtagcagacattaataatcctgttaactattggtcaaatagtgccccaggcaaaataaggtaactggcttagtatagtcaccacactaagagaaaagcctttcaaggtgagcatttaaattaggggaaaaacgcccattccagcacatgattactttttagggcaaacagcaaatgacactgcagcttcaggaggtgctcaagaggacactgaccgactgctgtggccgttggtgggaaatgctgttcaggcagaaaagmgcccaggtgtcacctggaggactgaggtatggggaagggagtaagcgttgaatgacaaaagaaaaatcagagtgaagataaaggagaaaagaatgagaaagacgtgtggtggacaccattaacctctctgttctggtgggtaagggctgaggcagatgctggggtggttagctgttgtcacttacctccctacgatcagttttattgtgttggtaaagacgccattcagagccagggcaaggctggcagctgcaaagcaaagccattagttgaaaggatctgtctaggaggaaaggtatggtcatggcctcgttatgagagcagccgtgctgtttctgagatggatagaatccaaccaggcctgggcacaaaaataatyagggtcctcagtgatcactcttttgtagccgagaacttttgtactaggccaaagacatttctgaggtacaaataacccagtgcatttaggcacagggctgcctgccgtgtagcctgcgtaaccaagtccctgcagtgctattttcctctcccgcggggatagagttcctttaggaatgcagaactcagtggcctccacacaggctcaccgtggctgaatcccacaacgacctcctaggttcccagcacgaagaaaccggcccgaaagggctagcgctcacccaggcaggcttgtctgctgtctcttgtgtctgccttcttgagaaatttggccaggaagatcagagacagtggagagagaaatgcaataacctgaatcagaatgtcagaggttaaaaacaatccaaaaaaaagccacactcgtgctcctacaggaaagagggatgtgacacagcaggactcactggagctaacataaggtctctgagtgcgcgtaaccgggcgccaggcagcgccaccagtgaacagcagcgcccgtgcggctcgggccccggtacctcaggctgaggcacagagcgcccgggaaaacgttgtctcagcccaaagaggctcggacaccctcctctctcaatcaggatcttaaacactcgagccctaggaggcggaacccagcgcacagcagcggagtgggcagtgggtccctacaaaggccgtctcggggtggaaaacgcacaggtgcccgcgggaagccsggtcatggggagggaggaaagacgatctttctccacgcacaaacatcggcttggtggggaaatactccgcctccacgtaggggttccggtagagccacatctcctccggctggatgagtctctggaacggggggagcagctccgtcaccctagaggggaacaaagaagcgcagagcaggtcgcctggcttcctccccgcttccccactgcccgacccgccgccccgtgccgcccgcctgcctgggaagcggggccgcccgggcccggccgtggatctttcttacaggaaggccgcgaacagcgcgagccgcacgcccacttcggccccaaaggccaccgccgccgccgccttccccatccggccgcgagctccgagcgacgctgcgctgacgtggccacctccgcggggagggccgggccgggaactgggcaccgccccctctcccagttgcccgcgctccggcggctccccaggaagacggcctggcggctgtgccgagggcatcgtctggcaaagggtacgcaaagccagcggagctgccctctggtgcgttcagcagggagccagcgccccagttccagccgagtaggtcggcgtacggtccatcatcagcagctcgtctccacggcccaaccacaccaccgcggggagcagccttctcccgggacctcgcctctaaatggaaaaccaaacagcccgctctcagatcctcgttccttagcaacacagccgcattctgcaggaagctacactacctgaggttggctggattgtgtcatttagtcctcccacccaggatggcctcctgcccagagtgttgtagcaaaaaattattggcaaagaacaagcccacatatttaatttggaacatacaggacaatttattgaagtcaatctcaagcaaaatctgaaatcagtggaatgtcattaaaaacctttccaaattaatcctcacggaagcaaaaaacacattggaattccaaagtatttgtaaaataaraaaggcaacatctcagtaaatataatgtacaaaaattatatgttcctaccagcacacacatcagtaaagaagcttaaatattacaggcaaccctaaatacactataactagtcaacaataagctatctatatacaggttaaccaagctttacacgtttcacactatgcaataaaacataggccaatcaacaaaatcctcaaaatattatatatcttgaagtctatgtggcaacatcaagtcattatacagtaatgccctagtggaacacccccagggaaaattaacactaatcccttagtgtcaagagcttctagccaagtcacagaaactcaaaagagattgactttagtgaatattgatgctttgttattaaagactcaagtctcaagtgatttaggcaaagtaayggttcacaggatctacaaagtttattacagataaagtacagaaataaccaatctacaaagatcattatcataaagaacacgagaaaatgaaaacggagtctgyaggtatctgtgtttgttgtgcaatatcactcaaatgggtacaaatgagtttctcataycaattccaaatatacacatacccttgtatataaaaaatgatattagccagttgtaatactcatttagcatcttgattattagtggcaatataattatcttaacatagggcatgtaacaggacaaatgagataaaataatgacaaccaagtaagttttatccagtccatttctaaactgacaagaataccttattcaataccttatataggtcatctgacagatacttgagggctgtttgcacacatcaagtgtgttggcaggcagggaggggagcagtaaaagctgagggtgctttctcactaactagcagatgcagtaatgccacataagaaaactaaggactgaataaatgactttggcatctattctattttccctttttacttacatgtaaattacttttacagcctactgaaggacaggcarttctcatccccctcccgcttcatacatacgtgccacaagcacccaaacttgtcacttatgcaatggactgaccaaaacaaaacaaaaaacagaaatgttttttgaaagacacggattacccacattttgggagtgtaacgtaagtgcaattttttgttttgtttttttccctacatagacatagtaaaaggaaagaagatgtgcttggggagagggttgacaaaatgacaaaataaagaatgtacataaaaagtatttgtaaaaatgctggtatctcatgcaggagtctcttcctcaaatgtgttcaatcaatctgagctatctactgtgaacactctcccatttgcagaacttcacctttaatccacgctaaagaggataagagactaggctatttattttcaaaacagtttacaaaacaatgctttctacttcataaatgtaaaaagaaactaaaataaggagaatctgaagagtttcaagtacttaaaaaacctgaattcaatgaggcagaggtctcaatgttaaagtgactatttcgtacctgtggtaaacattatccccccccttaccctttaccaggagaaagggggttccctttctcctggtaccccaccccaggtaaaagttggtgagatttcagtatatacacatttccaacttttcagtatttgttaattcattgcaaagctgtctaattatagtattccctagtccatctgaaaatggaagcaagttctactttttgttttacaaataaccagagaccaattctaggtggccctaggccaaaggaaagtgtttccattcatcaattcatgtctgcaccaacttggacaactgggggaggctggatgcatcagccttgtgaaaagtaactttagtctacgctgcccagaaataaagcaactttccaatgtcctttttctcatatggaagtatagaatgtcagcttcccagctgtgagggctccatagccactgttttcttatcttgttaagaggacatggcatgtggcagccaacaccttgacttcaaggtgaatgctaaaggaagagctttgtatttaaaatgaaatgaaagacaagcaacaagtcctgggcagtccagagattgtattctctacagatggcctgtttgcaaacagtaggtctgggtttgacctattggaatacaccatgcaagaaactactcaaaaaggaaattccacttcatgaaccaggaaagttgtccaatagcctgtcccatctgagggtcctttacatgattagatactcaatatctcagttccacaacgttatttacagacatgttttcaaatattttgtgtaaatggcagaagggagctgggagcagtccccctgcctccattacttttttagctttcacatatgttcttgacttgtacagaaaatcccaaattttaaatgattccccaactcagccagttctatagatgaggccagatcatttttgagaattaagataagagtgggaacttgttaaaacaaaaatgaaaataaaacccacctcactcctgtatctctccctgattagacattaaagaggtgaatcactgcctctggctgcttcagccttccaggaatgaagagccatccaccttgcccttctcagccagccacaggcagctcttctgattcttccctcrcagcagtggcggtccagcccctccctcccctgcacagtgcctgagaaagtttcccaggatttcatctttagctcttactgatccagtttctgaagctttaggctgattatcaaaaatcttatgttcacttcttccttcaacaaattaacatgtggttaaaaaaaataccaccattagcccatgctgctttaagttatttcattgttggacaagaataaaaaccagccacttacactctgaccacatatagatttaaaagttaacaaataccaacttcagactatgagtgagcaatgtcttttggaatatttcattggtgtatcacaggcacagtgcatgtatactcatgcacacataaaggacaattttctctttctgcatctataatctrcaacttaaaaatatatmaaataggtcaacattgacgctatggaggtgtgaggagaactccttggcaccagcatgactaaaaccgctttttagaccattaaagaacattcatggccaaagacttcagaactatggttaccttttttttttgagatggagtctcgctctgtcacccaggctggagtgcagtgatgtgatcttggctcactgcaacctctgcctcctgagaaactgggactacaggtatgtgccaccatgcccggctcctttttgtatttttagcagagacagggtttcaccatgttggtcaggctggtctcaaactcctgacctcatgatctgcccacctcggcctcccaaagtgctgggattacaggtgtgagccactgcacctggcagctattttgttttctactctgatttctgaaatggtgaaacaatcctattaatcataatttttttttaatttcagcagagctctgttacagatatgaaaacaaaatgtgacacaatgaagaagctgcataaaaatactgaaacctaaggtatctgtagtatataggatgtaccctggcttaccatagaaaagtctttagatagtaaatagcactaagtctaaaagcaaggagataagatttcatgttggatactgtttcaagaactgtatttggaatattaaaggaaatccttatgttagtaagtttaaaaaaccaaacatcatatacaaaataaaattttagtatgataaaacctagcttttcttattttttaaaaggacatcaaactatataattgctcaagagcaaagtttagtgttttggtgagctgtatttcatgttacttgtagcaattatatttggtgacatggatcgcattttccattttgctctttcttttgggaccatatctaatcaacagaagtactggaagcccaatgagtcaccgcagaattaattgctggagtcaggcaaatggcagtttaggagcttcagtaaaagaattgtagtgttttttacaagagaaaatccagtataattgcacatttacatacaaaaaaaagaggcacaaaacagattttcaccctctttccatagaagagctctaaattgataagcaaatggaacactcaatacagctgaaggaatgtggtagagcatctaccctccctaccttcataaggttactaggtacttgagggaaaataaatgctaccaggtaccagcaattgtaagcagtcaaaattcacagagaaagttaacattcattcaagctaaccctagacttctacttagtacagtgttacaacaatgtctgacattactaattattttcatacaaggaatactggaatatacatattcctaagcattaaaagcaagtgagtttggtgagcagacatcttggtatactcgcatctataagagtcaagcatcaccatcaaccatttttgctaacactgactttcttgggagttttctccaagtgcttcctaagatgaagtgtgtttgtgtggctcttatgcaccctgtaaaagtagaagttcttccccttactcaatgggagcaatcttaagtactggataataatagaaattctttacatgtaacctggggatgcccctactactttcaccccccaaattaggaactcaaccaaaaagatctattcaaatacaattcaaactcacttgtgtggttttaccaggaaacatgactgaatggtcagatgacaaaagaaatgtttgagtaggagaggaaaacagagacaaaaaataaaatgcctgtaattctctccaattaagaccagggtctacaataaaattggacagaaaatggtgcttatatgatccaaattttggtttatgccttcatccccctttagctgccttaatcagtgtcaggaaaataggagtgaccattccaactatgcttcatatccacagaaacgcacttcatccaaaacccaaaccatccatgtcaatggaaaacgttttaaaaatcagtgagcacatccattcctttttttccttccaccaaggaaacacaccatatacccttctaggtaaagttaccatagtacaaagcccaccttgtttaagaccacagaggtaaaatccaccgaggcattgttttcaagaggccagatttaatacttccatagagcccttctctaagcctatgaaaagcattttgaagggaaagagaagtgagcctacctactgctcagtaaagaggtatataaagcttatcataccctttcctagagggctttctcagattcctacttaaaacacacacacacttgattagactattgaactacacttcttgaaattcctaaaaatgaaaataaataaaggaatgatggctacttttgctttatacaaccaaggaacacatcttagactttaaatttatctcattaacaaaacttacttttctctttgttcttattttaacagcaaaaacatttctttttcaagctgcaatggcactgaagcacaataaaaggcaagaaaagaccaagggaatttaaccctccacaaaagaatcccaaaccaaccaaatcaaacaaaaaccagacaccaccaactgcttctgcctgcatgaactggtttcccatttttgctttaataaggcagttccgatggcaaaggctgtatgcactgtagcagtctcttctttttaaatgcatgatctatttgcttttttcacttaaatagaaaggaggggacaccacacatttattcttttacttcttctccatgatcttgtgattcccatttacattttatcttgctccagtattctggtgacacaggagccatggggtcatgttccgagcagcagaggcggccttccagtgcagagggaaccagggcccccttttcatgatctttacaaaatgaatgtggacagaattcacagaaggaaacagctgcactgctgcactcatcgcactgatgccacggacactcccactttcctaattcggggagatggggaggaagaaggagaagtgcccaagttagtgcctgtcttgattacccatgaaaaacccaggttccttcttctctcattggagatggaattcaattgaatacaactccaaatttcaaccaaacatagatctgggtgtacagtttaggatggatgtgagctactggccaaaacccaacgccacaggtacccacctacgggaacagtatacaagaaaccaatccttgaggaaccacaaggtatcccaaatgtgtaaggggaaagatttttgccagcgtaatttttcgctattgtttgttctattcaacatttcctatcccatggcatggaatatattgtgagttacacatagttggcaaagacacaaattagggaaagggtcctgaaggtccagcttaccatatggtggctgagtcaggttaaggcataggaggtggtatgctttgggacagtcttttttgtcacacatgaccagctctccaccatctccacattgaaaacagtaatcttcatgcatctgctttggttctgttttgatctttcgtctcttctgttttaacttagcattttttgccttctcttcatttgttgacgcacatgccgactggcaggaaagaaaggatcatagtttcaaacatcacagacagtgcatgaagctggacacaggaaaaccctgcaaccttgcattcatttaaattcatctgttgtacaattacctaaaaacatcaggaggccttatgctgcaacaaatactataacaaaaataaagttttgttttcactgacttaaaaattattttatttttgagatggagttctcgctctgttgtccaggctgaagtgcagtggtgcaatcttggctcactgcagcctcgacctcctgggctcaagcaatcctcttgtctcagcctcccaagtagctgggactacatgtgcatgtcatcatgcctggctaatttttgtaattttttttgtagagacagggtcttgctacattgcccaggctggtctcaaacttctgggctcaagtgatcctccgcctcagcctttcattgactttttttggagactgagtctcactctgtcactaggctggagtgcagtggggcgatctcatctcactgcaacctccacctcttgggttcaagcaattctcctgccttagcctcccgagtagctgggactacaggcacgtgctgccacacatggctaatgttttgtattttagtagagacggggtttcactgtgttgcccaggctggtcttgaactcctgagctcaggcaatccgcctgccttggcctcccaaagagctaggattacaggcatgagccactgcgcctggccttcactgacttttgaatagggtgctttttattatttttatttatttagttttttgagatggagtctcgctctgtcgcccatgttgaagtgcaatggcgcgaccttggctcactgcaacctctgcctcccagtttcaagcgattcttctgcctcagcttcctgagtagctgagattacaggtgcgtgccaccacgcccagctaatttttgtatttttagtagagatggggtttcaccatgttggtcaggctggtcttaaaactcctgaccttgtgatccaccggcctcagcctcccaaagtgctgggattacaggcgtgagccaccacgcccagccaggtgctttttatttttaattgcaagggtagtggtaaatccaagcaacttttagacaacctgttaatttttttcattgagatataattcacataccacataattcgccattttaaagtgtataattcagtggcctttagtattttgtgggtttttaaaaagttttaaattagctttttgctaatttcatattcaatctgaaatgaaatacattctcagaacctaacagaccttactgaaacaagcttccttggaaagtcacagtctaaatgttcgataagcccagctgatgacccacaaactaatccaggtgcccaattgccagcaggttcctgagatggtcacaaacacacaaacagacttctttttttttttttttttgagatagagtcttgcactgtcacccaggctggagtgcagtggtgcgatcttggctcactgcaagctccgcatcccgggttcacgccattctcctgcctcagcctcccgagtagctgggactacaggcacccatcaccatgcccagctaattttttgtatttttagtagagatggggtttcaccgtgttagccaggatggtctcgatctcctgacctcgtgatctgcccgccttggcctcccaaagtgctgggattacaggcatgagccaccgcgcccggccaaacagacttcttaacagccctactccttatcgcctgttgactgggggcgctcccctgcaagactgacctttggccgcactcctagaaaaccactgcagttatctgctccacagtggcactccgttctgccgttgcccagacaatctaggttataattaaatgttaactccatccctgaaacacaggagaaataattattcaaactcgagtcatggggaagagaaaagctctcacaggcacactcccctaatgaaaaaaagagacatcattttggcatgaaggcgtttcccttgccagtgttctacctcattgataacagtgatggtaaaaaaagaaaaggagaaaaacatccccacccaggaacaatgacagcaaaactacacatcctcaaaagaagtcatgtccttttcacagcagtggttgaaaccaaagtgatagggtctaagaatctgcaatctatgctcaggagactaggttccagttcagccttcttttctatagctaactcacactagtttctaaatgaacaatatgaccatggaattgtaacaatactatttccagtaattactgccttatattatgatcaaataaagatccaaaatgaaggtttactgcatacaccaaagatccagggactcaaactagggcctcctaagctttcttctagctgggcttaaacaatccacaatgagttctagaaacacagtttaaatctgttttagctataacatttctcttctcaccaatttttctacaaactaaacaaaggagaaaccaagttttattgttcagatgctggataggtaaggaaaaatgaaaacagctttggcttcagaggcttttatgtctaatttgaaacagaatgatctttcaaagtgaaaacaacaacaaaagatcccagcaactaaggaaccagctgctgttaacacaagctcattactgttaatatgttttaaaaagaaaacaacagctaaaacatctggttacactctatggacagcagctaacttggagaattcgttcagcaggactgcggacacagaatcctgtcagacccgctcttacataaaagttctcactaaattcccttttgaggttatagatttttacctctcactggcagctaacactcagttctaaatataactctccttttatttgaatacgttttctaaatataaccttcctcttatttaaataagttcttgggcatcaagccttgaagaaccatgtcctagctctataggatattctttcttcctagggaggaaagcatggggaacgagtcacttttttacctgcaggaatatcacagagagcaaatagtcccactcgaacatctccattcactgtccacttttgtgtttcacagttgggattacaactgtggttcatgaagcg

SEQ ID NO: 96604 - DNA, 242374 bp, Homo sapiens
  misc_feature (1)...(242374): n = A,T,C or G
gattgatgggtttataatctaaagaataaattgggggccttgcgcagtggctcaagcctgtaatctcagcactttggaaggccgatgtgggcggatcacttgaggtaaggagtttgagaccaacctggccaatatggtcccgtctctactaaaaatacaaaaattagctgggtgtggtgggtgcctgtaatcccagctactcggaaggctgaggcaggaaaatcgcttgaacccgggagatggaggttgcagtgagttgagatcacgccactgcactccagcctgggtgatagagtgagactgtctcaaaaaaaaagaaaaaaaagaaaaaaatgggtttttttgctataaggtgcataattaaatagcatgtaaggatttgcattgttaaccttagtaaacacgcataacttgagaagaactaaatacagtagaataatggtaataataatgatggttgatgcttacaggtcttacactcctctttcaagagtacatgaagaatgtgatgttctagactttggaatcagcccttggcctttgcacatacctggcttacgatattgactttgtaagacacagtgctactcaaaatgcggtgagcaaactagcactggtcctcaaactttttgttatatgtcatgatgtagtaagtagagaaagtgaaaataagcctttagaatcttttatgttaatctgtcaagtaattgcatgtctattggatctcctaacaaactgggggcttacattttatgtgtgtctttttaaatttcattttttgactaattcatttcttattttacaaatttgtccatccatgacaaattggggaaaaactaggaactcaaaacagatagtttgataaacaccattctagaatgttgtaaaataaatgatgagttaaatagaagccacttctacactgtagtattcttacctggaaagtggatgtaacaatagtacttccctcctggggctggatctgagacttaagggaagatatatgtatgtaaggtacttagcactattcctgcttttggtaaatgccctccaaaacattagctcttagtaatattgaataacaaaggcttgaggaggtgccattatgtgcacatgggacatcgtttgtttgcaatgacttttcaatgaaatcctccatctacacgtgatcttctggaatcagaccaactgatttcacagatcaagagttcatttaccattgacttccatgaagggaccaacatttggcttttggtcttccctgaccttttagcataactacttcatcattatggtgtaaaacatccttccatcgcaggattcctttgttttccttaagtcattaaactgagtaattgctgcaggcctaaacaattgaattattctgatctttattgtttgctaggagcttgtattatttgggggccaacataaaaatgacttgtcactcaaggatggcaagtatagagacataaactttggtttcaagagatatattacttaaggtggtggcccattgtacaaagtaaaaaatataacatcttttctagtcaaagtggccaaagaatatttttcaaagtgtgttttggctacatgtcaaaattgaaggtcattgtccctttaacagtcatctggtggccaaagaaagcagccagctatttcaggccgtttcacagaataaatgcgtaactgaggataattcaaccaaaaagttttctaaatcatttttgaattacaatacaatacacacaatacaatacagtgcaatagagaacatgaggctttatactcagagtaacttgggttcaaatcacagttttgcaacttagtagttggacacatcatgtaagttcttactctctttgagtctcagtttcctaatctgtaaatcagggactataaactctatagcatagggtcactgtgaagattaagtgagataaggtataataggataatgactatgcataataggggctcaaataatattagctcccttctttttctctatccagttaataaacttcaattattttttttaaatccatgtgataactttgagactccatcaaaagaatcagattttacaatatataaaaacaatatgtcagtatttattttttaaaacatgcattggctctggcagactcagtgaacaacagtctgtttgaaaacatgactgactctttccaaggtcaaacatcctcaactccttttactctgcccagaactctttgctccaaccagaataactttcccatgcatgtgactggctcattcctacttttagtcttttgtgttagtgcccttcgtgaaatgacctttagatgcctccctgccaaactccatactcctttaaagttgttcaacagtcatgtcatccaaaaattggcagaaagaaatctagttaagtgattcactccggtccatccaggactataggttcttccagggagctgtactggtccccagtttgacacatttttttgctgatttcctctaccttttccatagttttagattctttctcccattgaggacattcagaattagagaggctatcagttgctaaaggccacacattttatggctgattttaaacaggcagcctgttctttgggtttttagtttggtgttttcatttcgtgattctactccatttagtggggaaatggtattgctggctgactaagaaacagtgtggaacttcaggaatggagaggcagctctagaagaagtaacagcaatagatgaggggcatgggatatgacgagagatgggagcaagctggaaggaggctaagggagggagaaaagatgcctcagaggaataatcagcttattctagccatttcacattacaagaaaaaaaaacctaaacaacaacaactagaaatttttgctttgcttctattttgtgcctaataaacaacaccactgtcactgccaatgaaaacagcaacataactgtggttttttcccagcactaattctaaaccatctactggatttgggtcaaaattataaactgccaacatgttaaaaataaaaacagaaaaacaaacctggcatttttctgaagggttgtgatggtgaatgcaggacaagagccagagagaagagctgctataaaaataactggtgtaacacaccagggcctactggggggttgggggtgaggggagggaacttagaggacgagtcaataggtgcagcataccaccatggcacatgtatacctatgtaacaaacctgcacgttctgtacatgtatcccgttttgtttttgtttttgttttagaagaaaaaaaaaactggtgcaaacatccttgaactgctgttttctataaaaatctgatggctgtgaaggaaagagtaaagttgggaaggagaaaggaatgaggatcaagtggtgtctgcttatcgtcagctagctttcatgtaaaagtcatggcagggtcagcaacaaactagccaggtggcaactccaggccacgctgccataaataaatagttatgtactaatgtcacacaatcagagctagatgcaaagcatatgggaagaaaacattctgatgtcaatattcaggaaaaactatggttgttaaattcaggatccactgttggtattggattttgagatgcctcagaaaattaaaagtagtgaagtttttaaaaaccaaggctaaaagattctttgaaatgtacaatattccctttaaaaaaaatccttaacctttggcttaagacagtgtgactatttgatgtaataattaagcattactgaaagttggcaagagcactgactctggaaccaaatttcaggagtttaaatcttactactgctacttatcctcatgacctctagaagttccttaaccttttcatgtcttagttttttcactctgtacaaaagggaagaggaggataacagcaatagtacctgcctggcaggaagttatgaggattaagcgagtctgtgcatggggagcctgtaaaacaatacctagtaaacgccctgtccatttttatcaagtagtcttacttagcctatttatttatggccaaaaccgcagttgcttttgcaccaacctaatatttcacatagactatcctctagacaccacgctatataatcttttatttgtaccagcctgttaatcttaaaaacagcccatgcccgggcgaagtggctaatgcctgtaatcccagtactttgggaggtagaggctggagcatcacttccggtcaggagtttgagactagcctggtcaataaagcgagacttcatctctagagaaaaattttaaaattagccaggtgtagtggcatgtgcctgtagtcccaactactcgggaggctgaggtgggaagatcgctggagcccaggagttcgagggtgcagtgagccacgatggagccactgcactccagcctgggcgacagagtaagactccatctctacatcaaacatacacaaataaaacacctccatgaattaaatcagttttacagacaaaagaaatgaggcttcgatggattaaggaatttattcaaggaggtatatctaaaacttccaacccaggcattattccagatgaaaaattttaaaccacttacaggttctctaaagtctaagcacctttgctttagtttgcttaaattgttgaaatcagaagagaaacacaacacatgaccttctaagaaccaaacagattttagaaaagagattaaatgagggactgatatcccaacaaattgctttaggagaactgagatccattcacaatacatatagaaaataaaaaaagattggctcattactccaaacatttattgagcgcctactattttctgagaactggggttacaataagatgcgattttagaccttgagcagctaactgcaaggagtgaaagtgacttttttttttttttttgagacggagtctcgctgtcgcccaggctggagtgcagtggcgcgatcttggctcactgcaagctctgcctctcgggttcacgccattctcctgcctcagcctcctgagtagctgggactacaggcgcccgccaccacgcccggctaattttttgtatttttagtagagacggggtttcaccgtgttagccaggatggtctcgatctcctgacctcgtgatccgcccgcctcggcctccgaaagtgctgggattacaggcgtcagccaccgcgcccggccaaaagtgacattctttactgccggctgtttgatgacgtcggatttgtttcaagtctgtttctcaacaaggacaaaactgccttccacgcgatgtacagaagttgtagggcttcctcaacacaagccaaattatgtttacagcgaccctagtgagttttcctgctcggaccatgacagacttggtagagtgaagacatggtttctcggcaggccagtctacgctccgaggagcgctcaaactggcgcgttaggaagtgtattcaaatcgcgcgctctggcaggggctttcgggggctcacgctgaaggatcgcggggcactcgtgagacctgccgcctggtctgtgcgtcaggctgccctggcttctagtaattgggagagtacaaagcatcccttgttgaccctttgatcctaggtgggcgatgccctggattcctacctgcctactgaaactctggcgcggcgcctttccaagggcggccgctacttcctggttggtttgcccttaactgacatggcggctagttgccttcggcgcaccactgcggctgctcagtaagccaagctagggcactctggtgtacagccagtccccgccgcggaggtgccggtggagcctgggaccgggcgagtctccgccccgcttttgcagctaggggtgtgtttcaggggggattggggcaagccaagcaggcgaggacccgggcctgtgccgctttgcctacccctcatccctcggcaccaaggctacttgagccccagggtgttttttccttgttcccgccacctcctggtccctggcccaacatgatactgaccaaagctcagtacgacgagatagcccagtgcctagtgtctgtgccgcctaccaggcagagcctgaggaagctgaagcagaggtttcccaggtaagtgtccatctctcccctctcacagccctttgcctgcagcagcagtgcctgggccgcccaggcagcgcttaggaaccacgtgtcacacatgagtggggaggaacaccagtgtcaggcgttaggaggtcgaggttggcgaaaaaaggtttattctttcactcgccttccacacaaaactcttaacggtgagttcatggcagcctcccaaggccttgcaattaaattcaagtcaacagatatttatggaaaacgtggtacgtgctaggtgatgggtgaacatagtaggtgcttcataaatgaccagaggttaattgacagatastaggaatgaawgatgggtgggaatatgaattgtagattcgaaaggagcaaatggaggacccttttcaattggccgttggaaacaaacaagggagcatagaggtaaagcggcttcatactgtttgactgtggcttgtactgttaactgtggaattaagtgacctcaagggttctcaatccaatcagagagcagggtacccagggattccactcttgggtcattggccatttgaacaaccagatctaaagtttctccatatatgttatgcatacacacattccgggtgtatttcatacttcctcccccaaacacttcttttttcagcgattttagaattatccaactttctaagaaaggactttgggaattatgtagatttctcattttaatgaagtggaaactgagaccccaacattacatgaggaaccagttgaggacaaccaggtcactgtatttatgttgtgttaaaagcagagaatgtttgtttacttttttcctaatgaaaaaccaaatccaaacctgtrccattttgttttgtggcactgagcatggttattcctaatggagagcttccccatccttgacgtattcagtccctgaacaaacacgacagaagtaatttcttgagaaaagaaaggtaattggataataggtatcaaagtacaaattgaagcataagtttaagttctgttatgactttgctttttgaaggacttggttttcctagtctgtaaaatgaaggagtctcttttcaatattatccagatttgatttagggcaatatttatccctttatagcctttagtattttatcagacttgctaagaaggaacaaaattgacacataatttaattttctgtcattaactcttgccagttctgcacatgaacagtgaaatgggtgaagactggtcagccaagggaataggtagatttttctgggcagttttaagaaagagcatacattttgatattctcctctcactatgtatgcaatcacttgtaattttgcttttttttctcttcctctccctctttttctctttttcgttcttttctctagcaaataccttgtcttctctataataagtaagtgtctgttactttaatcaacacttacaaaagcctcccttctgtctggtgtattctcttatgctcttttctttcttattcatgatatactcaaatctttttcacttctcccaaatgccatacagggaataaataacaactctccttccacaggaaactttatttagagagagctgaactactaatccgcaaaagaagggattaaagagctatttagggctgggtgtggtggctcacgcctgtaatcccagcgctttgggaggccgagatgggaggatcacttgaggccaggagttccagatcagactgggcaacgtagcaaaaccccgtctctaataaaaakccaaaaaattagctgggtgtggtggcatgtgcctttagacccagctactcagctactcctgaggctgaggtgggtgaatcaccacatcaaggtgattgttaccttgttgcattacaatccattggcctattttgaacttgaatggatcttttacccatgcctgatttgttatcatcgtgcattattcctttgtaaaatgttgcttgtgagttgtgcagatcttacaaatgtcacctttcattatacaatatcaaaaaattacatttgttaatatcatctctaatctcatcagaagtctgtaagatttgaagctgtcaagcttgtggtgatggatatgagcattccagtatttgaattttcccttgaaagctcaaattttatcattggcaacaaatgctattagttgttttccttgaaatgacaggctcacattgtttatttttgagaaagtgtctgccagatacttaaatctgaataatatactttgttatcattaattcaagtaaaaatggtgttccctagaaaaagtagctagttcagctctcaaacagtcatacaagtgctttcctgggaggcaaccatcatactttgatatgaagtatatgtgctttgtatttactctagtcatacagaatgttaaaaggttgtgtattcaagggttgagatttaatgcaattaataagagaatattctttagtgaaagtcttgttttgttttgtttttcctgcacgtgtgtggcagtgaatacagtgactactagtacagttatgatgcctatgatttgtgccttgttttatgctcaggagctggcagttttactcaccattgtttttgtaccataagtccaaatgtgaatacagcgcaaaaggaaaatamtatcttgctatttttataaaamtagtcgtgttgaccctgtagacctgtgagagggtctcagggactccaagtccacagccacacttagacaatcactagctaattcaaatcaaagcataattatgttttcaaggattttgatgtatactgacaaatttaaaaaaattgtactagtccttttactagcagagcgtgagagtctctgtctctgcaacttttccagtattgagaagagtcattatttaatctttaatatgttcratcaagaatgacatcttgtagttagcattttaaaaattattataggttgtacctttttccaaatttttttgaccacttaattttcctttgaattacctgtttggtatcctttgcctaattttctgttggcatgtctgttgttattgtttattgatttattacttattgatctgcatatgttcaggatgctggtcctatatatgtcatatttgttgcataaattttctcagttgtttgattttaaatattgttctgcttttgatatggttaacttttaaatgtatgctttttttttctgacatttttgcctttatacttaggaagttcttttctgtcctaatatatgaaagaaaaaaatatttcacctaaattttcttttagattctttatggctttgttttttattcttaatttttaaatctttctggctgaaatttattttagtaaatgctgagaggtgaaaatgtagcttaattttttctccagcttaatttttcctcttactgtgacttctggggtagcctcacttcttcatggcttgttttgaytgaagttacaaaattatgttttttcaagtcactgtgttttacgtggtctcagaatccttcactttaaaatgaaggagtaggactttgtgatctgtaatatcttacaactccaaaattcaccctcattctattttcgtttctacagttttaccatacagtaagtcatcatttaatgtcttcggtagggctttggagactgcaactttaagtgaaacaatgtataatgagagcaattttaccatatgctaattgttataaacaagaattaagttcctatagcatatttctggtcataataacatcaccaaacttctaaataaagacccaaggctgggcactgtggctcaagcctgtaatcccggcactttgggaggccgaggcgggcagatcacgaggtcaggagatcgagaccatcctggctaacacagtgaaaccccgtctctactaaaaatacagaaaattagctgggcacggtggcgggcgcctgtagtcccagctactcaggagactgaggcaggagaatggcatgaacctgggaggcagagcttgcagtgagctgagatggcgccactgcactccagcctgggtgacagagcaacactccgtctcaaaaaaaccataaaaaataaaataaagacccaaaacacatctaatattaaacattgaaattaatgtgagcctaaacaagtaagataattatttacccaatttttggtgaatcagtgagtgatggtggtcatagtggtggtggattaaatctaagagtatgtgtttgcaaagtgaaatttgtgagaagcacctcttaccaccatgtattcaaaagcaaacaatagcctgttcaacagagcgagaccctgtctcttcaaaaaaatttaaaaattagccaggtgtggtggtacatgcttgtagtcccagcaactcaggatgctaaggtgagaagattgcttaagcctgggagtttgaggctgcagtgagttaggaacgtgccactgcagtccagcctgagccacaacagttagactctgtctctaaaaacaaaaaacaaaaagcaaacaataacaaatgtggtgagcttgctgagcacttgtgtactgcatctttattgtcatgcgtttgtatgattatcatagatttatgaatttttattttacmgtaatttgtattcattcatttattcacttattcattcatttatttaccaacccgcttattccagtttaggattctgagtggcctctggcagctcaggctgcaaggtatgaagccatcccagcacgggacacgctcacacacactcccatactcactcacactagggctatttagacatgccagttctgcagacacgtacatcattgagatgtggaaggaaaccagagtactgggagaaagttcacgcagatgtcaggagaacatgcaaactccacacagacagtggccccagccaggaaacaatttttaaaaatactcatcaactttataacaaaataatgttgaacaaaataacgttatttgaagactttctgtaatgggccctttggcacctgaaacataggacatactacatttgaagtacttgctgaggacayatttattgattgacattttttaatctttcttgtggacattcttagaagcccctagtccaatcagctgttacttataaggttatattttacattataatttcctgcccaaacactacatatatatttgattatttgttacttttgggagagtttttgrgayaattttaagcttgcagaaaagttgcagaaatattacagagaattctcatatacccttcacccagcttctcttaatgttaacattaccatggtacgattgtcaaaatcagtaagttaattttaatgcaatatcattaatctacagacacattttttgaactttgctagttttttcactgatgtcccttttctaggatcacacgttggatttaattgtartgtcttaagtcatttccaatctgtgacagtttcttactattkctttgtcttttatgattttgacacttttgaagagtactggtcaattttatagaatgtcctttcctttgtgtttgatgtttattttctcatggttagattgagggtaaacacttttggcaagagtaccctggaagtgatggtgtgrcctacttagtgcattacatcagggtctgtgacttcatatgtcttattattggagacgttaaccttattcacttgattaaggtggtgtctgccttggtttgtgctcaggagctggtagttctaatgttacttttattattattattatttttaaattctgaagctctttaatagctttataatcaacaaataaaactaatggtgttttataataggaaaataattttgtgatatatgacaatggcattgcttcataaggacaagaagaaaaattggaartgtacagtagaactagtatgttttactatagagtcttacatatgtattacttgagagtggaaatataacsataacttgctaacctgtactrtgactcacaaaacaggctctacctgaccaarctacaattactgactaaacctgaactcttttatcatgagctcattcagcctcatgtgctcaacccatactcataaactctgttccagaaactgcctagttgacaaagtctgaccaacatctagcaggaccacctcatgactagttccggctcctagaaccttctagtacctcttccctaattcttcattttgagacactccacagtttgcttggtgtgggtttacctttgagtttttttttttttttwaactattacaactgcactataaagttactattgttccttttaataaataccttgtggggatatactttgagactatgcaaatttcttgtttctcgtcaccctttttcccattgattttagcatccattgactttttcatgaagcagttattactggtatttgcctaatagtgattctctatttctctcaccagaatattcatttaaccagtgtcatccactgccaccattttatgtgaaacgaactaccctacaattagcccacgattttcattggtatttgtagagtttttcaccacttaattagcatgtggtctataatagtgtgctcactatgtttgtggcactatttgggtattaaaacaacaacaacaaacagcaacaacaataacaacaaaatagctgggcacctgtagtcctagttattcaggaggctgagatgtgaggatcacttcagctcagggttttgaagttacagtgcattataattgtgcctgtgaatagccactgtactccagcatgggcaacatagctgtactccagcatgggcaacatatttctaaaaacaaaataaaacaaaacaaaataggataatgtagtaactaattttggatagcttgtagtctgaggaaactagtgtaagacacatccaatagctatgaagtattagaatcatagaatgttagaagccaaaggattcgttgaatagttagttcagatatggttaagtagcattcttaggattcaaataagtagaatataccttgttgggaattattttgctagtagaccaagccctctggcacaagtttaatttttccttgagttcccttaccatatattggttatttagtcgctgtactaatgactcaaactcgtgataccataaatcgctaagcaaatagatatctgtatcattttgatatatctttgcccttagagatcctggcttaggtttttctaatggtgttttccacattttgaagcatgttttttttctttttttctatcttggcccatatctcctactgtcttcctactcttggattatgacataggcaaccattcactcatatgaggtgctttaaattgctgttcctagtaagatctcaaaagtaataggtaaaaacttgtttgagtggtcatcctgtgcttaaaccaatgtacttagtcatcttcttgaaatcctcacctctctttaccagaaaatattgtgtattgtgctgtgtacagtgttgaacttagtggttcttggtggtgaacttaggagtccaatctggtaaggagtggagtagctaaaaaacttgcttgggacaagcacagcagttttacttggctcttatgcttatttgaggtggcttggtttacttggtgctgccattggttatggttgtcttttttgaacaatccctcccacccccaataaatgatgcatttaagatgcctgctctttccagagggagtctcgtattccattcttcttgcctcctatcacagtttcttcctgagaaatgatagaaataaaaagctctatctctttttatctgagtcacagttgtctcatctgtaaaaggagaggtgaagtccgacggctaggaagtagaggaagcaggatatcaaacccaagtaaagtcaggctccagaatctctttctcgctctgttgtctcttcttgatcagttccttaaggctgtggtgacggtgaagtgagataaggcatgtaaaacagcgcagtgtagagctctccgtaagtttttaatgaaaagtaaatatgatttttgttagaaggtagtagctgatctacagtagaagaaatgtctgagcagtaaccttttgaaacataaaacacaattttgctttgaaacaaagtgcagtagatttacagaaaatgaaaatgtttatatggaacagttggttgtatggctgaacatgtaagatttgattatcagttgaatattgtatcgttaacagaaacttctttaagtatttcacagtgatatataatggcatttaaaaaaaccttttaaacctaaattcactgatttttaagaatgagggagcattgcaatgcataattaataccgtagggcttggtatacttaattgaaatactattcctattggccttgtttttctcaattgaaatgaaagttgattctcagtttgtggtcaattttctacacttctgataatgttgtggtggacgtgagttccagaataataagtgagaatagctcagaaagagagagaaaggcttttattgaactggaaattctactgatggttttgccatagaaatagaattaatttacatgatctttaaaattaatattcatacacccaggaaggatatctagggttatttctgtattaatcattggactaggtaggaatgtctaagaaaagagtatgattatttcatgtgttttctttagtgatcttttacatttttttctgtattattattattatttttttactttgttgctacattgtagcttagctttaaagactcttctgaaaggttattatgttagtgtatggccccttcactttctaaaagaagtgtttagcttttattagatatttgtgcatctttgcattgtgtagctgcgaaagggatatgagcttgaattcttcgcagaggagtatttgaagaaagcctcagataatgttattctaagaagaatccacatgctataattatatttcttattaatttggggggaattttcatgtaattagaatattggctttatttaaaaaatctatattcaggcatcaaactttagtttactaagtaataacccttaccagaatgattgcttgtgcaataaggagaaattatatatttctctaggggaaaaaaaggttcaatagaagtatagtttaataatattttattatttaacttttgacaaagtcgactgaatttkccattgtttttattacacattttgtacagttttgccgtattggttgaattttccttagaaacaaaacaatcaatatatgctttactagattaaatctgaaaagtgaccttaatatatgaagtcatgctctggtataaagatcatatagaagataggtaaagagtaaatgcttctttatttttaattgtctttttattgaagggagatgttttcaaatgtatacttgaagatgtttctcctttctccattctgctgtcaagttgcttaaacagtgagctgtatatacagtgaatacatttaagctgctagggtgaaactcctaactgaatgacagttctccatttcttttttctttttttttttgagacggagtcttgctctgcttcccaggctggagtgcagtggcgccatctcggctcactgcaagctccgcctcctgggttcacgccattctccggcctcagcctcccgagtagctgggactacaggcgcccaccaccacgcccggctaatttttgtatttttagtagagacggggtttcaccgtgttagccaggatggtctcgatctcctgacctcgtgatctgcccgcctcggcctcccaaagtgctgggattacaggcgtgagccaccgctcccggccaacagttctccatttcttaggggaacagaacacagctagatcctggattgtttggtcggtccatgggtttgaagctagagtagaacaatctgtgacccacgtatgaaagatggtacatgctgatcacaaatccaaccctgttctagccactttggggaactaatacctgcttcaccttttctttcctctcttcccgtccctaccctttcatgaaacatatagtgaagagtcagtagtccttcttcgtaagccagagcttccttcatgccaaggaacagtgacatgrcttgtcactttcaagttacgtctcttggctgaagggtgatcttttctattcattctggcttcgtgacagcaagtaaaagtttgtttgctttttttaacctactgtggtgttcaaacygtgacctcataaatagctgggatctcattgagataacaagggctctgcaatttttcatccaaagtaaaatgttaaattttctcaggacctatttcttttatgtgtttgaaatactatgattcagttgctaaaaaatgtttaaagctattatacttaaagcaataacttcaagactatgaaaataaatattttgaaacaaagcaattcgagtagaggaaaaaagtaaggtagattcatatctcttaatatagctgttcaatgaaatatgtaagtacttggtctttccctgaccaaacaccggcccctgctaattgaggcaattctgtgcgaagcccagtctttttctgaggttgtcctgggagtagtcgtcatatccaagactaagatttaaaatacctggtatatcatcattgctccccacccccaacatatacttatttttaattattttcagtcactgttasttaaggcctgtcatttgttccaggaacaaaaaaggatgagatataaactctgaacttgtgtttattctgttacatgaaataggaggcatagcagaccattgatatttacaaggtttatcacttaagactattgaaaatccccaagtttgcagttagcactatataggatgggaaaggtctactaagctttgggatgccrgtgttggctaagctcacttaccagcaaactgacttgtgcatcctcagatcagcctagtatgaatgatccagatttatactcagcacatttatgaatcagtgtttgtcatatatatttatgattattctcagatagaactttgtttaatctaggaatgttttaggatgaatagagatgcagggtgaaaattttgtggttggacattcatgcctgtggcacaccttatcttcctgtgattctgtagctgatgatgtggttctatagggctcttgtaagtggcttctcttgtggttgagatctgggaggtgaagagtcatttgaatgtgtcttctacattacacatgaagttagactggcactttttaaaaaaaatttgtttctgtctacagytctctcaagctgatatcatcctttgcttaaggtatattacactgctatttgtttttgctgataatattggtagggaaagctaataaaatttgaaattaacttacacttcgagccccatttagctaagatggtaaatggactgggaatatgaggcagactgttccttgtataacgttaaaaagcccayagactcttccagcctgtatgtaacagcctgtatgtaacaaatagctgtttcctaatggatgaagttaaaattatctagattctcattttctgaggacaactaaaatatataaagataaaaatacatttaacctcaagtttataacatgttcagttttttatttgcatgttggtgggtgcacttggaactctctacatgcagatagatcataaaacattgyttgggagggacctgcatacctctcttattattcagattcagtgacttataaagcaagccggtgttggatcgagattgcagttagagataatttggtcaaatctgttaatgttgcagatgcagagggaggagtcctacccagtgatttgaccaaagttccatatctggatgcaaaactctccattcatgcttttaaattagagaacagactcccatccctctaggggccaggcaagtatcaacaacaagtgaatgaatgaagctgacctggttggttttgcagctaggtgaaagtacagttgtgtgtaccaacaaggcagtggccacttyatgccagccatccagtgccatgcaggaatgtgggcctggtgctgccaggccttctactctttagaaagcagctctagatctgatttttttttttaagaaaaaataaaatatcctgagttttaaatgttgtcaatttgtttgaatttttaaagcactgtgtgggccaacattttcctggccaaacagaacaagtctgtgggctgaatttggcctacagccagtggatgctggtgctctttccagcttgtgagagctgatggtgagcatcttttccagactctacaaaccgcgacctcacattggtagcttaaaattcatccacagtaggagtatttacaccacagaaattggcaaatggtacaacctgggcttgccccttctccagccctaccacccctcactaccaaaggcagttgttaagcctcacacaccactgcattctatcgccagtctgagacttttgtaccttatggctccaagggatgtctttcatagatgtttttaaaccccgtttgttctgatttttgtagccttttttctgaaagagactcacactactaccatgtgtaactcgttcattcttataagatttttgtcattgttgggttgttgggctttctccttatgtttcccttactatagttagcatgggagctggaattatagtcttgggccttaggaggagtacctagtatattgtaagtattatggtacattcataatggacatttgattgaacttgcctaaagaatgctgcttgatttttttttttaaagccatatatacatgtctcatttagaaaagtgaatcctttttaaaattgattaattagctaagtttagggacattacagtgattctttcctttctgttggaatttagaaatgctctagtggtacacccgagggtttatcatgtcagaaattatttctagaaaaactcaagctcagatgttacattttcatttggtagttattccagtataaaaacagagggaagatacctaattggtaagtttcttcactttttggtgccttagagtccttatttataaaatggaattgttatgaacttgaaataagataatacatataaaatgattagcacggttcctgatactacactggttgctactgcggttatattattggaaccattacttaatcatggttgcttgttgcagtggtatttatggttatgatagttagactcagcatattagaactgaaaatattttgcctaaaaccacccccttccaagtattttcttgtctacttttctcaaatgcaaccactcatatctggaagctgttttacttttttgtctcaacttagtaagaagggggttatgcatttatgaaagatacttgagtgagtaccaggtttagagtcagggtttctctatcaggtagtagcttgactccagtaaatatgtaagttcaggtgtaagtcttccagggcaaggagattttataggataccctagatcatcacrtcagtgtgaacattgatttagtgttcaatataggtattaatcaaatttgaagaatgaaagtttttattttgttgttattattattgttattttttgaaatggagtctcgctctcactgaggctggagtgcagtggcgtgatctcggctcactgcagactccacctcctgggttcacagcattctcctgcctcagcctcctgagtagctgtgactacaggcgcccgccaccacgaccggctaatttttttgtatttttggtagagacagggtttcactgtgttagccaggatggtctcgatctcctgaccttgtgatctgcctgcctcggcctcccaaagtgctgggattacaggcttgagccactgcgcctggccgaatgagagtttttaaaatgatctgaaaccattcatcatactaacatactgattgtgaaaagaccttgtggtaaacacaaagaagttgcataaactcttaaaaagaatggattgattattccttaagactttggttttactaattacgatgtattctagaatggtgccttcaaagwtttcttttaatttatcttatttttgcagttctgctaatcacataattgtaatagtaatgaattgggcaagacagtaatttttctcctttagttttcattgtatcatagagcctatcttcctctaggttctagatcaaagagagggtttcaggtttagacctacttcagttaaactgcttaggccagatttgaataaaagtattaaaacaggtgagatgtttttgcattaaaaaaaataccattcaaaaatttgagtgacactttgaaaaaaagttgcctattcccaaagactatggaagcaaaagcataattatgctatagattatattttagggacaattatttgccatataactcttctgaagcatggaaacaagacttggttagttgtatttcctctgttagaggtgtgtaaggagtctagatttggttcatagtcatgaaaaatattcatgtgatagctttttggacgattgtattctgcactgtattacaatggcacaataaattgctgaatatactgtctgctgaatatgactttaccatgaaaaatttgatgcatggagaaggaaaggttggaatatatcaaccttttctgacaagggactttgaattttgacctaatacagatgacctttgtgcgcaataaaaatgagcttaatcttgaggttaargttgaggtgaatggcaggacagtgtggtggagcttacactgactggaggtgtattggtgcctatgtggctattggctaaatgggagtccggcacttaaaattttttttttttagcatttcaagaagcttatttatagcaagttgtttggctctttaataccaccccatttcctcaaagctcagctttctgtttagttgtggtaagttcatctgtttttatgaagtttactgtttctgagtaaaargtatgactgtgcttttatttattttctgttccatagataagctatagagaaaaaaatgttcttatggcttatggaaaagacaactgacatatgtaaccttggaactgaaaataaatgttcttttaagaagatttttttctttgacaagttgaacttttgtcatctaactttggaactgtcaggagaatttttaagcagtttgtgcctttatctagattataattaagagaatgtgtgggaattattgtcttgaaaggcttagatgatttacagaatggctattgccttggaagttcctttgaagtgcattggctaatacacttacattataatataatataatataatataatataatataatataaaataatatgatgatataatgtatttttaaggttttgcccactgtacctagaaggaaaattgttttaaaacatgaatttctctatcaaatattttattttcaaatacctccactgatttgtcataaaagaaattacaccttagtgaacatcaggaaaaaacctgctcatgttatagtacctgaacacctattgaatagtctgccctaataattggttgaaacaacaaatagttgaggagagtgccagagagtctaatggaaagaacttctactcttttaatcgagcctgcaaaatatattccctgggactgatcagctctgaagcactgaggtttgatgattggaatggcaggaaaccatgctttcaggacataacgaattgacgaggccatccatcatttgttagcatacgctgaaaacgtgggctatgtgtgcagaggcctgtgatttagtaaatacttgggagatgaatagagcttacacacaagggaagatattgctgtccttcagcagcctgagacccaggcgcctgctgagaaggccatctgacggcatrtcatcagtaactggcctgtcacagtcagcggtgcccaccgaccattgccagtatattaaatgcatttttaatatctgcttcagtasatttaatgaagaaaatttagtttccatactccgagcactgcttcctcaagtattctaaagaatgaactccttgcctacacaaaaaagagggaagaccatgctggcagctaggagagttgattgaaaaggaaactcaaacaaaataattgctaacaaaaaatatatttagtagagtcagtatcttgttgatrtgaaaaaaaaaagctcatttttttttttaaagaagttttggattaaatttttagcccctaattcccttttctcacaagccctctccctaggaggattcgacctgctggcaaaggaatataaacctactgctctgaaaggaaatattagagggggaatattatggtttggcataatttgccaaatttatggatagaaagactccattttaaattactttgtgttttggtatactactgttgattcttaggatttttgcatgaagatataaagtggagtttttcttagttacttccaaatttttgaatattgaactttacttgtaaacttattaattaaggtagtaatttttgcctggtatgcagaacagttcaaaatgaatgtaaaaaaaattagttgccaacttgatataaagtgctcttatgtatttcttatgctgtaatgtttctttaaaaattataatttttaaatgttctattttcaaattcaggcaaagtgtgtagattcattcttttaaatgagtttcaatgctgacattatttactacaaaacagcaagacaaccaattagatgtagttgcaaacatgcactataaacccctctttaaaaaaaacaaaaaacaaaaaacaacaacaacaaaaaaaacccagaatatgctctcatgttcacagaagaagaagctacagaatgggacctataaatctgattcctgcatgtgtcaaaacagtaatgtattaaatgcatattattataaaaatttaagacatgtcttaaacacacttacatttttataacacgtggcaatattaaataatacctttccttgttagcatctgtttgccgtcattgttggcaagacctatgatttattgcttaaattaatgaccaagaccattttggacctgatatatgcccctaagcttattacatcactaaataaaataaaatgtatgtgcctatgacagagttatttttataattgtttatccctttaagtgccctrttcggtgattcactgaaaggttcataatggttggcttgtaaccagaaaataatctcagaaaggtaaaatacattgcttgtttggaaataaaatgccagagtgatggtgatgataggggtcccagcaagaatttgcaatgctcaaactctttcttttctcaatgctctcagtgacctcttactgaattttttgatacacaacctctctaccaccatcccaactcttaaagctatctgttaatgctggcactcactttcatataaaccctgcattatggctaaagtggttttttgctcagacataaagctgtaagggttaaattattctgtacttaggattttccaggtaccattatcaccatgcattaaactgagcaagattattttcctatttttcgttcttttcttttgggagattggaactttactattttttatattgaactgtatttgacttcatcgtctttatctttcctttctgacggtgcagtatgatagaaccttcagtatttttacaataacctgttattcatctaaagtcactctgctgcctgacttgcaatacaatattatatggctttgtggtttctttgctccacatgaagtatctcattgactgtcagttctcctgtcatctgatggtaaggtcaagtttttgagaagctgatgccttgcttctggattgtagtatctacaccttgaaacatatggagcttctttgggaacctgagagtgttttttgtgagaagattattattttgtagatatttgggaacaattctcatttattttatcactcataaatggacgtaaaacttattatgattattcttttgagaccgggtctcactctgttgcccaggctggaatgcagtggtgcaatgtcagctcactgcagcctcgacctcctgggctcaggtgatccttacacctcacgctcccaagtagttgggactacaggcgtgtgccaccacaactggctaattttttgtatttttagtagagacggggttttgctatgttgcccagtctgctcttgaactcctgtactcaaaccatccacccacctccgcctcccaaagtgcctggattacaggtgtgagccaccacacctgacctgacttagttattattagttattagttattgtcttcatttcacttttactacattttaaacaaaatagtccattggaaacaaaaggttttttgcttagtattctttcctaaggcagttgatacaataaagtttttaatcgttctcccagacatgatcaggccaacatgcattcatgtttttttttgaaaagccctattgaccttgccttttgaggctctcagctcctctcccattgctgatctttttaccatccttttcatttcattttccttgtcctggagacctgcccccagataaaacattttaggagaaaagtgatgaaaaagaatctgaagtgtgaagaatctcaagtgccacgtctaatctatttccctcccttcctccctttctattttcctctctccttccttctgtccgtccctcccttttccaccctctccttttctgcccttcctttcctcatctgtccatcccccatctttttttttggtctcttgaatattagctttagtgagtttttttgtttgtttgtttgtttttttgtttgttttgctttggccatggtagttacttttacctgttcatttggaatgtatacatttctttcttttgctttctatttgaattaattgtgagatcctttggatgggagctgtgtgctttgctgtaatttgatcttccagctgtacgctgtattgcctagcattgtagtgttcttttatgcattcagtgaattcttgctaactttctgatgtgggccygtgcttatttttatgatctcttttgaggagacagcgactttgaagcatacttgctttttttttttttttgggaggggagcagtactgttctaactagtaccctgcaaaggacttactattctttcctgaaattgttacttaagctcccactctctgggccaagatatttaagtcctatttaaaaatattaaaatattcagtaggcagctaagtgcttagtctactgttctacttaacactaaatgaaagtaaaatataacacagacatggagccatttgttatattttagtatatgaagcaatggctgtgtaaaccttaaccttgtaattttgtgagttccactttatcatgtagctgtaagggtaatcaaaataaatcacaggaggtgaataaatattttctagtgctttctcagtgctttaagaagtgatgcttgatccatgaaattttagtaagtgtattaaataaaacaatatgatgtgcactgtgtcagatctgataaattattcggtataggacatttatacaacatatgttgagctgctacgtgaacagcttaatgactaaattatgttaatctgtcttgccatctttatattttgttaaaaattgcactatttgtattatagatatttatatatttgtgggttggggcagggataagaagaaggcataagaaaggtgcaggtcagctccacgatgttctgacagtgatccagggctcctcagctgtgcagtgtacataacacagatgttggggagtcatctgtcagccatgcctctcctatggagttaaagttctagagggaaaagaatttgacacagtgctgtcactgttacattttcacaatagaagagcatgcaaatattgaacctcctgcttagcaatagtgccctgtctaatgtctgtgctggttagaataaaaaatcatgggtgcatcttgggctcagagatctgacaaaggtcatgctatrttgggcatttgaattggaaattgtctggacttagattttataaagctcccactgttgtgtgtggggagaatttcagcagggttttgtccctggagaggcctcttaggcccttttctgtcctatgaatgaatttagatgtgagggttactcctgccttaaaactgttaagttcattttgcatacatccctagagagaaaaactggcagatgcttttgtcttggaagtgtttaaaagaaaactgcagagcaggaacaagggagaaaaggggccctgtgtggagtcccagaacattttggaaatggccaatatgcagttttcatcagtatgaaggcggggtgcaatatggtgcctgtagttcacgagggaatatgaatgttgattaagcatactcccaggctttgaaattctgaaagcagtgtcagaataatggatgttgagcaaatgtcaagcatttgttaatttctctgttatttggagtttatctaccatgatcaatcaaataaactagtgcttctctcttgtggcatgtgtcattgatatggtgattaggtggctagagagaccttctgctttttttccaggtaacagattataaacgagtagacagagcttttcagttaaagatttgtttatggcttggtttagtagaaatttgtatattaactgaatactttggtggcagtgtgaaaatccgtggccacatgtcaaagacataaattctgggaccatttataccaggagaactagtattggaggcatgttttccatcaaagtatagttttcagtagtttatgaaactttgatgtaaaactggacaaaagaaatggatcctagatgaatgctaaccttaacatttgtagatagacttttcaatccatttttatgtcatttttcctatttcaatggttaattctaagttagtgattgacttttattcgtgagtgagagtaaatttgtttcatgtgattcaacataatttctattatttttaggaagtaatgctacagtgttttgatgtcccaagtaggggtatcaaaaaaaaaaaagtaaaaggttcctttcagagtttacttaactgtggattattgtgcagtgctaacattctgcagtgtgaggagttggttcccttttagaatgtgaatgactttaccaactgggatttcattaggggttgagactaggtacgatgtgtaactgtcctacccttcagcacggggtaacttggactgaaaagggacctttatgtgaaattttagtggctggaatcaaggtagatttgtgattggagatttgtcctttttctataccccattttcttttcgtagtcttaggcttgtagcttacatgattcagatggagactagtgtaatacttaccacccttgaccatgtccaacaggtacctctgtggtctttggcatggatatttttgcaaaacgacctactgaggtgatctgtcacctattattaaacctcatgaacttgttttttcaggggattcacaactgagcagccacagggcattgtaaaaccccagtgaactaactacttgtgtgatttctggagctctttggttttctcagtctgccatgaggtcacaaatatggcagtttccaaagcagaacatttttagcttcctcttcaagctaagctgctttatcttaactgtctacattagacctttgcttttggccttctctgggactggaattcctaaccgtatgagtaaaatcctcgtgtcctgcctggcacacagtgctagtgagctctaccattgtactgcctccagcatcataaaaatagacagcagtgctgattgacttttctgggctgctctctgaaaattcgtcatgaacctgacacgatcatagcatcactgaatcattaacttgcaccatacaccaaaacactcagggttttatcgatagcagctctcaatttttttttgtattcatagtgataaagctactattattcctaattgggattaggaagacatgaaaaatcttgttagggtgttgaaaaattattatgtaacagtaagagggaaagagtttgaatttcacttactgtgaattcttaagcgtatgtgctcagcgtgaacgcttccagccactccagtggaaggggctgatggttttggttggtggtgtgccctgtgcctgccaggctatcagcgcctgcatcttgtcttctacttaactcttctaatgtcctccaataaccaaacttttattttccctcacatgtattgcaactataaattaatggctcacagttttaaaagtgctataatgaatactatttcctactgcggacacattgtaatgatagcaaaaacacttttgggacttctcttttggcaagtatttttggagtgtgtgacacagtgtctttggtacttttgagaatggagacaaaaggcattattaagtttgaaaaataagggggctgatgttactaggtgaccataaattctagagacataattattttgccatgtgttataattcaataacaataaatcctttattgtatttatctgtgtttctagacgtggtggccaccctgtattttggtgagatgtgagatgtgactgtgaagttggttttcttgtgtaackggtaaagtggttctaaagtgattcttaaagataagttgggctgggcgcagtggctcacgcctgtaatcccagcactttgggaggccgaggcgggcagatcacgaggtcaggagatcgaggctcgagccatcctagctaacacggtgaaaccccgtctctactaaaaaaaaatatatatacaaaaaatgagccaggcgtggtggcaggcacctgtagtcccagctacttgggaggcttaggcaggagaacggcgtgaatgcgggaggcagagcttgcagtgagccgagatcatgcctctgcactccagcctgggtgacagagactccgtctcaaaaaaaaaaaaaggtaagttgtgtttttgagccatggcagcatcattggtgctaaatatacaaatcacactcctctgggattattactttggccaaagataatgtgagtaaattagctccttcttttagctgaaaaagtttattttgttactttatccttgtacttagtaagtgcagactctccttccttaactattagcccttattttatgcccaccttttctctgtgctccccaaatgtagactgactactcagaagctaaagacacattccctttaactaacctgtttccgttacccgtctctctggtggttgtttataaggcaggcttcttagaggaagaagaaaagtaaagggttagataatctaactaggcagttaatccttgaaaaccagagtggtagctcaatttaggattttcagttacattttaaagcatttcttatttgcttagaaagggagactatagtaatttttgaattttatcctatagcttacaaagcattttcataaaactttctcctttttctggtggtagtgatggagggggttggagatacttctttaggcctctatttgggatagggtttgaaataggatgaaacttatttgctatttatttttattttcttcctgtgtttctttctgtatcatataagctcctactctcctattatatcattgaaactcatgctttttatcagaataaagaggtaaaattcttccttgtctttggaagggacttatacttactgtagagttggaggaatcactacaaaaggctgagtaaaacagagaaccctgaaaaaagagttattgtccatttatttagcacagtttctgtggtagggaggcaacattaaacattattttaaaaactgcatttgtgagatattaatagatgccttggtttgctgcaaattggttaaactttttttttggtaatatttaaatcatagagataggacttttagtaactaagtgtaggtaaacactatttcatgatcagtaattatatatctggttttaaagctgtttcaacaaaatgttattggaagacagattttctgctacagatgttaaaaccttyggaatatgtggggctgaaaggaccagttcgggtgtgatcttaaaattgggcagcttgccttctgcttcaatgcttggttccaccctgaagaggggagttacacaccactatgtgcacttgacacatgcaaatgctaaattcagtagcagcatgaggtctctgtcattaacagtaatttatgtaatgaaagccacctggctttttttttttataattaattgcttgtaaataataaatttaagtgtaatttatggttttctaaatttgattaccatgtagacccaacagcaaacccaaaaaaattatcaattccataatgttcttctatgacttttaaaaggtacacacacacacacacacacacacacacacacacacacacacacacacacacattttagagtaaacatcagatgaaaatacttttggggagcaataagaatgtaatcaactcctgttggttttattcaagttggaatgctaattttgaaatagtctcattaagttttatattattatgtcagctgaccttttaaaagtatttacacatatagttagtacactcagaagaaagtatacctacttaacagtaatatagtaaaactcctttaaaaaaagctttttccctattttgtaaaattccaattatgttttcaaaagaatttatatatgaagaaaaagcacctaagcatatatgatgatatttaacatattgtggtgataataagaggctctttgcctaatagatttaccaagcacaatatcttagtttaaaatggctttacggtagttctttttgtttatgtggtcacatatatcagctgccaaagaattgtgttttctgacatagaaaatatctaagattcacatggtttaaagagaaagggggatttagacccttgtcctctgtgcttctctttcattaaaaaagaaaggaaagacggaagtaaggaaggacataatttatggctttatgtttaagatttaactactgtttaatgatgattatatcagactttctcaaactttgaatctgatttcttaaattcatacctctttcctagatgcatttcttttaaatatctatattattattttgtactatagccgtgaaatcactatcattgtcagtgtgtataatacttttgtaaaggattaacagattaaaggagaatttgagtagctttgacctacaaatttataaactgcaaagacttttctccatatgtgactagcagcatttttacttcaccatgatttaataaagtttatataaatcaataatgctgtttttgtaacttgtattttttttttaatctggaattctctctgttctttgtagaaactcaactagattatgaaaaagttagttctgttaaatagcaaaattgcatgttgactccttgcaagattgagagagtcaagtgaggaggtttccgcgttagctggaattgtctataaagaataaaaattttggcttctgtgtgtagtcagagtgtgaccaccatccatcacctcaatagcagacatcagatttgttcatcacttggtttccaaggtctaataatccctcaagaatttagastgttgttgactgtccccatttacatcagtgaaggctttgcaacaggtgcagctgtgtatactaattgcagggtgtgcctaatctgtccagaagggagagtacctccaaatttggtatcttaaagagtggagtgaccttttaaagtcccagaatgagaattgccaacaattccaacaggctaattatacccacaaggagttgtgaagtgcttttaagttttcctgtacacctaaaagttcagtgaacggcttgaagtcattaacatatgacagatgcactcccttttcaagagcttgtatgataagttttgattgtagaagtgggaatttgacctctagcttatcacttgcttcattagcgtgcttgaggacaaggagttttttttttgttttttgttttgacgtgagtgttatcttactcatgttccagaattctatctgcctccttctctctgctgatctgaagtcacagtagataaccttgatgctggttttttaaaagcatcacgcattgtgtagtgttacatatattttatatataaatatatacactatgaatatgtttctgagcatgggtctttcaaagttttgattcattattttagatatactacctcccatgtgatttctgttctttttcatggaaaaggaagaaatacactttttggctcataaagatgactgaaagtccgacttctacatttccacaaactgaccacttcttgaagtgaatgagaataagggaatgaagtttgggactctgcacacacatggaggaaagtatgctacccaaagaatgaacgaatgctagaggtgtacccataaagagatgcggaaatgaagcttagaaggatttcatgtggtaaactctgtgactgcagcacttaaatgaaattgctttttattatctggttgaaaaatcatccaaaataagccatacaggacaaaggctaaaaagcttctgggtaaaagcagtcttggataatttaattttctcccacagcagttctgtatttacctgcttatgatgtctgtttcaattccttaaaagactgtatacctaaactttattttaaaatgttttctgttaaattaaaatcctctgtttatagaagtcactattcccttaacctctaagggggttatgtaaattttatattccctaagggcacagtcatatttagctgtgttcctgtcaattaccagcaagctctttttgtacaattagggggtggttaatttactctagtaaggttgccacctgtctagggattaacccaaacaggttggaagtcacagagagacttttgaattgaggtttaaagcagtaggagttgatttattaactctctactaccattttggtggcattttctgggttgatcagtggtacttgtgacagaaggtgttttcttggtccctacgtttgtgaggttggaaaagtacattgttaaaattttaagtgtcactggaaatctgtgaacagtaggtgtaatcatgcctggtacccatgaaaatgaactggaaagatcttccactcctctccattgtttccagtcttataatatcttatcaaattgttggatcagtgggaagtggcatccttaaataatgtggatagtttgaagactaggattgtgttcaatggaaataacatcttatctggtgtgtcaggaaaataaaacatgaagaacattgatgatatagttcacaggagaatacgaggaggtaattttacagtatttaaaataagctgtgagaaatacccaatttattagtttaaagaaacatgccttaagttttctgatacaatatgtaaaatataatagcttacttcatatgatctaatatgcattccatctggagtcttgttccactaraagtgtgcccgcgatcatgactgacttctttgagatctgtgtgtgtgtctctttccctccctcccttcctccctcttaacttccttttattccttcttctgtctttccttcattccagtttaaaattaagtgtattgtacgttatataagtattcttttttcaattataacctgttatggatatgcaattcacatactgyaacattcaccctttttaagtgtacaattcagtgacttttagtatattcacaaacttgggcatccatcaccattatctaattacagaatattttacgaccccaaaaagaaacccagtacccatcaggcatggctccccattctcacactggctcagttcagtcctaggcgatcactaatctactagatgtttctaccgatttgcctatctggacattttgtataatggatattatacaatacgactagctttaacgtagcgtaatgtttttgggattcattcgtgttgtctcattctttcttattgctgaaaaatccattgtaggaatatactaccttttgtttatccttttattagtttgtagacatttggttgtttccctttttgggctattatgattaaatgcttctatgaacattaatgtataaatttttgtgttggcctatgtttttgtttctcttggatagataccttggagcagaatttctgggtcatatggtttaacattttgaggaaccataaaactagttttcaaagtggctgcatcattttacgtttctccataggaatgtatgagggttttaatttctcagaatcatcaataacacttgtgtattgtgtccttttgattatattcctggtgggtatgaagtggtatctcactgtggttttgatttctatttcctcagtgactaatgatgttgggaatctttttatgtgtttattggctgtttgtatattttctttgaagaaatgtctatctacattctttgttcattttctaattggkttgtcattttattattgagctgtaagagttatttacatattctagatacaagccttatatacgtgatttgcaagtatttttttctagtctgttggttctcttttttattttatttatggtgtccttgagttattcttttttaaggatcttacttccagaaggaaggtacagaagatmaatatagagatatctgtaacctttctatgaggagaattttatcactctttagtgaagttcttattgttcaatacactattttagtaaaagttgtttttctttaaacagtatgttaaattaaaaaaaaacttggcaagcaatctcctgaatctcctgaatataactttaaaagttaggcatgcttttaattttttcccttttcgctttgccttttaaagttatacacaaatatatatatttaaagttttacacaaatctctgtgtgtgtgtatgtatgtgtgtatdtagatagatagatagatagatagatagatagatagatagataattttttaagtcagagtcttgggctctgtcgcctaggctggagtgcagtgacatgatcatggctcactgcagcctcaacctcacacgctccrgtgatgcttctgcctcagcctcctgagtagcctgggaccacaggtgtgcaaccactatgcctggcctagtttttaaaattatttttayggatgggggtctccctttgttatccaggctggtcataaactcctgttctcaagggatcctcctaccttggcctcccaaagttttgggattataggcgtgagccaccgcacctggcctattatatcttgatcatatcatctaagytgacaatttgataggrgtgatgttagtaaagtgctaaaaataaaaacttgtataaaccagtaaaaatgttacttaaaaaataactataattgtaaagaatcagggatctatcaacttaaaatgaraaaacttaaagggctgggtgtggtggctcacacctgtaatcccagcactttaaaggggggaccgagacaggaggatcgcttgaagccaggagtttgagaaaaaacttaaactcagttctattgcttttacaaagtgattaaccagatatggtttatgaaatgtatttctttagctgaatgctgggaagagaccatcacctttcctgggccagaagatactggcctggggatccagaccaggtaggaggtctggcttccaaagccagttttgctgcagtgctaagagcatggccctgggcaagtcacttactgtcttggagctccagtttgtccatgtggatagaaagagctcctgtttttcacacaggatgtgttaagcttttaagaaggatgtagtgccaggataatgccctgccaatctggaggctggtgttttagtaaagctgtgaaaaggaaactttctacagtctgagagagaaaagatgagagcttctgccttgtacagctctctgtgtgaccacatgctttagctctctgacatatcaaagtagggcatgtaccttaggagctcctctggttgaatattatctcagaggtctcaaagactggctatcttgctaaagtagtttatcagcaaaatacgagaaagggttcacaaactataatataggaaatatttaatcagtaagtaggtatttgcattaaaaacaaaacagatgacagctgcatcaaagcacagggataattgcatgttgaaatgatatttgactaaagcaaggggcatgtaggaagtcacttcaaattgtggtgttgtagagaagtacctaattgcttgttcctcttgtcactttgcttcttttaagtgacttaagcaaggtagattcttaaattgtgcctttataaatcttttcagttgtgtaatgtgaaaattattaatgtatgattatctagacgtagttgtgtagtatatcatcttctttggatagttaatgasatgttggcttttgtgccatttatcttgggaaaaaagaatagctttctttcacatccacttcttttgccacactttatcttttatttggatgggtttgtatataactgcgtgtgagtgtgtatgtgggtgtgtatttttgtttgctttatgtgtaagtgataataagaatatatgaatctagttctcagctagattctatttgcctaaacaaaggtggatacctgccctctgcaaaggctactgccttaagaaaattaagtgtccacagaattggtgacctgtttttaagagaacctgtaacatctttctaaatgacaaatcattccagcaatatttaatattggcaattttcttctgtctgcttttagaacttattggccagccaggtcagacattattaaagttcaaggggtccagtgggaagagtaatggttttgtgctactaggaattttaagtgttgccattttcaggtgttatagcatctgttctcacatgccactaaaaatgtatagaagttttagaccaaattcagggtcaaggttacaagagtgatgatgcttctgactcattctcttagcgttatgttacccaaattatctgcataacattctgtagtaagatcatttttaacaagttatttgaaagaacttattataacaggcttttttgggggaggccttagcacttcttggcaatttgtttaggtacagttggagaatctggttctgactgaactgggtagctattgacaatactcagatagacagtagggagtcctttagttctgagaataactgtgttttctacttaccagaagcaatgccttttgaatataaaagtcttggggaggctgagtcctgtgctacatactcttttgagagtccactctccagcacgtggaaattgtcaacaaacaggtgcttgataaatatttgttgaaattctgaataagtgaactaaccacctatttcaagaggcttccaaatgtgtagctatttaatgtacattggtgggtttaatgaaatgaagaragactgagaaggaaacttatacaaaattatcatgggttggttgagtgaatctaggtatacctgcatctcttttgagatgaaatgtccatacctcataaaatcagctgattttaaaattttcttagtattatcattatcttgaaagagaataggagaaagaaagtttgtgttttgggaatcgaatactttattcctaaagttggtaaatattttactaaacggaatcgatcrtgtcttgaactaaaaacatcagcaaggcatttgccttttatcaaatgaatatcaagttgtttttttggtggtatctctagccctacactctgttattcaccaatggtgtttgtgaaatgaagttcataattattagagataactcttaaaggaataacatatagtaggaatttaaaatggcttaaatttattgagtaagtaaagtgaatgaagacaacttttagccgtggtacattgttcagaattatagtagcttcatttataattgttgagttcacttggatagagtgctgttcccatgatagaaaatgtagttttccccaggtgtctgttttctcattcttctaatgtgatagaatcctccagttttgaccagaacatgacttccaagaacagaggcgtccttgtatctttcatggccatgggactgagttctggctattgcagagtaagcgtaagtttcatgtggcagcttagttttatgtggagccttccctaagagacagcccttgtctctcttcttcaggatcctttctcagtcttgctgtctggaatgcacatgccacagtcttaactgtgggctgatagaatggtgagctgacaggagcctgggtcccaaggacttcctggagcaaaattgctgtggtggaagagacaaatcttactgggaaagacaaacatttctgtacggtataatccacagttatttgggattgtattttctatccctcrtaagcgaacctcaccccatctattagagatagatgggctgggttttatcagattggattcctaggatatgagatcagaatgaggctgcatgagaacaagtttgtcaccatattcagagscattttaaagtgtgtgccttactgattgctggtgagtcacgtagccttttagtaagcttggcatgttatgatgctgagcgtctttacttccctggttctggatttggtctgactatgtcaggacttgtatatggcttttacagatttcctgcaatgactagtctgcattatcttcttggatgttgtaaagatagagagttgggttagggagcggttactgattatataatcaacaggtcacagtgctcttttcaggcatcattatttttagtctggacataaacatcttttccctaagaaaacgtttccatcaatctcagtatttgtcgatatctcttaaaaaggtaacagttggttgcttgaattttgtgatattgtagccattatcaaaatgaaagcagaggccaaaacatactaggtttttgttctgtatttgatatagtcaaaatttctaagacttaattaggagcacacactctcttattcttgtgaagcttaaaatcactaattgttaggcaccacggtgtttggaagcaaaacatctccgttagcaatggcatctctgttatgtgttcacatgttatctcaatgcatgttcatttgctgtgtctgtgagttgcaatgtttttacattttcccttaaaatggatgtgtgtgtttggtatgcgggtgtggatgttagggaatgagaggaggagggtcattcttcactaagtcatcacttggaaggctaataggtgcaagtcactgtgctatatattgatgacgtaaagttaaaaagatgtaaagataaaaaaaggattccttgtcttaagaactcagttttggagaggaggctgcaacgctgagtggaggaggcaggaactggagcgtgagcagtagctaggtgggcaccatggctgggatcaccaccatcaaggcggtgaagcgcaagatccaggttgtgcagcagcaggcagatgatgcagaggagtgagctgagcgcctccagcaagaagttgagggagaaaggcgggcccgggaacaggctgaggctgaggtggcctccttgaaccgwaggatcaagctggttgaagaggagctggaccgtgctcaggagcgcctggctactgccctgcaaaagctagaagaagcggaaaaagctgctgatgagagtgagacaggtatgaaggtttttgaaaaccgggccttaaaagatgaagaaaagatagaactccaggaaatccaacccaaagaagctaagcacattgcagaagaggcagataggaagtatgaagaggtggcttgtaagtgggtgatcactgaaggagacttggaacgcacagagaatgagctgagctggcagagccccrttgccgagagatggatgagcagatcagactgatggaccagaacctgaagtgtctgagtgctgctgaagaaaactactctcaraaagaagacaaatatgaggaagagatcaagattctactgataaactcaaggagagacctgtgctgagtttgctgagagatcggtagccaagctggaaatgacttggaagataaactgaaatgcaccaaagaggagtattctgtacacagaggttgctggaccagactctgctgacctgaatgagctgtagaatgccccattcccaccctgctgctgctcctccctctgaccctgactccacctaaggccagcctgcccgaagctgacctttaactgagggccgatctttaactggaaggctgctttctcctttcgccacccccttctcccctgtggcttttttgccaaactgtctctgcctcttcccagagattccagctgggctagaggctgagcacctttggaaacaacatttaagggaatgtgagcacaatgcatagtgtctttaaaaagcatgttatgatgtacacattttgtaattaccttttttgttgttttgtagcaaccatttgtcaaacattccaaataattccacagccctgaagcagcaatctaatccctttctcacttttggaaggtgacttttcaccttaatgcatattcccctctccatagaggagaggaaaaggtataggcctgccttactgagagccaaacagagcccagggaaagactgtactatgggaagcctcattgctgtctacaaagtactagctaaaccagaaaggtgattccaggaggagttagccaaacaacaacaaaaacaaaaaatgtgctgttcaagttttcagctttaatatatctttggataatgttatttctattttattttttcattagaagtcaccaaattaagatggtaagacctctgagacaaaatttttgtcccrtctctaccccctcccaactgcttacagaatggatcatgtccccccttatgttgaggtaaccatttaattgctttcctgcctccttgaaagaaagaaagaagattgtgtttttgccactgatttagccgtgtgaaactcatctcattacccttttctgggtttgaagctgctgtctctagaagtgccatctcattgtgctttgtatcagtcagtgctggagaaatcttgaatagcttacgtacaaaactttttaaaatttatattattttgaaactttgcttctttgggtttgtggcaccctggccaccgcatctggctgtgacagcctctgcagtccgtgggctggcagtttgttgatcttttaaagtttctttccctacmcagtgcccattttctggtaaggtttctaggaggtctgttaggtgtacatcctgcagcttattggcttaaaatgtactctcctttgatgtggtctctttggggctgattgggagaaagagaaatcaatagtgcaactgttttgatactgaatattgacaagtgtctttttgaaataaagaaccagtccctccaaaaatgaaaataataataataaaaagaactcaatttaatggaaaagcaaatgaagaaaagaatacttcaattaaaattaatctgcacaatgaagtgtggtccaaaaaataattaaakttcaacatgagacttatttatgggctcactaaatccagaaatctgaagggtttcatgaactcctagcccaaagcaattctattgagagcccctgaaacagcagtgcgagtcccgcaacaaccaatgaaagattattctacctacatttgtgaatgcttaaaatttagttttttaaaaacacagtccttctcaatttcttgttttgttttttggtttgaagttacatgttgtttttcctctggttttcttcttggggcattatataattgtcagaattctgttaaaattcaggtttgatgtagtcattttggaaattcccaggtatcctccttcatatttttattctaaaagcaattctgaagaacatttgccttcacagtgtttcaattcagtctaacattggaccagtgggagaatatagcaagagcatcgatgggggaaaatggatgtgtgtacagaaaaacataagcggcatgatgtagcctcttccttcttctcattatctggaattcacaactaatctcttaaccaccaggctgaaggcacatcatatacatggtggacaggtgaactggaggctttgggtctcagggatttggaggtgccatgttaagtttttagaggctctatcctttaagaactggatgcttctgttttggtcatttttttctaagcctacatttttctttttctttcattttttttttttgagacagactttcgctcttgttgcccaggctggagtgcaatggcacaatctctgctcactgcaacccccacctcccgggttcaagcgattcccctgcctcagcctcccaagtagctgggattacaagcatgagccactacacccggctaattttgtatttttagtagagacggagtttcttcatgttggtcaggctggtctcaaactcctgacctcaggtgatccacccgccttggcttcccaaagtgctgggataagccaacattttctagtctgcatagagtaatatcagccttgtgcaaattccagtattgttccaagaatataatgcaaggctgggtgcagtggctcacacctataatcctaacactttgggaggctgaggtgggcggatcacaaggtcaggagttcgagaccagcctgaccaatatggtgaccaatatggtgaaaccctgtttctactaaaaatacaaaaattagccaggcatggtggcgcatgcctgtaatcccagctactcaggaggctgaggcaggagacttgcttggacctgggaggcagaggttgcagtgagccgagatcgtgctactgcactccagcttgggtgacacagcaagacttagtgtmaaaaaaatatatatatatataatgcaaataaaattgtaaaagtattataccttttaatatttcagaacaaaaacttatttaaaaaatttattctgttggggcacgggcctgtgagccagttagagttgcagctgtgggaacrattgggccgagcagaggacgacatgttgtttttcgtggagcaggtaacatctaaaggaactggtttaaatcctaatgccaaagtatggcaagaaattgctcctgggaatactgatgccaccccagtaactcatagaactgaaagctcttggcatgaaacagcagccacatcgggtgctcatcctgaggttaatgcagagctctcagaagatatatgtaaagaatatgaagtaatgtgttctttgtcttgtgaaaccacaagaaatactacaggcattgaagaatcaactgatgggatgattttaggaccagaagatctgagttaccaaatatatgatgtttctggagaaagcaattcagcaatttctacagaagacctaaaagaatgtctaaagaaacaattrgaattctggttttcacgagaaaatttgtcaaagratctttacttgatctctcaaatggatagtgatcagttcatcccaatttggacagttgttaacatggaagaaataaaaaagttgaccacagaccctgatgtaattcttgaagtgttaagttcttctcccatggtacaaattgatgagaagggtaaaaaagtgagccaagtcataagcgttgtattgtgattcttagagagattcctgaaacaacaccaatagaggaagtgaaagctttgttcaaattgaaaactgccccaaagtgataagttgtgagtttgcacacagtagcagctggtatatcactttccagtcagacacagatacacaaaaggcttttaaatccttaagagaagaagttaaaacatttcagggcaagccaattatggcaaggataaaagccatcaatacattttttgctaagaattgttactaattaatggattctagtatctatagtcagcccattcagactcaagcacagtatgcctccccagtctttatgcagcctgtatataatcttcaccagcagttctcggtctatagtattattcctcagtcttggtctccaaatcctacaccttactttgaaacaccactggcccgctttcccaatggtagttttgtgaatggcattaattcaccaggatcttataaaagacatgctactgctatgaatatgggtcgaccattccaaaaaaaaacctgaagcctcattttaggtcatccagtggttcagaacactcaacagaggactctgtatcattgggggatggacaattgaacagatctagttcaaaaaatttttcaactgaaagcataatcctacagtaactggggattaggagcaaacttaacttcaaaaggagacttccactttgcagatggaacaaaatggggactatggtaggggcaggagaactcttttcagaggtcgaagatgacgacaagatgtcaatctcaagacctcatccttcaacagctgaatcaaagcctccaacaccaaagtttgacttactagcctcaaattttccacctttacctggaagttcatcaagaatcccagataaactcattttggagaataggatgtctgatgttgttaaaggtgtctacaaagaaaaggataatgaagwgttgasarttagttgcccagtgcctgcagatgagcagacagaatgcacttctgcccagcaactcagtatgagtaccagttctccatgtgcagctgagcctactgcattaagcacaactcagccaaaaaaaaaaaaaaaaaaaggatctaatagaggattcctctgttcagaaggatggtctcaaccagacaactataccagtttctcctccaagtactacaaagccatggagggcaagtactgcctcaccatgtaatcgtaacataaatgtagctacaccgtgactctacaggaaccctgaaagttaagttatgctgaagtgtgccagaagccccctaaagarccatcttcagttcttgtgtagccactatgggaacttcgctccaatgtagtgtctcccacgacaaacaaagacaatgaagctccttagaagtcccttgagaaaccaaatgagaagccagaagcaagggctagtaaggattattctggcttctgaggccataccattcccaggggagcagctggaaaaatcagggaacagagatgccagtttagtcgtagggctatacctcagggagtgacatgacgtaatggcaaagagcaatatgtrccacccagatcaccaaagtaaaaaacaacaaarctattcaaaaacttctctctcttcccgttaaacttgagctgtagctatattgaactgttttggaggggagagggtaaccaggaaggaaacaggagaaagtacatccttaaatcatyatggattttggagttgtgagtgataggatcccaaaattcatctctgatgtgatttataaatgctggaggatttctahctatctatctatctatctatctatctatctatctatctatctatccatccatccacacacacatataaagtgtattttttctatttttgtttttggttttaatttgcagagatttgctgccaggaatcaattttgagggttcagtttcagcttggaggaaaaaaaaaaacaacattatacatccttcagtataggagatgagggagtgagaggaaatattttttgaagaagcatttctgtaaaattagaaattactttttaaaatctatttaaagtttggcgtggagaatgccatctctgattatatggccttgtattgcaaagcggattagtggctggggtgcctgttgtgggtgtgagtgtgtacaagagcgattgaagcaaaatctgttgtcatgttagtaaatgatttgaaaactgaatgtaaaacttgagtagattttttttttttagtttgaaattgagtctgtctttttgaccttactaatatttccttcaacaagttgtaaaactgtgattgtacttggacatgtgactactaatcagtttgatactcaaggaaagaatggggtttcttaaaaacattgaaaatttcggccgggtgcggtggctctcgcctgtaatcccagcactttgggaggccgaggtgggcggatcacgaggtcaggagatcgagaccatcctggctaacacgatgaaaccccgtctctactaaaaatacaaaaaattagctgggagtggtggcgggcgcctgtaggcccagctacccgggaggctgaggcaggagaatggcgtgacaccggggggcggagcttgcagtgagccgagatggcgccaccgcactccagcctgggcgacaaagcgaaactctgtctcaaaaaaaataaaaataaaataaaaataaaaataaattgaaaattatcttggacctcagtgtgtaggtgaaatatatttcagagtcttaaaattccctgtgattccccctgctaaaatgggaaacaatttttttttcttactccatatgttattctctgttctttgactgcccatccccaaaagcaaaataaccaactacttactgaattatatttgtcattgctttgaccagtctagtcaaatcatataaattgttctaaatttcagaattgaacattgaagtatttactcttctgttcacacattgagaattttaggtcccaagatggtaaggcggactgaccttacagtaatttatttgctgtcagtgttaaagatgaaacattgtgactgactcttaagtgttaaatagtgtagaagtaaaatattattttttttttaaaggcttaattttggggggggacttatttctgtttacagtgtatttatcaccttcctttcctcctcttcttcccccacacccaaaaaatacagtttggaattcactgaaacagaaccagcaagtcatgagattttttagtaaagatgagaaagatggttgaagaaaattaatgcataatttctcagtgaatcaagttgtagctctcatatactaaatacacaagtttacatgctgttatttagaaaatggctaaaatattaaaagccatgttgtgtttatctgttttaagtcataccatgtttagagttctatgtaaggtgggttttatttttcttttaagggataatttgtaatagtaagaactgtcccatatgttagattatgtgtgtacaattacgtgtaaattgtgaatactggaaagcaccattgtgacatagcgtaagcatcttggtaatatattaaagtgaatgtaaatagtggttaaaattacattactgtgaaattcaccttccaactctaagttaagctttggagatacgtattagcgattaactgttaagagctttgaaaacactgcacgtatctgtacaagccagaattactatttctttgacttattgttagcatggcagttgyttttgatttggttgttttatgacatggtatactatatttactcagtttgaaactattcatttctatacactattttttaaaaatcacctactaggtgaaacatacaatgaaactacctgtgctgaaatttgggggaagtttaggtcctttaaaaaaatgtattaatcattgactacatctatgataaaagtgcttattttggtttactaagataatgcagttggtggaaatgataaacattttaagtgttaacatcctttgaatgcattggatttcagagaataaacattctgtaaaaacaaaaaaaaatttattttgttggcctcccttttagatgggcaaattccttggtgctagccattcaaaattgtgtgaagggcagtatctgacttaattataatatttagggaaagcttttgttgtttgacctgacaacaagttcagtttttttttttttcctccaagggcttttaatagaattgctttggtctaagaattcatgatagactaaatgaaatccttcagtctgctggatttagtgagatcataaattagcctcatggtgaatgtatctttcttttccctgtttcatttgacacaattcattgaaatgatgactacctataagtggttagaattttatgtgtggaaaacttgaagagaaaaacttttcaaagtaaagtgtttgtttctttcatcatggtgtcacctgcttttgatctttttcattgtgcttatgcttaaaactagatttcaatatatgttctttaatggtaaaagtttatatgcaaaataggtcttctggcatttttactgtcacgtgtagagtgaagctagtggtgacccagtttttctcatcgggcttgagggaggggtggggacagttggatctgctcttctctgctctttaactggcatagaagtggtaggaaggaaacccaagcaggtgtctcattggcatgccattgtggagtagagagaggcagtgttcatagaagtacagcagctgtgtggacttctgtcatggggagcagggcccagcagtcaggatatccttggggactggttcctggcatgagcaaattcttgagtaactgtaattctagctagatttctaaagacaagatcttcatacacagagaagctgggaagcagactgtatttcacctcaggggcctgtggttatagacttgaggaaacatgaggaaccagggtaacagcaaatgggacttatccttggatgccagagtatttggccagtgctactcactggtctggttagggctggtctggaagtcatgggcagaccccagggtgaggtcaagtagctctaacaggaaccaggcagagcctggccttctagtaaggggcagggagcacttccccaggtgggtcctgtcttgaatcatgctggtgtttgtatcggggaggcagcctttctggcttcctctggtctggggaggccattttgatggggggaagaaaattgaagcttcttatatcaaattcagccatttctaaatattgagacacacaaatgtatggagctgccaatgtgcagggcacacattcaaatttggggagaatctaacataatctaatgcaatgtaagctgtggttctataaaattttgcatttttttagggcttttgcagcttttgggggctttcacaggatgtgaattttgtattttttgattgggttgtgttattttgggaacatagtgaaactcagtcacatttttaggatgttgtatatatgccaagggaaatgtatgtttttcccgctgaatttttatttcttatgtaaataacattaaaaccagaaaaaaaaggatgaagaaatcacctataaacccaaatccatacttttttttaaacaattttgccttctcttttagatcttgagcatattcttacttgagactgtaattttaaacatactgtcaatataactttatatattttttactttaaattatatttatttacagccagtagttgcatgttaactttatcgaatgatgaactcagatctgccaagttgaacttcagtagtgaatggtggattttagggtgaaaatggctttgtgtgcaggctccattcttttggcaagtgttgcagtgggggtaaccagttgttgacgccatggggcaggcagctcagtaccctgaacagggtcctggaagttgctgtagcgtttgaggggagcactcctatggtgtggttggaatgctgtttttggttataaggcctctgaactcgactttctggtcctgtggtaaattccacgaactgtctaaaacctttagtaaattttgttttttgttgtaactcaattgagtagattaagttgtttgcaactaagcatcttgtgaaacattgacatactggttcttgaaagtaatttgttttatgatttggaggcagtgattaagaacctagagtctaaggccaaactgcctatattcacatcctgactgtgtcaatttggagaagatacttcacttttctcccttagtttcttaagaaaacactactattattatagtgatgataattaaatgaaacagtacctggtagctaataagtgttcccccagtgttaccatcttcattatcatgatcatcatgacagtaggtatttattgagcacctactctttattagagttcarcagaaatggggaaaagttacaaataggtattctagcaaaatttagtatataacaaagcctaattgtattgtgcatagtcttaatgacagctccatctctgctcatcctctggtttctcttaagacacatagagaaacagggaaggcatttgtagccatctaagattggatttattggaatgaataacattaagtgctgagaataactgacaaaaggatttgattgtgaatcaagaataaaaggttgtggtaagacttagaattttgtgtttattaagagaagagcttaatgcattgtaaggcattccatttgttgttttaacattgccagcatttattattaaagtgggtggttgtagaataattatagtccatatcatgatgatgatgttgtttttagagaagattgaaaatctatagttttttcaaactaatacagcaaggaaaacatgtcatctactgaggcttcaaatagtttgcttgacctcctgagagtactactgagattgtttaaaggaactgcatattcaggaaggtacttttatgcaagtttttgcatttccttgttaaattcttaaaagtatcagcttggtaattgggggttgggatgggagtaagaagcagaagacagggaaaaagtatgagattattaataccattattttaatataactgagaatttatttgggaagaaagtagtaaagatggtagttatacctacaatttttataaattataagaattacaaagtgaaagtgaccagtcatttttgcgggttttatatgaggtttctgtgacctattaaattaagaaagattagtgggggcagaacatatatttttgtgcagaaaaagaataaggaaatatttaaatggttttaaaaagtatattaggctgggtgtggtggctcacacctgtaatcccagcactttgggaggctgaggcaggcggatcacaaggttaggagattaagaccatcctggctaacacagtgaaaccccgtctctactaaaaatacaaaagaaaaattagccgggtgtggtggcgggcacctgtagtcccagctacttgggaggctgaggcaggagaatggtgtgaacccgggaggcagagcttgtagtgagccgagattgcgccactgcactccagcctggacgacagagcgagaccctgtctcaaaaaaaaaaaaaaagtattctaaacttttttactctgtgaaaaggttggaaagtaactgtgcttattagacatagactagtagcattatggtcacggaattaaatttaacctctagatgttcattcacttatgattgcatagagttagtaggatgtcttatgtattctagcaggatttcatacattgaagaattctctgataagagagattcattcatgatattttctgtataagcaaaaccagaaaatatttgaaatttaggggaaaaaattcgacaccttggagtaaaattagattacttcataaaacccaacatatgtagctaacctgatgcagccacaaacttgttttctgtggaagtttttagaacttgcttttcaagaaagagactcagagttgaactcgggagagcctggcccagtcctggatcttgaagaattagttagctagctgggaatattggaggaataattaatcatcaactctcagtatggcctgttacgtaaggatccccagtgccttagtgtgctcaggctgccatagcaaaataccatagattgggtagcttaaacaacagaaatttgttctcttgttgaaatgttgtcattttcttaattttaatatttaattactggattattttgttaccttttatttcacatttaagcatktttatcagattatagtaagtaaatttattcaagatgaactctacaaaaaatagtttatatgttcttagagattatgtrttttgtattgggtacatctctgttattgtcatcaggatatatttaaatatatattaaaattagatatgtatgttaaaattgcatgtattaaatattatgtgatatatataatttatttttaaatttttgtttatttaagcccctgttcattttattcaaatcattttttttttctcttcaaaactagctagaactgatggggaatcagggaaggccttatatattaaattcttaagtagattcttaaaattcaaagtaaggatctgtaagagaagcacagtctgtgggccttgttccagcaaacaaagccacaaagggagtcctgcaaattaaggaggatggcaaatccatttcttaaaaaaaaaaaaaatagttctcgaggggaaaaatataaaatacctaagtttcaaaagccagacgagttccacaatcattgctttccaccgtagggtatccaaagatagagtttcaaggtatgttttcaatgattcagttttgcaaacatatgcaaatatattcctcattagccatcctgttttggcgactaatagcaagcaatatgcttggataaggggtccaacttccacttaaatgcagtttcttctcttttgggcaacaaagccatttgcagagatctggaaatcatgagcttcctaagtgggaggaggtgctattctggttcacctgaaaatatcctttcagattgactggtgttttatagtcccttacttggtgtgcgttactgatgatgatgggggtcagggttgctatagtggaagtgggggttggggagggtatttgcataggggtcatggctaagctgagccagcatgggacaatctgggccatgtctggcaccatgtccccagggatgtggtgagtccacttggagagcacttccaggttcacaggcttgatgacctcatccatggaccactggatcttagacagggagatgccattccacttgccagtgaggtcttgatggtggaggacagtgttgctccaggtgatgccgagatggtctgggatgagtctgaggaagctcctaggctacagcaccagttccttgtagtacacgagcaggcacttgtccttgcccacctccatgcactgggtgtacatcacctctatggccttgttccacttggtgaggcagttgccatagctgctgaggtcgaagcctgkgtagtgaccttgcaatagtgaccttgcatgtgatcaaggagtgcatggagacatggctgtcctgagccataagcaggaacttggagctggagaacaggtgtgacaggtagaccagtgattcaaggacttgagtctgaagtggtccttgttggagagcacatgggctggctccctttgcttagagatcacctccaggatgaaggcctgcatggcaatgtccagcacctcgtcagtcacgcccgccttgtccagctgtagtttcttgtggccagacttggaccaggcctggtgcatggccagcacacaagggatgatgtgcgtctccttgctgcggtgcacctcaaggtgggcatccagcccagtgagtatcagcatggtgccgctgcagagcatactgctcatgaagatgagtggcatggccttgctgtagtggtactccacgtggtccatccgatctacagggtccactcggggcttcacctgccagcactgcctggcacattaatatctgctgccccagctggaccaaccatcaccagggccagggcacagccagcccgacctggcaggcccaacctggggactcacttcagggactgtagcaacaggtcagtgggcggcccaccaggttcacatcttgcatcacatcagggaggtggtcccacatgcccagtgactcctggctcagcagctgcccctgccggagaagtgggaggcctgtaatttttttttttttttttttagtaccaggtcagcatgggtttatggaacactggctacagtaaatgtgtgaaacattgtaaatttttttttcccaattttaattaaatttatttttgacttacatacagttaaattccctccttttctatacagttctgcaagttttgacaaacacatggagttgtgtagccatgtgttggacctaacaccatggtcaagatgttgaacatatttatcatcccctaaaaattccgttagcccttttgtggtcagtttttcccccctgccctggagcctaaggatcacttatctgccttctgtcgctctatttttccttttccagaatgccatagaaatggaatcatgtggtagatagccttttgagtttggcttcttttacttagtagagcacatttgtgatttctccatgctgttacttgtattgttgcrgagtagtattcctttatatggatgtatcacagtttgttcatccattattaaaggttgtttatattctttccaatatagatgaagctgctataaaaatttgtgtgwagggctttgtgtggtaaatatctagaagtgcctcaggatagatcatccccataatctaactcaaacctaatttaggtaagatttgggagtttgagatgatgcttatttagatgacattttgaacctgagttgattctgtgatgagttgggactttgggggatgctgggatggggcaaatgtatctggcatgtgggtcagatatgaatctttaaggccagagggtggatggtggtggccgaaaagtaagtcccttaaagatattaggtcctaagccatggaacttgtaaatgttaccttacatagacttagagtctttgcagatgtaattaacttaaggatcttgagatggagagattatcctagaataccaggatgggccctaaatggaattacatgcatcctgagaagagcaaggtagaggaagtttttaccacacatactaaaaggcaatgtgaaaatgaagcagagagagatttgaagatgctgatcttgaaaattggagtgatgtgtccacaagctaaggaatgcaggcagctaccagaagctgagagagatgagaaatggattctcctctagagcctctggagggagcatggccttgctaagacattgattttggcctgctgataagggttttggacttctggcctccagaactgtgagagaataaatttctgttattttaatccaccaagtttttggtaatttgttacagtaaccataggaaactaaagtgtgtgaccatggtaggatgtttagtaaatttttatttttaagataaagtcttgagaaagtaaaattaatttgtttgattttgataagtagttggtttaagaagccatctgaagtgggtcagaactgatcatctttttagcactgaatattactgaggaaaaacttacaatattatttggtgctatttttaagactaaggctttcgtggaagaaaaggcaaaaggataccatggagtagaaagattatttgttagtggttaacaattatctcgctcatggtaataatatcataatttagtgcctactaaattatgctgaacattgcttgttagagaagtgattttgtcacttgagtaagaattgataccattactctctaacgtctcatgttatattctaaacccttttgacaaatgccctttgaaagctacatttatttctagaatccagtcacttctgttttcctctgcatcaggctaccatgattaaaatcttgaaagccaaacaaattattgaatttgaagttactgcaaattggtgaggagaggcgggtgcttctaggtcttcataaccttcttgtctattttcttgtgataaccaagtttaagccagggacctcctaaagaaaatatgtgaagaattgaaattgtgaggttaaatattttgtatatgtgcatacatatatatgtatattattttttaggtaacttttcaggtaaagatctgacggctcttttagtaaatatctggattaagtcttatatcagaaaatatggtaatttaggagaggctggaatttcagcagtgaaataattgtgttagaccacgagatggttatttaacctctgttggaggaagtggtaccttacaatcagtggtgaataaaagaagttaattattttccttgatcttctcactctgtggtttgattactttaaaggcctagaggtcttcagagacaatttaatcactgtagctattgacctagaatagaactgctacagtaggcccacataaaaatgtccagtgtcaatatgattatgggttattattattaggaccaaggcgcagttttttgataaaactctacttaaacatcttagggctgtaagtagagagaaatttaacaaatttaactcttaratttgcagaactgataaaatcatagaacttttaagatgaaccggattctaaagaagttaccaatcagtttacagacggtggaattgagacctacaaatattaagtgatttttccaattagattttaagcacttcaagaataaagacaatattccctattggtgctcccttgacaatacaactgttgatgccaccctccctattgtttaatacatatttgtggaatacataaagatgttgtcttagtctgtttttgctgctagaagggaataccggaggctgggtatgttataaagaaaaaagctttacttggctcacagttctacaagctgtacaagaagcagggtgctggcttctgcttctggtgagggcttcaggaagcttctattcatggtggaaggcaaaggggagctgatatgtgcagagaccacatggtgagagaggaggaggaggggagagagaggaaagaagggagataccaggctctttttaacaaccagctctttagagaaccaatagagcaagagctcattaatatgaagactcacccagccacttatgagggatctgcctccatggctcatacatctcccattaggccccaccttcaacaccggtaaccaaccttcaacatgagatttggaggaggtcaagtaaaccaaactatagcggatgcctaccagaaatttgcaaaagaaaactagtattttgaaggactgaacaatggtcccgtatcaggagaaatgatacataacctggaaaaataatcccttttagtgttgtgaggtcacatttaaaattttgtatttataatggaaaaaatggaagtcatagaaggaaagaagttcataattttgatcttctatttttttaagaatggctttatggagatatttatgtaccataaatttcactctttaaaaatatacagttcagtggtttttagtatattcacgaagttgtacaaccgtcaccactgcctaatgtcagaacattttcatcacctccaaaagaaatcccatattatcagtcactcccgatctttcccctccttgtccctgacaactactaatctgctttctacttctattgattttcctattctagacatttcatacaaatagaatcgtacaagatgtggcctttgtgactggatgtttccattcatatattttacagacttatctgagtcatagcatatatcagtacttcatttcttcttattgctggataatattgcattgaatgggtatatcacattttattgatccattcatcagctgatggacatttgggttgtttctaccttttagctattatgtataaagttgctatgagcatttgtgtatagacttttgtttagaaacatgtttttagttctcttgggtataaacctatgagaagaattactgggtcatatgataactgtgttttttaaaaatttatttatgtatatttattattcatattatttgagacagggtcttgttctcttgcccaggctggagtgcagtggcacagttctagctcactgcagccctgaactcctgggctcaagtgatctccccacctcagcctcccaattagctgggactacaggcgtgcaccaccacgcccagctagctttttaaggaattttttgtagagatggagtctaactaggttgcctagactggtcttgaactcctcagctcaagtgattctcctgcctcagcctcccagaatgttgtgatcacaggtgtgagccaccatgcctaaccataactctgtatttagtatgttgagaaacaaactgttttccaaagcggytacaccattttgcaatctcaccagcaatatatgagggttccaatttctctacatctttgtagcctcaaaactacagtctcttggacattctgctccctagtctcccacccctctgaagcacagagaggagctttctctgaagttctctcatctgactaagggaagttccttcagaaagaatgtgattgtcatgaataacttccctgaattctacactaaccagagaagatgactcatatcacagaagaggaggctgacaggtcttcatgcccaggacaccacacccagacagacttttcaccagtacttctgagggctgccacctgagagactttatctgcataataagatgatctttgtttatagtacagttcctccccttgccctaccgtagttcaaccatctggcgtttctctgcatctcacactttgtgggatcccccatgcatatgcatgttataagtgtgtacaccttttcttctgctaatcaattgtcagtttattttatagactctaattattgaatttcccgaggggaaggagagggttctctcccctctgcagcatgtagggcaagagaagactgaagagaccacatttaaaaagatgactgataaacatttcttacaaatctattatttatataatgtgttgaagttattaggtttacttcagagaaaaatggccagaagcctggtcttgcaagtgaaattaagtgtcacacaagcctcttattctttacctgatttatgttacgacttgttctaaaaagttaatacctaaatttaattagaaatgaaagaagtataggtacttaagactctcattaaatcagaacatttagaaaagggtgggacttagagcagaaaagaatcttaaagatcaatttatccaactcctcctcaattttgtccttcttttctttttgcctacctaattaattttgttataaaatatagcacaaatataaaagaacagagaatgataaatgaaccctttgaatatacatctgtttatatttgcttcaggtgctttttacttttacacaaatgacatattccaatactgttatacgttttcttttcactttgatttttagttttttgatgaactgttgtaggtatgattgaatgtacttctctgtgatttctttcctcttctctgtcacctgaggtaactcttttcttgagtttagtgcttatcagtctcatatttcttttaccacatccatatatatattcacaaaaaatagggcattatattttgctgtttgatactttatataaatggtgttaaatgtgaatgtaattctataatgtgctttttttgggtaaacactacattttttgacatttatctatgctgatacctggttagcataagttccccacttgttattgctttccagaatttgttagctattcttatgtattcttcttgaattttaacatacatttattatgtcctaccggaagactctgttgtgattttggtagcatttttattaaaattatagattaatatgtggagaactgacaattttatttacactatcattccacccatgatactttttttttttttttctttcctgagacagagtctcactctgtcacccaggctggattgcagtggtgggatcttagctaacagcaacctctgtctcccgggttcaagcaattctgccatctcagcctcccgagtagctgggactacaggcatgcgccatgatgcccagattattttttctatttttagcagagaccactgtgttacccaggctggtctcgaactctgggcctcaagtgatctgctcgcctcggcctcccaaagtgctgggattacaggtgtgagccaccatgcccaacccacccatgatactttataaaaatgtcacaattctgtgtttagtcaaaaagtcttttatgctcttcagtaatgttttataactttcttcaaaacttttggctgggtgtggtgactcacgcctgtaatcgcagcactttgggaggctgaggcaggtggatcacaagatcaggagatcgagaccatcctggccaacatggtgaaaccccgtctccactaaaaatacaaaaaattagtcaggcgtggtggtgcatgcctgaaaccccagctatttgggaggcaggagaatcccttgaaccagggagtcagaggttgcagtgagccttgatcgcgccactgcaccccagcctgcagagagagcaagactccgtctcaacaacaacaacaacaaaaagttttatatattttttaaaaacacatttctaaatactttatggcctttgattgtgaatgatagctatttttctattccattctctcattggatagtactgatttataagaattcttatttatattaatcttgtctccagttacctttctgagatactagttttataccttgtttgtagatcttgctgtttttatgtagaaagccatctcatctgcaaataaggagggtttgtttgttgtattccttcttgatgctcttatttcgtttcctattttcttttgtgtggtaggatacgtaatctgctaagacctcctacagtaaaaccagttcctttcgccttttttcctaaagtccagttaatgatacaaagttctcacaaattttgatacataccaccattgctcaattttatgcatttttgttttttccatcacttcctctttcatctatgagtaacataggaatgtgttttttaatttctgaaaattttttggaggactatgtttttaattttgaattctaatttaattactatttgatttgatgcagtctagtcaagtcctgagcagaacttttgacagctttatagggctagaggacaaagtttagagatgagggcttgccaaagatgagaactcttataaatatcccaagctttgggggcagggggcctctaacagactataccctaggagtaagtgtgaactgaaattgaaagatctccccctgacagtttcagatttatctgattggcaccaaaaattaatacctgaaattgactaaggtgatcctagactcckggtactcccagtatcaagtcagaattctgtctggagaaaacatcatttcagcctttagattttttatgagatagtttttcaaatgcaattgacccttgaacaacatgggtttgaactgtgtgagtccatttatatgtggattttttttcaactaaacttagattgaaaatatggtatttgcaagacgtgaaacctgcatatctagaggaccaactttttgtatacatgagtcctgcagggctgactttgggacttgagtatacacaaatttggggtatccttgggggtcctagaatcaatcccctgtgtgtaccaaaggacgactctagtatgacacataatgagagatactcagttgcataaggacacatgacaacaagaatgagagccagtaaaggctatagtactagactcaaaggagatccagttattggaattaccaaacagaattactagaattaaactttgttcggggagttataaaagaaattaaaacattctgcagggaacttatatgaagaagaatcaaatagaaaatttagaactgaaaaatacagcaaccaatattggatggatttaactcagtgcatcaatttaacagtaaattagacattactgaagagaggattagtgcactggaaggtgggtcacaagaaaataccggaatgtaacatacaataacaaaagggtggaacatatgaagagaaactaagaaacagaggatacagtagagaaggctgacaggttcattgggagtctcggggaggagcttgaatgcaaaagcaatgttgaagaaattatgatcgagcatattcccaaaatgatgaaaggtacgcagtcacatattgaagtccaacaaattctaggcaggattttatagttgaaactcataaaaagcaaagttaaaagaaaatattaaagccagatagaggaatgagacagattgtcattacaaagagccacaatttgactgttacctgacatcatcaacaaatctgcactgatggagttattaaaagaaggtaatgggccaggcgcggtggctcacgcctgtaatcccagcactttgggaggccaaggtgggaggatcatgaggtcaggagatcgagaccatcctggctaacatggtgaaaccccatctctactaaaaatacaaaaaattagccgtttgtggtggcaggcgcctgtagtcccagctactctggaggctgaggcaggagaatgtcatgaacctgggaggcagagcttgcagtgagccgagatggtgccactgtgctccagcctgagcgacagagcaagactccatctcaaaaacaaaaacaaaaaaaacaaaagaacgtaacggagatgaaagagtggaaaggaaggaatgaagaacaatgagatggcacatctgtgggtaaatctgagtaagcagagatatatgcaacagtagcagtgtcttttgagatttaagaaatatacagacttaagacaatttcagtaatatcctacattccaggaaggggacctttcaataatgttgtagtgtttttatattttccagaaagcaataaatcaccaatcaataataaattttgatacattgaggaggcagcatggttttctagagtgattattaaaagaatagtaaaagagtatgtaacttttaagttgcaagaggaaaagtagtgaataaacattgaatcaattgaaaagtacgcaagaatggagagaaacattacrtatagtgggtaagacaatagcatttagtgagatgatagatttaaacctgaatatatcagtacttacattgaatgtacctggtttagctacagtcatcaaaatggtgtggtacctatgtaaagataaacatacaactcagtggaacagattagaaagtcccaaaatagattctcagatatttaacctcccagaggcaccaaygtgtgtgatcaattttataattgtatggaaataataaaaacaaactgtgatcccctccttaacacacaaaattaattgaaggtaaatcatacacctaaacgtwaaagccgaaactattaatcttctagaaaaatatatgaaaatatctgcatgaatgtgggtaggcaaaaatttcttagacaagacacaaaaagtactaaaacaaaataaaagaataaattggacttcatcaactgaaaaaacttttgtacttcaaaaggtaccacaaggaaaatgaaaaggcaagccatggattgagagaaagtgtgatgaggatgtacagcaatgggaactcttctgtagtgttggtgggagtttaaagtcgttacaaacacttgaaaaattgtttgacagtatctgctgaagtggagaggtgcatgtcagatggcccagaattcttctcctgcatttatacccatcagaaatgcgtgtgaatgtacaccaagagactcacccaggagtgagtccacagtagtaatattcaacaatagaatagataaatttggcgtatactcattcgatagaatataagtgatgaaaatgaattaactacacttaaattaacatggctaactctcacagacatattggtgagtgaaagaagccagatgcagagtgcatgctgtgtaatctacttaatatgaagtttacagacaggcaaaactaacctgtagaacctaagggacatatttgggtggtaaaactatcaagaaaaactaggaaagatcagaagtggctcatttgtgagagggaaggagggtagtgattggatgcgttatcttttggggtgctggcagtgttctgtttgttaacctaagtggttatatttttttaaaaaaatattctttgggctgtgcatttgttccacgtgggtttttgtgttttatttccaataaaaataatttttaaaaaggaatatataatgacatggataaatgttagtatcttatataatgaaagcatgttataaaaaagtatgtttaacacacaatttttaaatgtatatgtgtgtgtatatagatacacacaaacagattcatacacatcagacatagagcaaaaacacaggaaaattatagtccagaatgaattctaagagtggacatctgaattttacgcagaagatgcaccattggataactaggaaactcttcattgaatattgttttataaaattaacacttacagagggccccggcatcctctatagagaagatgattggattatttatatttgcctgcctggttcaggaacaaatttaaagctgctttatatttaatatgaagtgaataacatttgagcagaagacatatgcaatcagatagagacacttcaggcaatagtggtggttaaaatatacctttgctgcagggagaataatggaaattaccacacagtcttttaatccttgactgttttctgcagtcagtagttcctttatctttaaaaacataaaagaacaacattttttatgaagttaaagaaaaactgcaatttgatttcttaaaaaggaaataatgtctaaagccatggaatttggtcaaaacacttgacctcctgtgccttcaattttctagcaaaaaagccacatgccccacatttcagggttgtttggagtataatgtcacatcatataaatgcttaagcagggatattagcatacatgatttgcagaactcatttctgggaactgttaagaaggcagattagcattgggattaagactttgggctctggaattggatataaattttgattcccaggtctactgttcttctagctgtttaattatgtattttacttaacttctcttccttcatttccccatctctaaaataaggaggatagcagtacctacctcagaagattgttgtggggataaaattaagtgcaaaggtagttatagagccgtttggatttatcttcagtttcccagcaaaagtagttgaaagcctggggcagtaaccacttttttcatatatatacagctcaccctctgtatccatgggttccacattggcatattcagctaacaatggattgaaaatatttggggrraaaaaaagcaataaaagtaacactacaacaacaaaaaataataaaaataaaaaaccaggcccagcgtggtggctcacgcctgcaatcccggcattttgggaggccaaggtgggsgatcacttgaggtcaggaattcaagaccagcctggccaacatggtgaaaccctgtctctactaaaaatacaaaaattagccgggcgtggtggcagctattctggaggctgagacaggacaatagcttgaaccaggaggcggaggttgcagtgagccgagactgcrccactgtactccatcctgggtgacagagcgagactctgtctcaaaaaaaactgcccccctcaaaaaaacacaatacagtrttcacaactgtttacacagcatttacactgtagtaggtattatcagtaatcaagagatgatttaaattataccagagaatgtgcatgggttatatgcartactgtgccattttatgtaagtgacttgaacatccacagattttgatttccatgagggtccggaaaccagtccccccaacagatactgacgttcaattatatatttgacctatagttattaagaactttttttttatagttgattactactaagcttaatgttgccatctacctaatcatttatggggatatttgctgtggttaggcataaaatgtttgcatccttgatatgcagttggaaattaggaagagaagacatagggtgggagataggatggatacatttttctttatgtcttgaatttagtttacagatttttcccttttcccccctcagtaatttcccagtgtatcagtaatctccctccagatttccattttgcattttgttcctaaaaaataagcaaagtttgtagtagtattatatcaaagtttgtgtagtattgttgaattctgttttaattttagagagaaaaatggctctacatttcaaatttgtgtgtggtatgtgtgtgtgtggcagggggcgttgggggaggtcaagagattgtagctgcattgcttttatagaaaatacgccttgaccagcactctgaatcgttaactacagacagctggtgttccattgtattcttcacaggtttagagaggttgtgcctagcaattgtgagatgtccaagtatatccaagtataatgctttgtaggagtatcctgctttatctttctttaattggtttgcttcttcccaagctccagaaataatatttatttttctcagagaatgttgagcccagtagagtgtacacatttaagcttcctagattctatagaaaaggagctttaaggtaaaggtatttacttccttgtggtctttttcagagattgcatactcaagaagaggaggaacataaaatacgtgatgtcttctcttaaggttctgcatgctttagctgtccatctgaaaacataaggaccttacccttgcatgaatgttgcattgcaattaagtctgtgctcagctctcctcttaatctgtgctacactctcccaactctttgaggctctttcatgttaccgagtatcttagctgggtggrcttgggagcacatttagttaaatatcacatgaggaactagtttgttgcctgtttttatatcaggcatttgaaaaacgttgaatgcaatataacatgagaagaaatagtaccccgttaatgtttaaactctatatgggaaaatcacacaccagtttaggatctctaggcacgtcaatttagtgagtcaggcacagacagaggaaaaattttagggaagccaattatagccatcagctaaggggagaactagaaattatggaaatggacaatccctctcaagtgttccatcttgtacatgtgccaccattatggagcaccttgtctcaaagcccttcatcatgcctccaccttactagagaacacagaagcctgggaagagttttatttctttggtttggagatttaaaaaaatagacatgtataattacacagaataagaatggaggctggtcagctcaattccatggtctcttcagcagttccacagtgtcctcaaggacccaagctctttccatcttccgtctgccatcctcacagtgctagttttttcttcaggtctgtttccacattgctgcagcatggctgttgctgttctagacttggacagggctttacctagccattctttgggtccactcacatgctctcctttacccagacagctgtagggtgcggagctaaagctgggagatagcatgggaaaaatacaagcaaaaccgttttgatggggttttaatactacatcctgggtatttggtacaaattaaatgactgcctttttgattatgtaaatttaaaaccccatatatgctaagtgatataaagtgtaaagattcagggtatgatttacttcattctgtgtaaaaaaaatgtgagtacttgacagtgttctgattttttgccttttttgtgtgtgtacttttgtgtgcgtacttgaaagtttcttctaaatcaactcccgtccaccttgtttagttttttgattctgatggcatattttcccatacgtgttaccttgggacattgtagatgcactgtggtactgttgaatgttggactgtgatgttcaaggtagacctttcagttgcacagaatctttctcctctcctctttagctggcaaccacatttcttgtgaacctagtgaaagttgaatttattctgtaacttctgttccctttggccgaaacagatcaaacacggtgggacagtacagtgggcgcagggtagaggtggtgagttcctaaaaacgatagccttgagatcatgggactctgatcctctccccacctgcccagtatttccctccggtgtcccttctcagcattaacacgttggaagaaagtacaaataatatacactgaagtcaatgtcttggttgtactaaaactactttcctgctccttatggtgtgacatttggtcagaacactcttctataaggttagcacatacagaaacagatagttggctggcagactacctagcaaagttcactttattctctacagctttgaattagttaaacaaaaccaaaacattgtggacccgaatctgtctttctgttgttactatgtatacgtaagtggttttctctttttattaatagttctagccagtttttacccccagtgtaagctggcaaaaatcactctaaccctctcggccatagaaaactgagttgcttcacaggctctgtccatggttttagctgaattgaattctaagcagtttgaagacatttttctagctaaagacgtttttctatccttggcttatacagtactctcaactcctgaccaacttctcattttgaactatttattcttgaacttatttctccaactgcctcttcccattctgggcatctacagttatgttatgttttatttacagtttagttttcttttcattggtcattggtccctaactttctcattacaaatacatttatttctatcatcttttttgaagcacaaagaatgacatgttgtgtaccattagatggttaataatatacatggttgctatacagtgaggagggggtctgtttatggcacataaatatctaacattaatttattaagggtttacaaagatttgggcttcattttgcctccctcccaccccagaagattattgtcagcaaccctactagggtatgtgatttggatgttaagctcggtcaagccaggcaaaataggaagattttatataaaattggctctttcaaaggggcttttcagttttaaagggaaattgaaaaaaccagactataatggatttattattgtatttaatcatttctctgcatttttgagttattgaaatattcttttaataatgtatcagtttccttggcaaacatttagggtatttttttcttaacctactcttgtaatttggtaagggtggaaagttagaaaccaaatttgtaatgtcatccagaagatgacgacacctagacaatgagtaaacaaatatggtgtcactttatttcacattccccaaattacctgtgatgagcttaagagattttttcatttataaatagaaaaaaatgtattcacagtattttggcatactataaaagtcgaattatctaaaatgtaatctagtcagatagcatttagtaggaaaatagaaataattgttttcaagatacgataagttagacgtgtctgtaaaggacagtcgaaaagagtagcagtggggtattgattgctttttagagaaagaaaaattccattccacttctaaatgttaacaattgcaaaaggaaaattcccacttgggaagaacatttttcaggttgcttcattgccaggtgtttgacattgtgtgttgtcttagacgaataaggcttagggcagtctttaggaatgattcactccaaggacctctgcttcctgctgtgaaagcttgtattttcatagcacgccagtatcggtgggaatgttccagtgaccactgtgctacttctagtaaagaccaaagttttctccctgaaactgggatacctgtagaggagaatacctgtctgctaacaaaattaatttcagaacattctcaatgaatgaagtgcatgttctctactgtttatgagactgaactgtgtcacttattaatggagataagccttgctttcttgtggtcccttttaacaccattgcattctacaaatatgatttacaatgattctaaagtttaaaaaaatcaaaataatgtgatagttgctttgagccctatccatattttcccctttccttttttctctctccttgacccagcggcaggaagcctttgtttgaggtgttcatctggaacaacttttccacacttgttttcatgttctgttagattacagggcagcaggcctacctttgaagctcctttctcttttgtttctttgccgtgcactccagtaattaactttgkccttcttttatttgttccagtcaatcgcaggccactctgctgagcatcttctcccaggagtaccaggttagaagttttctcctttgtgagggttgacaggtgcctaattgaatgatgaatgtccctttatttctttgtaattgaactgccagctctctgattgggttggaggatgttctcctttccacatcaagcaccgcctgcgtctcggtggaggcctgccaagcctacccatccatctgtctaataacatctagcctttgcttatttggtggacctgtaataaattatgctaaaccattattattctgacaataataatttccctgtgttgygtggttccatgtgctaaatgtttgctgacttgcactgtcagtgctgctttccattgctgacagagatgatgataaatgaccattgctggagtggcagaaggcaagagaggcagaaaatggagtcatttatcatgagatgacaggtgtcagtcaagtggcaagtctctatggaattactttttgtagttttcaaataagttgtttttaagcaatgttcttcctggttaaaaatggcaattggattgtaaaactagagtgcagaggacttagatggaattgaatcgagggaaaattaatacaaaggttgaaagagggaacaagtttttctttgccctctgtagccctaagcaaacttatttagattcaattactatgaccctgttggcttttacatatataccgtaccttgtggtacagtctgaagacatcccagccaagcaatagagattaaaatgcataggatcatagagtagaaggaaaagaagtcctgccatcaccacaattcccaagctgttattcagtgttccctatgtgctagtcactgggctcaagaaataatgtcattcttgttttgaacctcatctgtgacatatcaaagatttttttgtgtttttgttttttttctttcagaaacacattaaaagaacacatgccaaacatcatacttcggaagcaattgaaagttattaccagaggtatgaccttcctgccccactagagggtatcatagtacctattaattgtaataataattatgaataagttaggttattaattttctatgtcatatcccaagacattgtgttttaagtcttttattcaaaacttttagtatgtttttgaatgagttttcaaatgctttgttttgtagatctaaagagtatggtaaggctgtcttgacttgtgtgtgtgtgtgtgtgtgtgtgtgtgtgtgtgtgtgcccatactatgtgagatgtagttataatattatgaaatctcagttggctacttgaaacttattataagtgcatatcctgtctaaatgcatatgctcatatatacatatatctacatatatttgaaagttctcaaactaattttcatttcttagattagcaagttgaaaaaagaagattgaatttggatgtcgttttattttgcatcataggtattaggatatccattttagaaatgaaaaaagatgtatcaagtaaaggcatttggagatatattgtagtgtataacggtcacattttaaaggggattttgtatttttaaaagacaaccttgggtattaaatcaacagcatagtatccaggagatattttaatttcagcctaatttattataaataaatttcaacttcttgttctgaaacaatatttaaaatagctcttgtttttttattctaaaatttgtattgtcattgtaatatgactgaataatttataacactaaatggtaatggtttgcattagaaattgttagttggtttcttaaatctttcaggggcacattggcaatgaaaactgtttgaaatctgctcttaaattattatacttaagattgacagatgaacctttctgtggtgagaatgacaccactgattttagatgaatgatttttatgcataaaaattttatgaatgaaataaatatgtggataaaatattggtgtcatgtttcggtagtcattttatttagaatcaagaaagggatattgaacaggaaagtcacagaagttagatttttttaaaaaaattattcactgctatatgtggtaaaagatatgctttgttttgagtagtaatacctgtcaaagaaagataacgtgcactcattacacacacacagacacagacacatacacacacacagttttgtgtctaggagagatcctctctaaacaagactttgtaaagtttgatgatttcaaaagtcataaccttcttggtgaaattgacattcaaattaaagtcatagcctaaattatacatatgaaattaaaaatggcccatgaagtgctgtgaagcctgcaactgtgttggcatccagactcttcaaagaagcactgaaggttatttacatgccaaaaatacattcttgtttgtaaacattatagtcctaggctgttatataaaagtatgattttatgtctggattttaaaggcttgtaatgtatacaaaggaaaatagagcattttaaaggaaaatgtgctcttttcctggaaattcggagatccactgacaggtaatggggctgccttctgatactcatttgcctcattgtaaggaggttgttttagttattaatacatgatttttaggatcactaggtgctgctatttcaaatctaagtttcattaaaaagtatatctaattgttgaagtatgaacatacttttgttggattatctgggtagtayaggccataaataaataaatatcttttttttttttttttttgagacagtgtctctctctgtcacccagtctgaggtgcagtggcacgatcataactcactgcagcctcaacctcctggcctcaggcaatcctactgcctcagtctcctgagtagctgggactacaggtgcacaccaccatggccagctaattaaaaaaaaaagtttatagagacagggtcttgctactttgcccaggctgttcttgaacttctggcctcaagtaatctcccacctcagcctcccaaagtgctgggattacacgcctgagccactgtgcctggcccagaaataaatacctttaagtatacccaatgatgaacagttgagtgggtaataatgagaatacataaatagatttctttcaatttatttaaatatgacagtctcaattatttcgaggagttacagcatttgaaacaaaaacatgaagttagaccgtaatgggcagtctcagaagaaagcagtctgaccactttctgactttaccaacctgctgtctgactttctgccctgcactttgcacttagggacaggccatgttgttacctttcagatggattgacctcagtagccttttgttggaaatgtgcaggtcaaatgttcctgtctgtgctaaggtaaattggctttaaaaggtttttgtttgttttccagcagattagaataaagccaaattgtatttgttatatcaaaatatatttaagcaatttgaaaatgttaatggcaatttaatttaatttttttcttttataaagtaatactcagctattgtgaaaattaagcatatttgtgatagtatttttttttttttttttgagacggagtctcactctgtcgcccaggctggagcacagtgacgcaatctcggctcactgcaaactccgcctcccgggctcacgccattctcctggctcagcctcctgggtggctgggactacaggtgcccgccaccacgcccggctaattttttgtatttttagtagagacggggtttcaccgtgttagctaggatggtctcgatctcctgaccttgtgatccggccgcctcggcctcccaaagtgctgggattacaggcgtgagccaccgtgcccggctgtgatagtattaaaaaggaatgaatgattgcccataattgtgccactcagagatctctactggcatttttcattttagtcttttgtcagcccatttttatattgatgaggtcatattatataagcaattgtgaatcctgagttttacacctggaaaaatgtatatgatataatattattttgtaaaaagcgttttgtaaacattttttgattgccttatttcatcatatgaaagtatcataatttactgaattattcctttgtcgagcatatatgtttccaatattctattttttttttttttttttttttttgagacggagtctccctctgtcgcccaggctggagtgcagtggtgcaatctcagctcactgcaagctccgcctcctgggttcacaccactctcctgcctcagcctcccgagcagctgggactataggcgcctgccaccacactcggctaattttttgtatttttaatagagacaggtttcaccgtgcttgccaggatggtctcgatctcctgaccttgtgatccgcctgcctcggcctcccaaagtgctgggattataggtgtgaaccactgcacctggcctccaatgttctattattgtaaataaaactgtgataaacatcttgatgcatgagtctgcttttgaattagtttcttaatatttctatatatgtaattattggtgcaaacmatgtgaacattttaaaaaagtattacatattgccaaactactgtctagaaatgttttgctggttgcatatgttgaacagggtggatctgctgtaaatgtatttgttttccaatctgtttcccagctatatcctgtaacacttcataagtgctaggaaaaaaaaagtttaatttgaggttgtatttatcttttctggaaactttaattatcccccacatcaaagtgacagatcaggctttatttaaattttcagatatgtaatcaaagggacatactaattactgaaaatattccataaagacataatcagaaaatcctaatggtacctttctctgcatcctcttagtatcctgtgcaaacttacagcattgcagttttcacactggtataatggtttgcttctgtctccagctagcctgaaaactctttggggtagggctacacaaaaacaaatgaatgatggaccctcagccaactctggcaaagatctgaattgcaattgggatataaggatgtcatccttaatactatattaaggtgacctgggctccattcctgatgcctatttgccagttaaaacaactttatacagaagctatatgtcatcatctagctttgctacaggagggctaacaaatacacatcctatgggtgaaatcagccttaaaaggtcctcagagaaggcccattttatgatgttttttgagtgtgaaagactcatttatatctaagatgaaactaatgtatactcatttcaaatataaggcaaagttctccatgctgtggcctaagatgatccacaaccctgtcactgagtgtcttctctcagcttggaacaccttctgcttccctacaaactagtaaagatgataagtttatttctagactactgcataaacaagttgccccggacaccccgaatcgataattcttggaactcccacagcactctgtatagacatacctctgttagcacttctcttgctgcattttacatacttacatayacagctcttttcccaccaaaaaggacagtggaaggcaggtactgtgtcttatatatgtattgttggtttttagcattgtaaatggggcataatgagtgtaaagcagatggtgctaattgaacaaaaaagtggtccaaattttcagaaactatttttatcacatatgttaccagtatcatatttaagccaaccttttttacatgtgaacatctgaataaagttctgtagatctgatcttctaacgctgctaaagctggctcctccgccagtgtgctgggagaagggaggaaatggagacaatatttctaaactttgctattgatggggacttgcagatctgaccaactgtgtgcatgtgcacttatgctcatgtgcaccaatttaggcggacctaaacaaatttcaccaagaatctttcctgtttagaaataaaatggcgttagtacagtgtgaaagaatagagatattttcaaagtaaactctcgagctgtgtctatttatatacaacatggagaattgaggaaatttcttcaataattcaaaagcttgagaaaatttttatttatttatttatttatttatttatttatttatttatttatttatttattatttgagacagaacctttctctgtcactcaggctgcagtgcagtggtgcaatcttggctcactgcaaactccacctcccaggttcaagagatttttgtgcctcagcctcctgagtagttgggactacaggcacgcgccaccatgctgggctaatttttgtgcttttagtagagacaaggtttcaccatgctgtgcagggaggtctcaaactcctggcctcaaatgatccacccgccttggcctcccaaagtgctgggattacaggtctgagccaccgtgcccagccagaaaacattttctactatctggatatcataagatttctgttaaccatgatgaaatcatgtaaaatacagattttgatgggaggcagaggcaagcggatcacctgagatcaggatttcgagaccagcttagccaacatggcaaaaccctatctctactaaaagcacaaaaactagccaggtgtggtggcacgctcctgtagtctcagctacttgggagactgaggcaggagaattgcttgaacccaggaggcgaaggttgcagtgagccgagattgcaccactgcactccagcctgggtgacagagcaagacttcatctcaaaaaaaaaataaaaaaaaatacagtctttgaattcttagttggtatcaactcaatgctagcaagaatgcagagacacatgaattctcctgggcattaggaatggagcccaggtcaccttaatgtagtattgagaatgacatctgtatatcccagttgcaatttggatgtttgccagggttggatgaaggttcaacattcatttgtgtagccctaccccaaagagcattcagggtaactggagacagaagcaaaccattataccagtgtgaaaagtgcaatgctataagtttgcacaagatcatgatgaggatgcagagaaaggtaccgttaggattttctaattatgtctttatggaatattttcagtaattagtatgtccctttgattacatatctgaaaatttaaatagagcctgatctgtcactttgatgtgggggataattaaagtttccagaaaagacaaatataaccttaaattaaacttaattttttttcctaccacttatgaggtgctacaggtatagttgggaaacagattggaaaacaaatacatttagagcagatccatcatgttcaatgtatgtggcacctcactaggcctcgagggatcagggttctatttcagggttctatagctttattgtttaccagctaagagagcccagatgggttttatcagtgccctggggtttggtttctttatatgaccaactgggaagctttaacaacctcataattaggaatttccayagtattaagtatggtcatgcttttaatattatccagactatatagatacagaggattgtagttatggtttaatcatcttctgtttctttaaacttgatagaagttcttcactggtcattagcaggataatgattgatgcaacttttacatgaagccatgtcattttgacttaaagcaacagatctctggtataaaaggtagtctggcatctagctgctactctttcactgtttgcagtcagctctcaccatggcatgctccttcttttcatgctgatctctactcgagtgtcactccctcagagaggggcttcctgaacaacccatctaagtttacattttattctagcatataccattatactgtatatttatctccctgcctttttattgtttgtgtcaccactgtaatataatctctgtgatgatgggaccatgaatggttttttttcctgctgttgcttcttcagaacctggaataaggcctgacacatagcgctccaaaatacttgtcgggtaactgaaactgaagtagaaagctgtaaagatatcccaatattggtataggcttaaatacgctgacccagaatcagaaaccatagtaaatacgcactcttggtggttacaggcacacaatcagctggtctgacttgactgaactgattgctggttccttgggtggtatcagtgcagtggccttgtttgtgaraaattgatgtgaggttcttaacggacctgtttcccagggacctttctctaaagcacatttgccttgttttatttatttattttttcctcttgcttctgaacgtccttattttccaattrgtttcccaaataatacattcaagggtggccccaatatgtggaaaattgctttgttagaattattttgaagttacaatgatccagaggttctccccaccttaaataatttgctgttaccccactttgcttacaggaaaattatacaactttataaatatactcatgaaataatataatttagtacctacttctggcagttatatggaagacctcacctgttgactttattactgtcagacaaatacccagagcttattcacttaaataatatactgtagggaaaatttccatacctaattctgctttcttgtccaatatggtttttaaaaattatttaatttttcatttgttaaaggaaaagtataaggtgattttttattatataatcacctactataaacaaagtacttggtaggcataataaattaaataaaatacaattctccaaccttcatgaagctttcaacattacagtgggggatgggtttgaggtagccaagtaataggcaaatacaatatgctacgttacatgatagmaagatgtacagggtattcctcgattgcatatgaggagcacttaacttatatggtagtggatcgaagaaggtgacatctgaattgaatcatgagttatccaggtgagggatgggagcgggagacagtgactagagatgaggctggcagagtagagtaggtagaaaccagattatgaagaaccttacaagagctgttaaatggttataatttaatcttgagatttaatgtggggccttgaagtgttataacaaggggaatgacacattcaaatttttgtaaaaaaaaaaaaaaatccccccagcttccatgtctggggttttgttttgtttggggattttggggagttgtgtgtttttttccagtggagtgagaggataatgagagctggaggttcttccacawatctagggcagataaggtgatggcttgtattgcctgtcacaggtgtgctgacccactgatgacatgtctgttccatcgttttcttaataaggtgtcaagcagccctgtgaaacaggtaaaggaaaaggcaagatgggtgcatgaatgcttttctcaaactatataagtcaacttctttcctttccatgcaatggttgtctgtggtagagacaaggcagagtgatatggatagttcctcttgttcactttatatggtaggaggtgaaagaaaacaagggagacctaagtatttacaccttctgcccccaccttcagcttcttagttgccagtggttttgaggtgagttgtttgtgttatgtttttcccttcartgctttcctatgaaagtagcttrctttaactagagttgagcgtggcatttgtccaggagaaacatgtrtacacacaggggatgctgacaagtctatgctggccttttcttgtcactgcattaccacttggctttgtcttgtctaggtacstgaatggagtggtgaaaaatggagctgccccagtgctcctggacctggccaatgaggtaatgttattgttatgattttatttaaacctgcgtgtaacctaaggggcctatctagagtaactttgcttacaattataaytacctttggaaaaaaaaaggatttgaggtgcattagacatttaaattgctccctgatctctttgtacttttagtaattggacaaagaacttcacatattaataaatcagttgacataattagtctacttcttttaaggcaaatgtataaacagcctcttggtttcttattttgtggaaaatttcaaccaaacagctcaggacatgcttttcttaggataggttgtcttaatttagtgtgagaaatacctgtgtcaagtaaagagatggatgccaaaaaaaaaaaaaaaaaaactgctgttataaaaatgaagagagaaattgtatacttaaagatgtacttgattcatttttttgttagcaaacttttattataataaaggatacatgccttgtagaaaagtctccttctttatatgaagaagcatagtgttcttaataacaccaagtaagaagtgatttattgaacttattygttawctctgatctgcttctgtttggggaracaaataacagccttacatttaaaaagggaaaccctacagatttcccatgaatgaagaagctgtgaaaagttcataatagttgcagagagcataccaaaaaaataaaatatttaattcctaaactttaaaatatttatccactgtaataagrgcaatacaatatttagtctgacttggaactgcttatgcaaacctcgtagggatggaatgaaatgtacactgtttttgcgttgcattataatggaaaacatagaagcaaggcagaaaatgtgtgtttgcattaaagatgactcggtactgtgagcattaagtgttgcagtagcagcaagttctacrtgttatattagcaaggaaggatggcttccctcacagcttctgtctgctgctatacactgctgcagtcaacaaatgagcaattacctatcagttactagatggttttaatagtctaagcaatgtctacacaatcagataggatagttaacatatagaatgaatttctgtgcgcctcctaggaaaacaagtattttattctttttttgttttttccatttctagagcagagtgcttttttttttttgcttttttttttctttttttgagacagagtctcactctgttgccaggctggagtgcagtggcgtgatcttagctcattgcaacctctgcctcccgggttcaagagattctcctgcttcagcctcctgagttgctgggaccacaggcctgtgccaccatgcccagctaatttttgtatttttagcagagacggggtttcatcatgttggccaggatggtcttgatctcctgaccttgtggtccacctgctttggcctcccaaagtgcttggattacaggcgtgagccaccacgccsggccagcaggctggtttttaaatgtatctagacttgtttgttacaagtttatgctattagtaacttgaggtatctgagctttaactaggaatttagtgattgtcttttatgaaaaagaagaataagctagcagcattccagacacagcatctagaaagaatgtgatgcaaatatggtacccatctatatagatgatgatgttgattatataagttttatatcatagcaatttatattcatttgaatttttaatggatagttctatatccattaaatatttagctgacctcagtttcagtcttctagtaatatggaaaaatttaacctaccaacacattttctcctacatcaataaaccttttatttrccatgaatatatagcagtatttagccaagagraaacgtagttgtttaaagacttttcctccgttttggctacagactagtacagaaagaatagcacttttctatgaaattgataatgcattagggaaatttaggaatggctggtaccatattatagcttctaaacaaccaaggtgccattttttccagataggtaatacttagataacatacacttgcatctggtgacaattgatgtgatggtaatactttatgagctgatatttatttaatcaggggaaactataaaaattgatgagaaatatatagcattggtacattacagggtgcagcaactctcttagacaagagcattgtatttttattatctttttggggggctaagggctgtatgtggtcatcattgattttataaatgtcttcatactacttttccagtttcaagtctaaaattgaacattttagsaattcacacttcgttagtgataataagatcagtcattctgttctctccacacaaatattttcaagtgagatttgaagcactatgcattttatttacatgctaaattctgacatgaagcatgatggccctatttcrgagaaagatggacacatgattaatatgaaaattagggagatgcaagtacctgaactaataaggtagtccttattcaggctggactaccttcagtaatttcaccatttttcatgtgtcagctctgatgtgggttactaggaataagcagcttcgtggaaagcatttctttctacttggggaatttaagggcatccaagtacatacgtatttgaaaaaactgttcatacaaatgaagccagcctttttgtctagttactaaatcaagataaaattttggtrtgaatacgggacttgaaaacctgtcaggaaaaattcatggtgataatatatgaggaatgtttgctgtcttccacctaagataaaaagactcgttttagggaagcattattgttcttaaaaatgtgtgttcctattttttggtgaaattaagtaaatggttaataaaagatttaagaaccccaaagaagacaatatctttacaaaatagtagatacattttttattaattaaaatgactgtcggactgaatatcctttgttttctgactggttctttattttaaaaagttaccaccctgggatctgtattaattaaattggtaagtagtgtttcagataaggacggtgatcttatgttgcagatattatattgttgtaatttattattaacatctctgcaatgtagttgtcttttatcaaataaaatattttaaatgtaaggaatttataccaaaatttcagttgtctttaaagataaaatcagtaaaatccttatttggatttgtcatataaggacatttgactctgtttttgaaaactgtcactaaataacaaaaagggcttattatttgaaattgcattcagaacagtataaatatagacagttgcatagaaagaagcatggctagaataaaaaattatattggcctaccaacagaaaaaattgaggagagatgaaaaaagcctatttcactgttttagacgaatgctttttctaagttgttccatcctttttgctccaatgttatattcaataaatttgacccatttattcttttcaacagcccaaaccatacttgttataattttattataatggaagccaccaagggtgggaaagattttaatgaatgatgcttgctatggttgattaaaattgacttaatcttcagtgttgacaaaatactggagtatccactgctcgcacaacttgatagttttaattttctacttctgttttataaaggtggactatgcgccctcattaatggctcggcttatactggagaggtttctacaggaacacgaggaaactccacgtgagttacccttttttcctaatggtactcttttactcccttccccaatttaaaaataatttacacagcatttcaagtcacttaatgagagccagattccaaaacagctatcatgaacagttaatgacaattaaatgcaatataaaagaccacccacaacttaaatactcttcagaataatgctctcttctttgtctaaattccacactcaacctctccattgagctaaatagacaatgtgtatcaaactaaaaaattgattcatcttcgtatatagaataagatacatcatttgaaaaaccattgtcaggaactggctctaaaagaaacattcatcctttttattttaattcagcaagaccggagaaatactacttccaaatgcaaaggtgaattccactggtcttcctacaagaaaataaaaaagaaaaaaagaaaagaatagagctacagaaggaggttcaagcctaaattaatttgccactgaaaaaatacattttgttattttctctgtgtcaactgcatgattaaaaccggctgttaagtgagctctggggatgtgctcgtaaaagatttatgagtaatattcaatgtgatattcaaagtgagtcatgaatatcaggataattgctctcagtgctggctcttttactaggcaggagtttgtcaactgccccataaatatttgcctagtctcatgtaaaaaagacaatttcatcttctgcatttttattacctagtataatgtttacctttggagctcagctgtggtagaataggtaaaaagctttggaatatgctttatgcacataatcttccctctttgaaagtagaagataatacctgctaaaacatcattcagtagtacatgttggatttttatttttttatattttgtcagggattttttccctttgattttctttgaatctgcagttaccagtgactggtggcccagttaccttgtgaaggtttcatttgaatgaattaagtacttcccctaaaaattcaatatcatttcaatagatgtagcctccaaagtaacctgcagtgatgcttcatgagcaaatcacatgatgtcagaatggtatggtttcgatttaatcaagaaagagattaaagtggatgtgtgttattttcaacttcgcagcagcaccgccatttgtcaaagtcaaccttctgattgctttggacctactgctatccaggtcttgtcaaaatagtagtcagcatagtctgaagcaggtagactggcctatatagagcagtatcaaacacagtaaaacagaattcattgacttgtgaattatgaagttaataggttgatcataaattttgtagccattaatttatctttataacactggcacatcttcagtacatttttctttttattttgtaccattttatacagcagagttaaatagtactgaatataattttgatgtgtactgtatatcagaatcctataattccaatgctaggattaaatgtcttgcatgaatacactggagaaggacatgagcrtatttagaaacataccaaggaaagggtatttcaagaatgtggctgcttggaaaggaggcgaatgtaaatattgtatgcttgaattacactatgattatgtataatcaaataacagtattttgaagctttttcttttataattggttgggttaatggttgtttcactgtgagttgttacagagtcaggttttgtttttttttttttttcctgagtaaaatcatgacagatatttgatgttatttttaatcatcatactaggctattgtgaaggcaccattttaactccctatttgccagtaggctgactgccagtcaaaaatgctgtattaaaatatttctctggacagaaaatggtttcaaaaatcttttatgattatatgacaaaccataattgagggtttatcatttcaaaaagtgacagaaaatgttaaaattaatgccaggttatagaagtcaattaatttgctgatggtgctaggttatcttcctttcttttcttcgtctttttcattctctctttttccttccttttcttttttttttttttttttcttaaagagctttaagttactgtggcttatattctgacactttcttccccttcagagcatgggcctggctggcctttggcaatgaaattcaatgcacatggctccgcagtcaaatcatcaaatttccctgtgtgtatattagagttttgtaatgtgtttccattatgaaacaatgcggggataattgtctttggtagcaattagctaacaggtttgttcagtgctattggcagaggcatccatcacccccttccctgaccacactttttgtctagtgtggactatggagatcaatagaattctatataggggaaatcacctcagctttaatgagctgcaagtctcagtcttggcttgtatttttaattttttcctcttaaaactagawatcaggcaaaaaaatcctattcttttgggggtggattgtactgtgtatttactattactttcattagatcaatgctcagttttaaattgtttttacttctgtaaaaaggtatagctaatagcatgggacatataagccatgtaattttgataacatatactttaggaatatccactttaaggagtactgttgggtttctcacgcgataatttttagggtatgatatatacattctgtctagtgtctcagtagttaaaaagaaacctgagtggctcttgtgatgacaaacaattttgttgtacacattttgttattgcccctgattaaataatgttctatagccttttagactacttttgtgttgtactgttgcttagcctcacaacaaaactagtgtactgataggatacgtattttgagttgagctctgcagggactgagtataagtgccttggccatcatcctatgattattactacataaagctggtcctagaacccagattccaagttttatctgttcaattgaattatttttcttcctcccaaattagacatgaggaagtttatccatgttgtgccattttctcttcctcatgaaatctgaagtgaggctgttctgggagagaatagcatctctggttttctgtggcctcggaatcacccagggaggtgggtggagcatgtgaggccagtgtacaggtgagttgtaaatggagtggtagcaaagggtgtgaagtggatggcagtgctggtgctcacactcaaggcttccagctccttgtcaacaactctttttattgcattacactgaataaagtagcagttagaataattgttggggaaatgcttttagactagcattgcaggttttcctgtcacatcacagacctgggtaaaagcaggagataaagagctcttcactcatcatgccatcaatccaagtgattgaaccctaccccactcagtagcctttcttcctagcagaggctattaccaacaacattatgattaataataagtaatagggagactctgtttggatgtgttttttttttaaagtcagtcgttatatttttaacaaatcatttaagtgtcaaagtatcaaaatacatatttttctgttttataccgtgttttctaattgcattgagagtataattggaaagtgctgaccagttacagactgagttgcttaaggaaggctaaattttactcccatgttttatagtctacccctgggatcacctttccatcttaacttttacaagaatgctagtgattttacctgtttttttgttattgttcaatgctccctgattttagcacaggtcctgctccctattaactttcaaatgttaaatgtgtgagtgagtgatgagtaaatgagtaagtttcacactaataatggtgactttctactaggagcattatagaaaatctctgttaatgaaaactctaagtatagaaaactgttaatgaaaattttatgagtagacatgataatggaaatatccttaaacaggataaaattgtctaaatgttcagtccttttatgaaaatcaatcctctataacttataaggtgaacactattattaatagggaggttgacattataataaaattgtaaatcgaccatgtttactgctactgagtctgaatataaggcagattaaaatttctgaagaaccattgagaaaatacctcaatcctcattataaactgatgtttttgcttatgtcctggagattttatacagcgtacctttgctttctttcatattgctgtttaatctttctggctttgggatagaccgaggttaatagtcacatcatttgaaactgagccatacagttgaatgtaatttgccgtaaagatgaatgttttgtagagttcctctttattttcttaagggaatgtgcttttcaacataatgtgtataatccctgcctccacacacacaccagaatgggattatgatttccctgatgggattactaaattttgttcttactttttgaatgagcttaattttagttttcaaacaaactggtttataccttttgccagtatgctaggccatcaaaagatggtacaatcatcttcaaaacctgagtttaatagaagaaagtatgagaaggcatccagtaggtgtttagatctgattagactttgagtggtccctttctaacaataagaggatattaattcctttggaattcatgttcttcattcctctgcagattgtcaagagctatttgaatcctaactatattccaggcactatgttaggtgctacagtggatggaagaaaggataaaactcatcaaagaactcatagtttagtggaatgtatcatgtgtgtacgtaacacaaatcgagtatcccttatctgaaatgtctgggaccagaagtgtttcagattttagtttttttttttttttttttggatttgaaatattttcattatacttactggatgagcatccaaaatccaaaatccaaaatgctccaatgagcatttcctttgaaatgctcaaaacgtttatggagcatttcagatttcagatttttgaatttgggatgcccaacttatgatcctgtctgtgcctttagaggtaaaaacatctctttgaaaggaatcaaagaagagatgtgttctagtttgtagaattagaggaagcctcatggattgaggcttcaagagaagacaatttaagacagagaactctatgaacaaagaaagtttgtatgtacaatcttagtgggaattaaagttggacaaattcagttggggttatatgatggaagatactgaaatccagacctaggtatttatatttaaattaacagggaatgggaagccactgttggttctgaatagcagagtgacttgatgagagcttttatttagttttttatgacagtgcttttcaacaagacagatacggaagatatctgaaatggtgtggctgtatctccaccaaatctcatcttgtagttccccgtaatccccacgtgttgtggaagggacccagtaggaggtaattgaatcatggggggcggttacccccatgcttttgttcttgtaatagtgagtgagttctcacaagatctgatggttttatacgggctcttcctttttgctcggcacttccccttcctgccaccatgtgaagaagtatgtgtttgcttccccttccaccatcatcgtgctgaactgtgagataaccaggatttgtgtaattcctagcactttcctataactccaccacctctcttccactcaaggaagcaaattggaataaaaccgaaggagagtactattacagaaatagctaaatcaactctcatttatttaaaagtacttttaaatagatttggtattagttataaataacttgcagctcactttgtaatagatcatgacacagaactatgtgttgttgaccgcagttaagaaccaaggttgaagatgatccagcaacactgtaaaatgtgttgaagtaaggtaattctgagtgtagtgagaaagaccaactaataagctattgcattatctttagcaaacttcaggtctgaactacggtttacaatgaaagtaataaaggaaataaagtctgtagacatggcaatttactggatactggtagtgaggaagtaaaaggaacccaggatgcatctgagatttaaaagttgggtatctcatgctaagaggaataagagttgctttgaatgagagaagggaaaaaatggaattcacttcaggctatgaaattcaggttccagaccacagtttatagaagagttttataaatgtggaagtgtgggcttctttctcagagccccatatttagatttgtgaatcatgtataaacggaatggtttttccaagcaatttcaaataggaggaagcactccgcattctacatgtgaaccctcatttgattcttaattattcaagtgtttatttaatccacaaaattattaatgattaaattttcatttgtatacctacatatttcaagaatgaataccttattgagaagtgaatacattgagcttctctagctcattctagagggtaatgcttccaactgttcgcaagcctcctgtttattgatcacactttttttttttgagacggagtctcgctctgtcgccaggctggagtgcagtggcacattctcagctcactgcaagctctgcctcccgggttcacgccattctcctgcctcagcctcccaagtagctgggattacaggcgcccaccaccacgcttggctaattttttgtgtttttaatagagacggggtttcaccatgttrgccaggatggtctcgatctcctgacctcgtgatccgcccgccttggcctcccaaagtgctgggattacaggcctgagccaccgcgcccagcctggttacacatttattaagagggaaatattatttccttatgcattgcatgagggtgctttttatattcttgtaaaatattaaaacatgaggaaagttttagttaacaaacttttaaagcttctgcatgatgctatgttttcaatttcttgaaagctccactgtatcatattttatcctttgaaatgtgttggcctagacaattcagatgaaattctaggagtaggaatgaacttattttggaatctatgcttttattgataaaaagtcgtatctttggttaggcattttcttgtatctgtttgtagacttgctttttactactggtgaaatgagaaaataacttattttcactagtttggataagacatataagagtacatgcattgtgtgataaatattaacggtaatgattgtattgaaagattttgtcattcaagaagctctgtgttggaaattagatttcaactacgctttatagtgtaaagtgtagtctataacccatgattgtgggtacagcagaggatggtttcttgaaattcaaaaataatctaccttggctattaatgttgatattttactgagcttataaatcctgcttactatagaaaacctttactggttaatgttcttccccttttatttttctcaactcgtgaagaaaatttaaatatatgaaaagcaaactgatcagtgaacaggttgttaggatagagaaagaggatggtgaaagagtagttaaggaaggtccaaagagattgcagggtttatccacaacctgaagagacgcacagaatcaaggattgatgacctatgttgcttcatttggacagagatggtctttcccaccaccactggagcttttgtcttaagaagactatggaagtcaaaaatggttcataatgtatagtgcttatgtatgctaaattttctggtacaatcctgatttcatatactttttttttctgtttaaagaaagttatttttaatatttataatacagtggaattttcttagaacttcaaaacatactttcatttacatatattgatacataagaaaaaccctctttttagtttatatttctcattttggtgtttgtatgggatattgacttgacgtttttggttattccaggatatttattgcagaaccatgcagatttgtttttcttctttagaaacacaataacttaatagaggtactttttgtttatcttaagggaagtagttactgtggatgccaaattatattgtatctttgctctttttaataaagggctgttcttattttacttcttttaaaaaaaatcaggtaaatttactaggggatagaatttttgcctgagcctatcagacacaaagccttttttttctgacaatttcataattattgagtggaattgtggaaattatggaatacagaaatcaagtaattctcctctacccccactgatgaaatgtagtagactgagaattatcatggctggtattttcaggggattttacagctaagttgattagccgctaaacctagtctctttgtagttgttcccttctgcagtctactgatctttatctgtatcccatccctgctaacacttgccccttcccctcactatacatacacatttgccagagactgcaagattgtcagaacaatgttcttggttatattgtgcctattgtatagatctctgtttaatcgtgttattttctcccatttgattttcatccttagataccaatttggacctctgtatttagatttccttttagcctaattcattcttcctacaaagtacttatgcactttcagttttctttttctcctgggttagaatgccccaaacttccctattccatgaatagctcatttcttggttcccattatgtttctgccacctccatgcactgtcttagatgagctgtcagttttaatgctttctcatgtccttatttggttattagctgcttaaggcagttcaaataagcaatgataataaaatttgacacttaatatgcacatattatataccaggtactttctaggtgctttacctacttggatatttattcctcataacaactttataagtcaagtagtagtattatccccatctacagatgaggcaaccgaggtacccagagcttaagtgatttgctgcaggtcatgcagtgagcagtgacaatgtgattccagagcctgtgctcctcacaattatgctcaactactcccctttggaaaaatatattttatagcacagttttgtcttctgaaagttagttacgtagcaaatcattttcatgagtcagaaagcttgcaagtcaatactgtaggtaacaaatgtccttgcctggacaaactcatcaaattccccagtttacccaaaaagagctcttattttttgtaatcctccaacacacttttaagtgcttgtgtaattcatttacttatgtcacatagcactatatgtctttgtaaaaaggagccttaacatgtaagtgcttaacctttatttcttaatcatgagcttttaaatwkttattgtgctgacataattaggtgtagcacctaaaacgctttgtgtgtacagctataaaaagaaagtaatgtgatctaggacagacagtaaagctgtatctaggaagaaatcctatggaaggttgaaattcaatgtggtaactgccaattatctaaaaggaagtctattactttatgataaaactgtcaaaataatgattgggtactcctacaaattgtacagagaatcaataaaaccaatattacgtcacagtttgagaatttaggaattccacttttcttcttattcatgagaagacgctaatatatttaagaatgagatgatacgaagtttttcttttgtgcttcaccttatagctcttattttagttgttaatactattttgcttaagaagcttgatgaacaacattcttggaaaatatgaatagtattttttcattagccagataaaaatatgcagacaatatgagctattttctttacaagaacataaaatacaacacgtcaagtagattgtaggtaatttctgcttcattcaggacctatgtgttggcctcttggattatagttgatctgtgatgtcattgtatacaagctaacctttgtattttaaaggggattccctaacttattcttgctaaaactgattattatgtgtaggtaaatgttttgtcttcttcactaagccacctaatctccaatttcttgtttttgtttttcagcctgagaagatgttttatataatcagtacaggactaatttttcttgggctcagtgttccttgtcttggttcattgcctagatacatccataaatatttgttgacttgaggtgaatattttgttgataatgtacctaccatttccttgtgactctagggttgagagggtatcaagaaattttgtagctaacatgtaaaacatttcaatagaactttatagtttataagaagttttgatatattttatttgacacataaatagctctgacatagctaaggcaaatgttatgattgcattttataaatgataaactgaatttcaggttaagtgaccagcttagtcatacagttagaaaggacaagagctgggacttgaacttggaaaacccaagcctacatgtcctgcttactcttgttacatgcctgaatgcacaaatgaacaaacaaaagcaatgaacgagtgggagaatctgtgtcttctgatttcagattcatcctctctccattatttaatgaatgtaaatcgactgcattgtttagatattgcccaagtgtttagcatctcttactgtcataaaagtttttcttctttttacctaaatctcacctattatcattggtgcatatttccacaatatgtcgagttggagtcccagtttgatcctatactagctgtcatcctgggtgaagtcttccagagccctagtttgctcttctttaaaatcagataacaacatttacctttcaaagttaaacagattaaagatgattttgtaaattgcctggcatgttacttggcacatagtaggcactcaaagaatcatgatttttatagtaataggcagtaatattccaacaaatacttacacttgagccatatgaaggattaatttcccttcttcttcgttaggtactcttgaattgtgaattctctgataattttagagatccttttcggaaacctcttgaaataatgtttacgatgctctgtatgggcggaaattaattatggtcttatgaaagctacatagaatggaggctggcctcaatttcctgaattcgttttctaatttattatatcttatagtaacaaaacaacagcatatgtttagatctatctgcatatgcactattgaaatttacttttttcctgctgtaattacccatacttgtatcttatacttctggaattcttataaccaacattctcaaaagtaacaggggttgatgtttttagtggtaatgaaagggttaagtttgtcataaggtcatttctgggagaagcaagtctaatagaaagcttttacttttttaaaataaaattttattttgggataattttagacttacagaaaagttgcaaagatagtacagagagttctgcctatatccatcactcagttttagttatccctaatgttatcatcttatattactgtgatacatttgtcaacactaagaaaccctcactggtaccttactattattgattgcactccagacgtaattcaaatttcaccagtacccaatccaggattccacattacatttagctgtcttgtttcccaagtctcctctggtgtgtgaaagcaatcttttcttgtttttgatggtcatgatgtttttgcagaggatattctgcataatgccttcaatttggatgtgtctaaggtttttctcatagatttggggaagaataaggtgaagttcccttatcattatatcatatcaaggggtatgtggtatcaacatgatttatcactggttatgttaaccttaatctgttggttaggttagtgtttgctagatttctccattgtaaaattactatttttccctttccatactctcttctttggaagcaagtcactaaatttagtacacactcaagttgaggagaatgattaaactctgccttctggagagaggagtgtggagagatattatttgggtttcttctgtaaggaagtttagtctcctctccctgtttatttatcatttttatatttgaacttacatatatgtataattttgagatacagtcccactaaacaacttttatttagatttagaacttaaatttgtagcatacattttaattttttcttttaattccatactccttcttctcttgtctgtgttacccataaactgagcaaacatatatccttgtctgctattcatttcagtgataaactatttaacagaagtccagagtagcgctcctcttcaagaacacagataaactctttcgttagttactcttgttaataaagaggcctgataagtatcaaaagtaaatttcctcaatctgacctaaattttgacaaatctattatatttattaacagacacctttgtatttcgggttgattttgtttttgcatatcaagtagttttgattatttagaagcaacagttttgaagtgaggccatcaatatacaggtgaattccttttaaaaccagacctttgagttcttttttatgcttcagtcatcactcttctctccgtaaattatcaaaaatgctggatgatcagtgaatacctttgtctacaaggtatggatggtaagaatttcctatagcctttttacttgacttatttttgaattatttcttgttttaatcttggttttctgcctgtccattgtagctgttcctgttttcagactgtgaacattggtaaagaatgagatagagaaaagtgtagcttctttaggaatattcctttaaatgatattttgtatatttagttgcttcagtttagacttttagcatttttatttacatgaggaaaaaaaaacactaaataagagagaaaagagtatattgtgtttaataatctgccagttgagaacactaaggttgtaacttgagcgaaaacttattcttaccactttaatagtatccagcagcatttcctctgtgtttttgtttgtctctagttgtatctgaaacaagaaaataggaaaagtctctgaattatttgtagtatgtgaaagagggaacattaatgtgtggccttattctgaggtatttagcaacagattgtcttctccttccagtgcagccacacagggaagaggccgttctgtccttggggatgaaggaagtagctgcaccagtcacgaaaccattcatctgttgcgtgttctttgagtcagcactggcattggcaatattctttgtctggggttgcttgtcttgctttttgcctggaaggtagaaaacggtatctttagcaaaagtatgaaaggcaaaaggattgggggaaattaggttgacaagtggatgaaaaaagggcagatttttttgtttttaatatttcctgtcttattttttaaaatcattctgacatattgtgtgtgtgtttctctttttttttgtttactgaacatataccacccccaccccatggaaagctggttcttttggctgaattgggttatctactttctagagacttaggctctagtaggacagatgaggtcctcacagctgcatgttcaatttagatcaaaatcgttactcagcaaacatattatccagtttcttccttgagcaggccatatgatcatgtgatcagctaggatttagttcattcgtcaggcaccgattttgaaagattttattgttaatgttgatgttttttaggtactgttcctcttacaattgtcttcctttgagaagattttatttgtacctatagcaggtgtgtttgacagttctgaaaattgagccttgtgttgtgtgcagtcatgtaaacaatgtggaatcacctttgggtctagaagaacttcagaatacatcagttttggtttcttctaagggataaaaatgtgcactgttttaattaatcattttatggattttgatgttttgaaatttgtttgaccttggcaatgttgtttttttccccaccaggaattaaaatagagtaggcagaattttgaaacattcaaaatgtcagcttgctttggcataaaaagtggaatgttaaattttattagtttaaatttttagaatttcacttagcattttttttttgaaatagggagaaaacagttttttgtactgtttctttttactgtattctttttctatgaaacatgtcttgaatgtttccttttttcctcactataatatgaaagaaaacaagttttgaaattttaaactcttagagtagttatactttttttattgtaacatcaaaggatctctgtatcaatatgaattttctttttcattcaacaatatttaagtacctctgtgtgccaggtactattacaggctcttgggagatctcaggaaagccaaaaacagacaaaatccctgtcctccaggagcttgcatcctagcagtgaaggccaatcatacacatataaagaaatcaataatgcagtatattaaggtggtaagtgctatggggggaaatagaacagtgcaaacatgctgaacacctgtgtgtataaaggtggagaataactaatttgatcgatttggttggggtggggggaggtctcaaattcaattaagcaaggaagtatactccaggttgtcttgtaaaatagtttagtagcatctcagactaccaaatggctaacttttcaccaatccagaagcatattcatcactttgtcaacttaatggtagggttgatcagcgccgaatcttgttacttctttaaaaaaaaaaaggcaagggaaatcagttcatagtatactaagtgcctttttatttttgaataatgagatgggagcagttcattagctgctggagggaaaaaaagcagggtaagcagggctgtacctggcttgacaagtatactaattactctctttcacgtggatctgaaggcatattcagttcagtttaatgatcagacgaaaaggcattagaaggtcccggctctgtcaggtgaggaagagcaggtgtaagcagattagttctgccagagtaaccctttggagtcatcttctctgggatggcactggggaaaartatcagcactttttatttctagtgggaagataaatttaagaggagtaaattggaaaatcaaatgagggctttagcagccggggagatttgcagagctgtctccgggtgtttgaaaggcccattcatcatgtcctacaagtagtcaattcctctagtatctgtaaatgttttcagatattagccaatttatatgctctgagattcatcatggaaaatcagctttaccatcgtgcattatctccatctgagatgaagtttgatatatgagcatctttgcagttcaatgagttgtgtgcaaaaaagtacgtttttaattaataaacaaatttgctcaggagctcatcagtgtcaagagtaataacgattgtcattcattattgtttattgcattcctcctgcaacaaatgttgccttctaatgagatttctttcctattttttaatttagttaatggcattttcatcccagagaaaaatgcaaatttcttgtacaaaatgtaccaaaccagccagtatgcttctctggagctgaatcgtataaattgtcaaaactactttgctttgaatggcccttttttgtgttttcaacatccctttttggtagataaagatggaaaaaaaaaatttggcagggtgggtgattatgaaaactatactataccaaataaaaggcttccacatttgaacaaaattctagtgtgcattgaggtggcaaggacatttcttagactgatgctcatgcttttgtatagagtaaggaattcagaaacacacactgtaaagggggtgggatgtttaagaaattaggtgagaatgagatttttttttcctgaaagtaacggaatttttctctagtacatacacacatacacacactccacataaaagaatatatagttatgaaagtgtcacattcctcttttgaaaaagccgtatatatttctcttaaccttaccatgatctggcctgttaggtgagaatacgctgtctaataaaggctccttaataagcgtatgcttgtggtgttggarcctgcaatgatgcagagatgttcaagtgttattatttactgcagtgtttgcgcaggacggcgaatcctctgctgcaaatggcattacagctgtgatgaatgagcattagggtaactcattttaaatgtgcttgatttattagcgcgggggtctccatttccagcaggtcaatgctttactgaaacacacaaagtcattgtcaaggtcagcctctttatgaattttttaaacaaaatgccttgaycacatatcaggtccttcatagaaaggaaaaacagaaaggaatagcttttgcaaaaagatttcttttaaaaggccaaaggcaatgttggtcaagcttcaattatgattcctagtaagacaagaaccttaatgttcactgtttgccttcggggatgtttattacacacaactattttgcagaagcagcgtcaaatgtacagtataaaactaccattaggcagaaaaatcaatcaaaatgccattaaagtggaataagttgccaatattgctgatgtggttgcaggtcctttgattttctttcagattattaggcacagtctagtagtgactttgttaagggaaatgagtgttgttcagaagtaatatgtctcttggcttcataaagtttgtggcctcatatttcccagtttattgattatccattatcgtttgtcatgaggcgtcctaactcaaggggaaaatataactctctttttcttgctgaacggtagtgctgtatagatctgtagaaaggtttttcagatgtaccaatctccgagaaaaatgagcaaagaaataaagcaatgagtgtgccttccaggtctgagcagtttaaagggtagattgctgacagtactttgttctcacatcaaccctttttcccctcataacgaagaaagaagttcgtgaggccactgaaatactccaagctcaggatactgcagctgtatgtgataatctaaacatgaatgttcttattatcctggcataatggtgcttaatttatagatgttttgggttcatattcatttttattggtgactattaacatttttttctgctaaagtcagcaaaaaatgtaattaaatggttcttttaatttacacttaattgctgcactgtgggagtaatttcttcagttcttaaaaatgtattaaattcctcatccctgtcttcaactgttctgttgaccacggccactgtaaaaaattgccaagggtacaaaatgcaaatcatctgttttctatggagtagtttctagcactcctctgtcatttggggtgtccaaaggtgatgcttacagaacaagtgttgcttcagagactaattgcccttctcccttaacacactttgtttccagagccccaagagtttgcagcatgtctttttgtaaactctatctctcactttggcacagcattgtgctgccattgtgctcagcggccttgctgaaagattaattacaactgaagaaatgtatcttttaactgtctcattacataaagaattcatagtgaagttaacatccgcatcatttaatgatatacggattttaattatatagtacactgttaattgtacaactatttttagatcaggctactaacttgttcatttaaatgaatagctcatttgcttgagggaccaaaatgtaagctttcttgaaaactcaagagaatcttgaaactgctgcaaaaatatgttaacctggtaggatatttttatggtatttgtctctccttaaaatgaagctgacctgtacctcgccttcgttgcataggttgtttgacacatagaattttgactttttttttggtacctaataaagtgcaagaaagatagatctctgtgttggataatgggcagaaattgaatagcggtgttttccttgaaagttgttgagatttttctcaggagaattagacgaaagttatttctgaatagaagcactgtccctggctgtaattagtcacatgggtttagttcccaggaaatgtttctttcagcatactaaaagtgtttgaattttcatatcgtttaacatgccttgaaatttcgcctctgctcacctacctatccctctcctacaatttaagatataaagtttaggttgttctttcccgttagattcgggagcctgccgaaaaagaacacacttttgtgccccctttccttgaatacttccaatcctgggcaacatttttaatgacttagaattaactgctttctaattatgcactgaggcagacaccatgatgttgtatgggcctttgccagcaattggaaacacaagagacataaatgagcaggctaccagagggaattattagagaggcttcttgaagtcatcaacttgcaaagcagagacttgcccttgtctcattgaataatacagacttggtcataccagtagccactgtggtatcacctttagaagcatccagttttctttcttttcatagactataagacatttgatctcatcaggctttctggataccccagtaaatttcggtaggtctttgctgccatgaactttctcctctgatcttgaatgggagttttcgctttacctgtatctcacctctcatgttgggccccagtgagcccagaagagggcttcccttcattatgtggccctatatttgctctgcatggagcactagcttgaaactttaattgctaatatatgaattggaggaaaatccaggagggaggaggtaataccatggaatctcttaccgtaagtttaaactatttataaaagtactatataactgttaacaacaacaacaaaaatgtgtgctagtaaggtcacttcacatacctataccagtgataagcagtcctctttgggagatgagtcattagatgttttcacggtttacctcaagatccattgtatcctatgagaaagagtagtcttctctttcctttggcagtgtgttcataaatgtatttattcagcagtttgttgagtagctattttgtgcaaagtggctttggagtggtaacaaataagctttctgcttttaagcagcttgccaaataccctgacaaaaacaattccttaatcctccatgtgaaccatgcattctcaaagggggtgagattgtgtaaacagatatgcagcatatctgtggcattaaaatttcatggggggagcaagtaagaaaaaataagaagtcttctgaggtgggtcctaatgaataaaagaaaaggttaagaatcatctgtttagactaaataagggccacataaatccaagcttgaaatctgaaaccttgtagcctcaccaccaataataaacttgtgagatttctttcttrtcttcttaggggtgaccacatgatgagcctcaatctacttccatgtgaaaacccccagatacttaaagacaatattaagaaaatattgacacctttttaatgtggcatgatttaacatttcagcatcctgatcaatctcttgtcatcagttgacaaagtgacatttaatcaagtgcccaatgattgatacacaatatgagttctctccattccacaatatgagggagaggaaggcaagtggattggaaaaaaataagagaaggctttaatggaggaggtaaacattgaaccaggcctcaaagttttagccaaaggaaagtcaggaaaaaaaattccagatttggaagttgtgtgtgtgagtgtggagaagaattcagtatattcatagcattaaccaggtgctttctcaatgtttgttgaatgtgtgcttgttggataaggattggtggcatatagcggctataaggctgcaagttgcctgagacaaggttccgatcagtctgaacactcatgctttggagatatcttcctcttgtccttacataatacttttatatttgatagctctagtytaagttatttcttacatgattatgtgctagttggagagaataatttaatttgtccctataggattccctaatgttaaaagatatttcttattcagattgtcaaatgagatcaaactgctttagatttcacttttatgcagtgggagagccagtgggctagtgcttagaattcttgaggagtagttccaactgcaagggcaagtaggctcctgcaggccactggcaatatggaaattgttcaggaaagacactggcaggtcaacccctgtggagatgtagcttgggactttagtgaccatgatatccaaaggcgttaaaccatcattggaagaaaagatgaaatactaattggtatttaggctttgctgtcttggagttcagcccctggggcagccacatgaagaggcaaagctcctggtgtaccttgggagtattgccagcagcagtttccatatccatccagctgttcagttgcagagtctgtttgtgtgtgtgttttaagtggggagagaactaggctctcacaacacagctctgactgtgcatgacttttccttctcatctttatccctatgtctgtccttccttcacacatcctttcttctccctgactgctgccatccagtacacaatcagtccatactagttcccctatcttgcttaaacctatttgagatcttagattagggatcccaacgatatatggtcttgtttttgttttagttcaagtgcagcctaatcaaaaggcattctttgcagtaggcaggactttcgggatcttgagagcgcagatgtttcacctgcttgtttgcctcagtttcttctagcagtagctggctacttctctgacctcatgctaaggaaagcaagagctataaaaatggatgtgatattagttattcttgggaaagtctttacttgcttggttgctaatacttgaaatgcccttagctgggggaaaattcttctattatgtcgttatagacaagacttaaataacaaagtttccaagagtgacaacacattcacctaatacacacagaagtagaaaggacttctacctagttctttctcaagcccacttttagtagtggattgtgcactgagtgccacaaaagagtgtgtatgtgtgtatgggctggggtgggggagtggggatgtaagatgggagtatcaatctggcattggcaaattttgcctgttgaatagattgacttctggctgtctctcaagcctatggcagggccctgactttataaacatctcatcaaatcaactataacatcccaagtctcaaacagcccaagttcataacagtgtgttattttatttcatcttcacaacagccctgcaaggtaagcaccaatgttattctcttttacaaacaaggatactgagaggtgtcaacattaacttgttaagataacatgactagtagctggaagagccaggcctcgaaccaagtctgtctgattctagactctgctcataaccgcttatccttactgcctgtctgtttgaaagtgttattctgcatgtctttcctagtttaccttttttcaaggaagacatatttttcttcttttgaggaagatgtaaataaaaatattggtcctgttatatgactttcaagtctagatcataagaggtcttaaacttatgcatcattatctggggatgcttgctcttggaacccaccaaccttttcaaggagaagcccaaacagaccttagggaagccttacttctctaagtcttgtgtcaggaagccagggcccctcacccacatggcagacatgcaagtgagccgccaccaaagtgaatccttcagcacccaggtgatgcaccccagtggagaccacaggaagagcaaattgtctccactgagccaaggccaaattgccaaataatgagcatgttgagaaattgtttaaagcactctacccaaaaaacggagggttatatttgagaatctaatagaactgattctcacatccacagaaacaagttgtcttctttcccaagcttgatgattagcacagtgctttggcctgagacatcatggcagctgttggaggaatcaggataacaatgcattttatagccaccaatgaccattctcccttttccctggcttcccagatgccataacagtaggcaggtccttagtagtagtttaggtgattgcactccccatcctgtccgtatgcctgtcacttgcccttctttctgttgtttgggagtccaacttcttagaaggatctttttaagtatagttttataactctggctccaaagaaagttaacaaacaaaaaagtaaataagtattcccctgaacttattactaaagggccttcaaaaatttcaacaacacggcagagtgagcttttgttagtgggccatatttccatgaaaaagatagaaatgatagacaaaatttttaaaactttaaaagatatgtgaccaggtataaacaagagaagtaaaatctttgggtatcagaaatggagaaagaacctgtattcagaatgatctacagaaattgctaacttcagatatagacacgaggggctgggcttgggttttgaactccccaggggacagatatgcaactaagagccggaattgagcttccatgtatagctcaaaccatataaaaaggactagaaaaactctactttcttggagaaaatggcaaggaagcttgcttggtggatgtggccttgggttgtgcagtattgagagaacaaatagaaattagaaataagtcagcactatttgtggggttgggtccaaatttatgctcctgtttactgcagaaaggccaagcaaagaaattaacaataaaactggtctttgcaaaactaaacatgaaactacgttgtcatggttaattctacagtgcaggtcaaacaattcttsctgaaaataagctcccaataaaaatttacaagccaatggaggagaccaattaccatggagaagtggacagagacagagaaagaaagaaaaatagaataccatgaactagagataaggaaatgacactataaactataagacaaagtatataaagtataaaatctaaacattttatatatttgcatatatatataaactgagtaaataaaaataactgaataaataaaggtatagaattttgtaagagcagatttttaaaaaataaaatgtagaaatgaaataacagtcattgagaagctcattagctgagtgatgtattagacaaaaagattaggagaaaattagaagaattagattacaagaaaatttagtgaattctagggtgactctaaggaaagcatccttaatatgacacaaggatgaagagaggggaaatacaaacactttgtgagagtaggagacatagaggatagaataagatcttctaacagatgtctaataccagtttcagaggagagaatagaggacaaagctgtaatgactcagaatttttcaaattggttaaaggcatatattcttagcttcatgaaacaactaattccaagcagacgaaatacaaatagccacatctaggcacacagtgatgaaaccattgaatgtcaaataaaatattaaaagtaatcagagataaaaagacaaattacatatatagggattagttttagactgacattagagtgcttataagtaacrgtagatccygagagagtagaatctccagagttgaattaaaatgacccttagcctgtaattgtatactatgttttattattattcaagagtgagaactaagtacagatatttttacataaggcaagactaaaacatttttactgctcacggatttcagatgaaagaactaataaatgaaatgcttcagtaacaaggatattgaatccaaaagcagagaatgggattcaagaagcaatgctgaaaaaggaaatacggcaaatgtgttgataaatttaaataaacgttgagtgtttaaaaaaatggaaatcaactcttagagttctccagagaaacagaaccaataggaggggtgtgtgtatgtgtgtgtgtgtgtgtgtgtaattgatttatacaattatagagtctgataagcctcgagttacagttgacaagctggagacccaggagaactgatagtgtagtcccagttccaggctaaagccctgagaatgagaagagccagtggttgtagttccagtctgaaggccagcaggcttgagacacaggaagagccaaggtttcagttagagttcacagacaggaagcaaactaatgtttcagctccaaggcagaaagaattctgtcttactcagccttttagttctagtcggtccttcaatggattgcataaggcccacccacattagggagggcaatttgttttacccagtttacattcaaattttaatgtcatccagaaataccctcacagacgcacccaaaatgatgtttgggctgggcaaggtcacacatacctgtaatttcagcactttgggaagctgaggcaggtggattgcttgagcccaagagttcaggacctcatggagaatcctgtctctacaaaaaaaaaaaaacaaaaattagctggggttgtggtggcatgcacttgtagtcccagctaccagggagactgagatgggagggtatattgagcctggaaggttgaggctgcagtaagttgagatcacaccactgcactccatcctaggcaacagagcaagaccctgccaaaaaaaaaaaaaaaaaaagaaaaaagaaaagaatgatgtttgaccaaatatctgggtaccccatcgcccagtcaagttgacacataaaatttaacaccgtagagactaattgggaaattgtattacaaacaagattgttgaacaaaaataacagacacaataacatgggaggctgatagaattgtgtaaaaaaagagcagatagactttgaagtaacagtcattgagcagctcattagctgagtgatgtattagagggaggcttcctgattggagtgaatgtatttcaatttatttatatgtaaaacaacaaagatgttactgataaagattatatattgtttaagtttaaacattctttgagagaactactaaagaaatcatcatgcctatgtcctgaatggtattgcctaggttttcttctagggtttttatggttttaggtctaacrtttaagtctttaatccatcttgaattgatttttgtataaggtgtaaggaagggatccagtttcagctttctacatatggctagccagttttcccagcaccatttattaaatagggaatcctttccccattgcttgtttttgtcaggtttgtcaaagatcagatagttgtagatatgcggcgttatttctgagggctctgttctgttccattgatctatatctctgttttggtaccagtaccatgctgttttggttactgtagccttgtagtatagtttgaagtcaggtagtgtgatgcctccagctttgttcttttggcttaggattgacttggcgatgtgggctcttttttggttccatatgaactttaaagtagttttttccaattctgtgaagaaagtcattggtagcttgatggggatggcattgaatctgtaaattaccttgggcagtatggccattttcacgatattgattcttcctacccatgagcatggaatgttcttccatttgtttgtatcctcttttatttccttgagcagtggtttgtagttctccttgaagaggtccttcacatcccttgtaagttggattcctaggtattttattctctttgaagcaattgtgaatgggagttcactcatgatttggctctctgtctgttgttggtgtataagaatgcttgtgatttttgtacattgattttgtatcctgagactttgctgaagttgcttatgagcttaaggagattttgggctgagacaatggagttttctagatatacaatcatgtcgtctgcaaacagggacaatttgactttctcttttcctaattgaataccctttatttccttctcctgcctaattgccctggccagaacttccaacactatgttgaatagcagtggtgagagagggcatccctgtcttgtgccagttttcaaagggaatgcttccagtttttgcccattcagtatgatattggctgtgggtttgtcatagatagctcttattattttgaaatacgtcccatcaatacctaatttattgagagtttttagcatgaagggttgttgaattttgtcaaaggccttttctgcatatattgagataatcatgtggtttttgtctttgtctctgtttatatgctggattacatttattgatttgcatatattgaaccagccttgcatcccagggatgaagcccacttgatcatggtggataagctttttgatgtgctgctggattcgttttgccagtattttattgaggatttttgcatcagtgttcatcaaggatattgattggtctaaaattctcttttttggttgtgtctctgccaggctttggtatcagaatgatgctggcctcataaaatgagttagggaggattccctctttttctattgattggaatagtttcagaaggaatggtaccagctcctccttgtacctctggtagaattcggctgtgaatccatctggtcctggactgtttttggttggtaagctattgattattgccacaatttcagatcctgttattggtctattcagagattcaacttcttcctggtttagtcttgggagagtgtatgtgtcgaggaatttatccatttcttctagattttctagtttatttgcgtagaggtgtttgtagtattctctgatggtagtttgtatttctgtgggatcggtggtgatatcccctttatcattttttattgcgtctatttgattcttctctctttttttctttattagtcttgctagcggtctatctattttgtggatcttttcaaaacaccagctcctggattcattaattttttgaagggctttttgtgtctctatttccttcagttctgctctgattttagttatttcttgccttctgctagcttttgaatgtgtttgctcttgcttttctagttcttttaattgtgatgttagggtgtcaattttggatctttcctgctttctcttgtgggcatttagtgctgtaaatttccctctacacactgctttgaatgcgtcccagagattctggtatgttgtgtctttgttctcgttggtttcaaagaacgtctttatttctgccttcatttcgttatgtacccagtagtcattcaggagcaggttgttcagtttccatgtagttgagcggttttgagtgagattcttaatcctgagttctagtttgattgcactgtggtctgagagatagtttgttataatttctgttcttttacatttgctgaggagagctttacttccaagtatgtggtcatgtctaaaacaccaaaagcaatggcaacaaaacacaaaattgacaaatgggatctaattaaactaaagagcttctgtacagcaaaagaaactaccatcagagtgaacaggcaacctacaaaatgggagaaaattttctcaacctactcatctgacaaagggctaatatccagaatctacagtgaactcaaacaaatttacaagaaaaaaacaaacaaccccatcaaaaagtgggcaaaggatatgaacagacacttctcaaaagaagacatctatgtggccaacagacacatgaaaaaatgctcatcatcactggccatcagagaaatgcaaatcaaaaccacaatgagataccatctcacaccagttagaatggcaatcattaaaaagtcaggaaacaacaggtgctggagatgatgtggagaaataggaacacttttacactgttggtgggactgtaaactagttcaaccattgtggaagtcagtgtggcgattcctcagggatctagaactagaaataccatttgacccagccatcccattactgggtatatacccaaatgactataaatcatgctgctataaagacacatgcacacgtatgtttattgtggcactattcacgatagcaaagacttggaaccaagccaaatgtccaacaatgatagactggattaagaaaatgtggcacatatacaccatggaatactatgcagccataaaaaatgatgagttcgtgtcctttgtagggacatggatgaaattggaaatcatcattctcagtaaactatcgcaagaacaaaaaaacaaacaccgcatattctcactcataggtgggaattgagcaatgagaacacatggacacaggaaggggaacatcacactctggggactgttgtggggtggggggcgggggagggatatcattgggagatatacctaatgctagatgacaagttagtgggtgcagtgcaccagcatggcacatgtatacatatgtaactaacctgcacaatgtgcacatgtaccctaaaacttaaagtataataataaaaaaaaaaaaaaagaaaaagaaatcatcatagaggccaggcacggtagctcatgcttgtaatctcagcactttcggaggccgaggcaggtgaatcacttgagcccaggagtttgagaccagcctggcaacatagtgaaaccccgtctctactaaaaaaaatacaagaaagaaagagagagagagaagggagggacagagggatggagggcagagggacagagggacagacagaaggatggagggagggagagagagagaggtagtcagggagggagagagggagggagggaggggaggaaagggaggaaagatggagggagggtgggagagagagagggagggagagagggaaggaaggaagaaaaggaaggaaggaaggaaaagataggaaggaaggaaagggaggaaaggaagggagggacaaatcaatgtagaatgtattatttccaagagaatagaaggaagggagggagggagggagggatggaaggagaaatcagtgtagaatgtattatatccaagggaataaagggtaataggggaataaagaaaacttaattaactagaaggtagggagaaaagaggagaaagaaagagaatgatcagcagaacacagaaaataagagagtaaaaataagcctgaatgtatcagttgtaatgaatgtaaatgggttaaattcacatttttaaaaaagcttagattgtcaaatttgattttagaaaatccaacaaaatactatttatgaatcactcgtaagacataatgacacaataaagttcaaagtaaagaaatggggaaattagtacaataaaaattaacattagaaaataaaaaactaataacaacaataaaaagaaatggaacactagttatgtgagggaggcagatcctatccaaaagaaaagtgttgcagaagtattaccactaggtcacattaaatttaacagaaaacctttattagagttaaagaaagtcttgactttgccaaaagacatacttaccaagaattcagtgtataacaactgagagtgcaggcacccaacagtatagtctccaaatacagaaagcaagcattggcagaattataaggagaaactgacaactccacagtagtagtagatgattatttcatgtgtagttgaaaaaaaaataacaaggatgcagaagatttggataataccattaaaatcttaacctactagacatatctgaaccttgcagctcaaaagtaggaacttcagttttctgaagacatataaaacattaacaaaaattgatcacatataaaaacacaaggaaagtgaaacaaaccatattaatataaacatcacaaattagaaacagcagaaatccatgtttttaaataacttatgggtcaaagatgaaataatggaaagtgtaaactataaatgaatgataacaaaattgtggcatgtagctaaagcaaaatttagaggaaaaattatagccttgaaaagtatattttaaaataaaaaattgaaaatgaattttataaaaatagtaaaagagtaatgtggcaaactcaaagtgggaacgaggaaataatgatgaaaaaggataaagtcaatgaaattagaagaaatggtacagtaaagaggatcgacagagccaacatttggtctcatgaaaatattagtaaaactaacctctagcaagactgagaaattaaaaaaaaaaagcttatacaaattaatatgagactatctaaagcaaatttattgcagacgtagaagttaggtcagggtggtgagtgcacagatgtttattatatattagttctttatgttaaaaatacttcacaacaaaaagttcataatcttaggcattgtgccttagtccaggcattgctttaacaggtaccaagtctctcctattcttgtgaatctagctccagtgactcatacattcctgctttatacatactttgtagaaaattgtaatcctgttcattgtaatcctggaatggcagaggcaaagtgtgaaatcaacagaatgaatgcctctaccaaaggttgaggagaataggaatcctgtccatgtgtggttaaaaaagccagatgcaaattggccagaggtggtctaggaacagcttccataaaagacacaggctttcttgaggcctcttagctctggccatgacaaggttgtccagtcgcatttacttatctggttgatgttattattcatttctttgagatggcagttcctaagcttcagaatctgtgtgtaaaagtaggtttacattctctggcttgatctgagacaccaacatactttcatgaagcctgagtggaaagagctgtgtgtgtttggcagatacatcctgggtccacagcacaggcagtcacttcctagaggaactttctctgttgcactaaaaagtggtgggttgcaagaagagaaaagacattttgttgaggttaaratgaatgtggactcaatgtatactttttgctgttattccatttaaaacaactgacttcctctggcaagtttcctttcatttgaatagtgtttattcaacatattcagacttttaaaaaaaagtttattgcctatgattcttaatcctgataagcataccactgttctaaaatttatattgtgaggaaaattatgtcatcagtttattttttcttttgatatttcccttttttggctgaaaataaatgactacttttcttatgtcacggagtattgtcccttttctttttttaaaaaacagcctttgttttattattttagccaggagtttgcatatagtttgatatgagatctgtaatttttataggatagcgttcttagtcatggccacttacatattagtgatctcttcctcacatgggttcatgagagttggaatgtaccatgactggggtccatacagagaaggtgctcctattttcttaggcctctgctggcattatgggcaacataaaagaatgtgtctgccattaccatgtggtgactcgagtggcaggccagagagagttccctctagaaggtaatgaaaggtatggacaactgctttggtcccctctgactggccaggccttagaattaggttgggaatactgagtttcccaggcacattatttttttaatactattgctgctgtaatcttttcttttataagaagatgattcattgtttcctattcccgatatttttaccacttatcagtggtaattgctttcagaaataattgagtccaaccctatggtttgtatgaagtaaatacctaagtttgatttgattcttactattacttgaacttagcaaaatagtgctttagctgtcttctctagagaccacacaagaacactttatttcggtagtcagcttaaataatattttcactttctacagatagcaatgggcattaaacttgggaagctatgtaacttgccaaggttgcagagccagttgtagagatagggctggataggatagctgggtgatgctcttttggagattccatatgaccttttcacttgcagtgcaaacacgtgttcacaaatggctaagtacataagtgttgctataagcatgtagttatatgactaacagtgggcagtaattaaaataatcatgcttcattttttctttgcagacccaatactatttttaagtgaataagatgtaatttccttatttatttccacagtatttactaacatttttttctttttttttttgagacagagtctcgctccgttgcccaggctggagtgcagtggctcgatcactgctcactgcaacctccgcctcccgggttcatgccattctcctgcctcagcctcccgagtagctgggactacaggcgcccaccaccacaccctgctaattttttgcatttttagtagagacggggtttcaccttgttagccaggatggtcttgatctcctgacctcaagatccacccgcctcggcctcccaaagtgctgggattacagacgtgagccaccgcgcctggccactaacatttatcttatgtatcagtgttcttatagtatagagcttgataaagaacataatcttaaaagaaaacaagttagacccgaaattatctcagaacttgaatgatgataattagataattattcagtatgcattttaatttgtgcttgtgtggatcagaccataagccattttgctaaattgtggtgaataattccactggaggccttgaaataatcgatacctaggcaacacgtgacttagcttcagcctagagacctgcccttctcccatgcattaaaaggaattctggctactgtggctgccacatgcctagtgagcagcgaggtcaggatctcctaccttgctttccaaaggatgtcacttgctatagcaccttcatcagatgcctcccttagtgccccctcttcttctatagcagttcccttggggttcaacttaatttgcaagttgaggcatattttgggtggaaaacttgtgtgtgtgtgtctctctctgtatatattttccttatttaagattctctcaattcagtcagttttacctactttcctcacttgtggaatggagataggattttatggcagttgatgagaattattttggaaaggtttagaattagaagattctttcatggctgaaagccattttaattgatataattaaagcatatgtatatgaagagtttagtgaagacaggtcagattcaaagacttcagatctgacctgtcttcattaaactcttcatatacatatgcttggttataaaataactacctgcaaaaggtaaatattttctgatttttttttttttaccccaaatgggcttttcggaagcttatttatctacaaaagagacatatgctttaggtctgtacttgttaatttaccttggaaaaattaggtcatcatcaaatctggtagtgtggcttataaacttggcaaaatggtctaattaaaagcttctgttagattatagaaaaaggaaaaaatgattaatgccagtcatatttttgttttcatggtttgtgtatatgtagatatatgtcactcctcatgttgcattaaaagtatgttgactatctgctaacagttcatctcttttcttctacagcctccaagtctattataaatagtatgctacgggacccttctcagattccagatggagttctagcaaatcaggtctaycaggtattaatcacagctgtctattttcagtggcaatgctgttatctgcctagcagagtaaaggattttaaacctcatttaattactgtcatcataaactatcactgaggtcagggtgcaccataaatggcartgcagtatttgcgagaagagcatttcactttttaatagcttgcttttatagtgaataaaaagcatgcaatttttgttttctgtgattaaatccgaaccgccttttgatagctttctttttttggggggcgggggtgggggaagaaaagtaattactgcttttaggatattgtttactgtaatagtttttgtagccgccccaccccagaccccttttcttatttgtctgcagtgcattgtgaacgactgctgttacggaccactagtggactgcatcaagcagtatcctttcccataaaattttaggtgcgcaaytgacgagcttagactcagtggagatgtgtctagctttaacctgacataaagttctgcttcacaaaacacatttcatactcttctattttacattcaatcaactggagggtcactacagaccattcttttctacagcttaagaaatatcaggtagaccacaggaagatgtcagttcagcagtcacacattcacatgcttctttcaaactgcctggttttcaatgagtttacaggtacagagtcattaggcaggtaacgtaatgtcttggaatgtatctacccatcccagtaaacattttttaaaaatataacaaatttccatttaaaatgagccaaattttgttgaatttacgagaataaatttagagcctggagttaaaggaggttgtgattaaaatgcttccagagacatcacattttaaaggcaacagattcttattgcttaaatgctgattacaatctgagccggcatttggattcctaataaacatttttagagaaatcaagttaatttttcctcctggaatacatttaaggttgtgaaaacagatgtccagtcacttttcattaaagacattgagattactaaagagttaatgttcactttttaaaacaagattgaacagacagtaactacataaagtaggacattattaatcaataaatttagtagtactgtggcaacagcaaggtttttgataatcctcaaaggtgctatttaaatggtaaataatgagtaatttttatgagaataatttctatccgagtccatgaatttcacccctcttaataatataaacatgtccctcctggtatggattttgttagcatggatggcactgtgatgaattgtgactcagtaattactagttaggaggctttttgttggaaactcctgctagtcaaatcgtgtacatgtatgtgtttatattccaccttctttcacaaaggcttagagtcgtaacatttttaataagaaaatcatgcctatataagtaaagttaatctttgatgaataacctttgaacagagccctcttacaagaatattcagtattgaagatacagccctttatgtatttctcctccaagtctgtttctccagtctagcttaaattagtaaaaacacacagcattatcccaagctcacctttttattaaaccaaagtgaaattgtacttctatattcagtataaaattaatgatagtgttagaaactgtaggagtaccaaccttaygttgctaacactgagaaagtttagcacattcatatatcaactaacaccatctcagagtatctggggttgaattacatgttaattttaaagcacataaaatagttaaaaatcaatttaaagttaaggttttaaaagcataatgtcttttgaaggattgcatattgattttaaatataactatctaattatgtatgcacggactaaagtatgaagtcaactgctttgtaaatgccaggaggctatttttcagtaatagttgagatgcttacgggaaactagattgctgtattgctggtgaagaaaatggcttgtgaggttatttacaagttttgcccatggtcactgccatacatcaataataggtattattatagacaaagtctaagtgtttttgcttatacagcattataaattctgtctggagtattttccttacatttttgccaccattcactttccttttttggttgtgttattgccagtagaatttaatgtagtacatgatttcaattgataaagataatgacgtatgtctataaattacattcaccgactaggttataatttttgcagtttcattatgtctgttgccagtaaaactacagattttataagttttattttctagactttgcatttcatatatgtttatatcaagcaaagcataattaagaaacatatctttccaaaatttcaamttggtgattgcttttgtcatgcaaaataaaacaggctgggaagtttacagagaaactgatgttgtctctgcattgaagtagtagcagtttcatataatgtataaatgcacttgcatagatgtttcctagactgatcagcataattattttatttcacactgaataaaaattattgtttttccatgtgagtaaatgtgctgtttgtttttctgatagtttagtaatatttacattgcttactctcagtaaattacatcatgatgtgagaaagaaagcacacattcagtaaataagataggtgctaaaccttcttagtgccttatgaaaatgttatgtttgtgtaagtagaataaagtaagttggtcatttactagtaagacatcacagaaagcacagttagcaaagagtatatacatcatcattgtgctttctctttttttttgttatctactgtattttttcctatgcagccatgcccacctacacctttcccaccacagcttatactcaccaaggaaaaaatgtgagaaaccagccacctcaactttccaaagtgtgactccaggacacagctattagacaaaagcataaactatgaagcaaggaaaggtaatgatgcaggaagcttcaaatgctgtgggtttcatttctgtaccatcagagacctcagtttcatgattcaacattttagatgtaaataatttacaacaataaaaatgagagcacatttatgtggaatagaagtaaataatttagttctaaagtgtgggatgcccctagtaatgagagaccattgagagttattcatcaaatgtcttcaatggactctgaaaatttgtgaaattttgtgatttaaaaatgtgttcctttattttgtttctctttagaaatttaaaaagcacagccatgtgccttggaaggcaagggacaactggaggaaaaggcaataatgatgacttagggcatgttttgctggaacataaatggccacatctcttgaattctaagatttaaaccatattcacctgtatgtattggtaaaatgcaagataattctctaggaattttttttttaataaataacgaagttttatttaagttgaactcgtgcagtgcatgatcagaatcagcttctctggtaagccaaggagtgacgtgaccaggttgacgttatcagtgaaaaggacaatgaaggtaatgattcacataattattaccaratgcaaatgcttttgagtcagttgaaatactagactaggataacactccttttcagactttgggcaatctcatctgtttggaaaatacacagcacttccatgttctgctcctgatttcattatttaccagccaygggaccttcagcaaattccccagcctccctgaactttactttccttaattgtaaaaatgtgactaaaaggctgggtgcagtggctcacacctgtaatttcagcactttgggaggctgagatgggcagatcacttgaagttaggagtttgagaccagcgtggcctacatggtaaaactccatctgtactaaaaacacaaaaattagctgggcgtggtcacaggcacctgtaattccagctactctggaggctgaggctgaagaattgcttgaacccaggagacagaggttgcagtgagctgagattgtgccactgcactccagcctgggcaagaccaagagtccatctcaaaaaaaaaaagaggcgggggactaataatagtatctacttgtgtggctattataagatggtatctcaaagtatttagtacaaagtcttcatacattatatttaagaaatattagctattatcaattattccataattttaatactttttgagaagctatatggaggtcataaacatagacttgacagggatcttgttgttatcttatttgccactcattaactatatgccctgtgcaggttccttctaggcctcggttttctcatctataaaataaggattgtaattatgaggataaaataacatcctaaaggcacttaacacagtgcctaccacatagtaagcactgaaaaaatatatattcatatgtatatctatttagatacatgtacatgcatacgcatacacacacgagaaaaagactcttgaaacagcctctgtacccacaccctaatccacaactctttactaagatgtctttcctgcagattacatatattcttaacaagttacttgtttggcttgccagtggcaaaagttcaacaacagtcgactggaagtgaaacaaagaagtttctaaatgttggcctgatgacaaatgtgaattcacagaagatttacagaattctctaagattaggaattcttctagggcaaagactgcctagtattctttactgtacctattaagtgcttaataaatgtatgctaaattgagttgagggattttaatttaaaaatttttttagaattttttttaagagcgggagccttgctaccttacccaactggcctcaagtgatccttccacctcggcctccagagtggctggggttataggcgcaagccaccttgcccagctgaattggaagatttttaacacagattaaagtacatttaaaatgactctccttcttttcaaaatacaagcacacatccatttacaaatctttgtttgccaaaatatatataaaaattatagaaaatgctggacacagtggctcatgcctgtaatcccagcactttgagagactgaggtcggagaatcacttgagcctaggagtttgagaccagcctgagcaacatagtgcgattccatttctaaaaaaaaaaaaaaaaaaaaaaaaattacccaggcgtggtgggtggtacacccctgtagtccctgctacccaggaggctgaggtgggaggattgcttgagcccaggagttcaaggttatagtgagctatgattgtgccactgctctccagcctgggcaacagagcaggaccctgtctctattaaaaaaaaaaaggttttaaaaaattatagaaaaattctatccaattatttaaatgaggggatgtgtgtagagatttcattcctccaagatgtggactaagggtgaaaatggctgctcaaagtatagacctggtattagcrttttcctgctggtataattctgcctgtgttacccccttaactgaaacttcccagtgccattggtcatgagcatgaggtcctgctgagagacttgcttctagagaaaaacctgtccttcctaggtaagtattattcacatcttctctagcttgtgttgtctccctgagtgcttaaatatatattttaaaaatcttccactaaaggaagagtgaatgatgattgatgctgtgcatattatcttttattgatttggaactgagcaggaactcagttacctaatctcctatatatacagcacatgcacaagcttgcaattaatattttatagaataagtggctgaaaaaatgctttaatatctgttgcagtattacttttggtgtcatgagatattaaccataatctagcccttatgagaaaaggaaacaaaagaaatattgtctataaaatgttttatatattaaaaagaacagttagaaaaattcatgttgggtatatttgtctcatatatggaactgggtagtacttttacttgaaagcaaaatattaagcctttattttcatgccaaacgttcattggcatcatggatttattatgattttttaaaaatcccacatgtattcatgtgtttgtgtattacagattatttctttcaacatctcttaagcattagaaattaagcctcaaaggamtatacatataataagtgatcacagaaaccataaagcactctacaatgaattaatttctcttctccactttaaatatggtaatttgtaaaggtttcatacaagtcattttwttattatacagrtctgttttatatagatattgaagagtctgcatgatgtttattttaggacatacacaaaaaatagaacaacattggattacataaggttttttccaaaatgggcaaagaattggcccaaaccaaatgcagagaaatgtcaaataaggaagagatgtttaataaagtcctacaaagaatctattccaaatcttaatgttcaatgtttttattaataaactgtagaataaaattgaatgtattataagattgttttaatttgaagcttggagatatcataaatattccctagttaggcttaaataaagttgattaattaagcaagtgttctcaagtcactaaattaaatttcagtatgtagaagcagcaaggtttttcatatggggacagttgaattgttcagcctatggaaagatggtaagttggaagaaatcaccttttaaaagtctaatcaaaaggaaaatacgtaatagttcagaaccagttggaatgagtgacctgtgatgcactatgagatatgttttggaaccaggtagttctgatagtattgtgaaacatccgatcacattgattactcagatagaggcctatatgtcatggccaagtctattttttgttttgttttaagccaccaactaagcagcatcattgtcagagctgcttagcaccactctctgggcaccatcagcctgtggacagtcaggccttcagccccatttttttgtttggcctaacttttctctgcttccttcttgagaactagccaatcccagctgggaaaaaaagcaaaggttgtagatgtgggctaaacttagtcctagtcctcaacttacttgaacttgaacgtgttaaattagattcaccatggctgacaaaagcaatgtaaaaatgtggtctggggatcatctctacttgcaaacaagtacagaaagggaacttgaaattgatgggtctcatctgttcctctgtgctgtagaatctagaggtaattattttatggaagcatactcaaacaggatatttaattgatctttaaaaataaatgaaatataggaagtttatgcaacctgagtcctgttttaaagcatttcctcatcaacctataaagaagttgttaattctttgtatttttaatgtagcactgaattaacatatgtttgtggttgaaaaatgaaaattgaaagctttgtatgaaatattgttatggggctgttgtccttttaccttataaataccccttcacagagattaattagatttaaagtgttgtgacaggtaaatttagatagatcattttaaagccaactatggaaaaaatattggtaaataaacagaccactaatcttagtctttcttgtttacatgtgtacaccttgaattttgttgcagagatgttgcaaacatgtttaatttattttgatcctttgctaagctgaagtaaaatctctctctctctctgttggcttctaatttggactgcattcaaaagacaaatattcttatcttttaatatattaacccttcttaatttaagaattatgactttccctaaaatattttaccccattctaaatttgccacacattgtgctctatatttgttttataaaatgcatattttatctttactcttaacaattgaagggaaaaataaattactaattctttcttaaatgtccttggttcataactacatcctgagcagttgttatggcacaagatctagccaggaactataggaaagaaaaacagaagtgttgttatcattgaagatttgaatgtactgataggagttcatcctatcttttaaacttatccaatttgtacttccacacataagtatattgtattaagacaggtcaaagttgaataaatgactttagtttctccaactagaaaatatttttcatgtgcatatttattcatttattccacaaataagttactaagttggatactgttttagacactagataagtcagatgaagtgtctgctttcatggggttatggtccagtagggagacaagctaccaatgaacacagataatttctaacagtttctgagagtccatgtaattcttcccttcattatttattcattcttttcaattaacttttgttgtgttctctgcatgccaggaactacactagttagtacaaagtgattgattataagcactctgtgctcccagtgctcatagtcaagcaccgtattgcatgtgtgatccaatgagaatgcagttttctctctgatccagtgagaatccagtgagaatgcatctcacttagtaggtgctcacatgattgtctcgataatgaaaataaaaactcaaggctgttaggttacttycattaaacctttcaaagaaaggtacaaattatactcaacatcaatcactatcctttatgaatgaagaaaatgctgctgcctcatgagctgctttttcctgaaatagtgatggaattttacttattcatttgttctttctcaccgggaccttcctgccacagtatatatctaggatggccagttgagctcataaggttggctctattgccagtagctaactactcttaagcctgctgtgggcagacaccattaagaattttaaagaaccaaactttttttttttaagttcatgcaaacgtggagccttctgggaaaactgaagataagtttcagtacatgttagcagttctttccaaggataattaatttagaattaatattttttggccgtatctcagtactttgggaggctgaggcaggaggatcacatgaggccaggattcaagaccagcctgggcaatatagggagatcttgtctctacacaaaattttttaaaattttgtggtggtaggcacctgtagtaccagctacttgggaggccaaagtggcaggatcacttaagccttkgagttcaagtttacagtgaactgtggtcattccactgcattccagcttgggtgacagagtgagaccctgtctctaactaaaataggtaggtaggtaggtaggtagatagatagatagataggtagatagatagatagatagatagatagatagatagatagatagatagatagatatgagcatttaaagtctcaaaaggtgtgacgaacttgctgcctactcctaggcttagctgtacaaaaaactcctcaacgttaaattgaaccataagcattgtgatcatcccattacctctgctaagggttcactcttagcagacaaaatagaaaatgtatttcatctactggtagagacatgttaactagtatctctcaagtgattaatgagaccgtattttgctgtgtttttttgtgtgttttttttagcagctttggacaaaaagacaggaaaggaaaagaaaatagtgacaatgcaaagacaacaagacagtttaccctgttagctaaaatatgaaagagcgcatacaaaagactgaagataaaccatccatcttttatgggttggcatatctccaggttggagggacttccgttagtgactgccacagccactgtctggtgcaaattcttgttaagtctggcctaataagaatggttctggagatattttattctttccagtgaatgtttccctgttagtagatgctaacaattattttgagtgacacctgggaggcatttgctgtgcccctgcctcaccctcgcccccatgtttggacaaaccagcaaattttacaggggtgcttgtgtagcatttgtgtattactctgtgggactctgagagagtataatctgtaaagccaaataggcttagtgaaggatgtcccttgtcgtaagaaattaggatctttgtttctaagagttcatctgcccctgctgctttattcctcacctgaagcaataatactctgctggggaggtgattatgatgtgacaaacaggggattatgacttcaggtgaaggacaggcagcaggagcagatgagatttagaataccaagactgtgtgtacacgcagatgtcagtggcagagagtaagagaccagaaatggaacatacgattatgtaggctgaagggaatggagatggctgggtatttcataaggaatccaccatttaaattcttgtctatccgaaggttaaaaatatgatgctgtttttagagtaacaggaacatgaaattgagggtgggaggtgggggatttgggctctgttctcccctttctgaagagattgtcatggtgagagactttcttacttactccccttattgaatgtgcttgtgcacgcttctccctggcactgagaaaaggaccataaatgcatatgctgctggaagatgaaatgctttctggatgtttgttttcttatcggctgaatttgagattcagctccctggaactttgaagaaaggttgttgtgaccacttacgatggtgtgctccctgctcctggccctccctcaccactgctcttggtagttagctcatgtccacgggtcatctgcttttgggtcactaatgatttattggaactattttggttgtaagtggcagaaatccaatcaaactagattatatacacaaaaaaggagaatttattggcttaaatatacactggggaagtccagaggagagatttgcttctgctgtgtctcttaataggatccagaaggcaaaacaatatcattaatatcttttgtcctttttgggttctgctcttttctgtgttggctttattcttagctcacaaggtcacaaagatgattgctggtgattgccagtttgtttaatccttagagtttataatcccagagcaaagtcagtgattctcttttgccacataacaaatctcagaaagggccaggtgcagtggctcatacctgtaatcccagcactttgggaggctgaggtgggaggattgcttgagcccaggagtttgagaccagactgggcaacatagcaagactccccgccactcccccaacgtccactctacaaaaaataaaaaacagccaggtgtggtggtgcacgcctgttgtcccagctactggggaggctgagatgggagaattgcttgagcctgggagatcaaggctgcagtgagccatgatggcacctctgcactccagcctgggcaatagagtgagaccctgtctcaaatatatatatatatcagatatatatatatcagaaagggatatatatatctgatagatctatcagatatatacatatatcagatagatctatcagatatatacatatatcagatagatctatcagatatatacatatatcagatagatctatcatatatatatatatcagatatatatatatatgatatacatatatatcagatatatatatatcagaaagggatctgatcagctagtctgtgtccagccctatggcggggtgatttggggtcacattactgcccactcatgagaatcacattgtgagagtagggtagcaatgccggacaggataacatacaggacagcagaataaaaaatctccctctccctgcagaaaattaactacaggctagggttttgctcaccataaccaaaggcaytgggggtcaaacacgttactgtgattgctgaattgaatcctttggtcctgtgcatgggtgcactggctcacactcacccatgtgcacatctgtctgtgtaggagatcctttttgtgtctcagaactgctagtatgcctctctccattgagattggttcggcgacacatggagctggcccagcaagaggttctaacatcagtgactacagctaaaaagaaccagggcagacaaaggctaacagtcaatctttcctctgaatcttggaattggaaagggctctagtgactgtccaatccacttgttttgattaaataaattgtcctttggccttgcatcacagctactaccctccctacaacctgtcctgtatctttttattctactatgttgatttgtcccttcatctacaacgaaaaggatttagcatgatctggtataaaatataggagaattttactttctttgctcatattcgtgtcctctgcctttccacagctaccagttgcctacctagcctctccacactgtcccagcttcttcacctccccttttttttctataaggcacttcarttttcactagtattatcccctaaagacataagcaaaggacaaggtcagagcagtcagttgtattccttgttagtggctttgataagaggctttgggggaagaggttgaaactaacggctataatgaagttttgggttctctaaagatttcatttatcggtgctattggtctccccattaaatgcatgcctgttctgtgtacctttgcacacagtttgcataacatataatatttattactgaaaccttgcaaacttcttaaattgtatagaaaaggctgtgaaacttactcttagagaacataaaaatatagagaatgaaggtcataactccaaatattgagtgatacagtgttttgaaaaaaaaaaaaccagaataaaacaaaattagttactagagtagaaaaaatwtagttttaatatgtattgatacatgtctttttgccctcccccaatttagtaaagatgcactaggtgttaataatattcttcttatcatacagtgtattttaatctagcattttagaaaactttttacaagttcatagrtaaaagccctgtcagaatgtgacttttcattttcagatgttgtgaactggatttctgcatgatttttatggaaatgactatacttttaaaatgtaaaacttttaataaaacaaaacaaatttaaagccctcaaaccttttcttggtggacctcatgtccccctgtgattcttaagtatatgttaactagtttcagatgtgttttgttcgctgactcaaaatcagctctttattttaagaaaagaaattgtgtaattagtacttaattgctttggatattttgggcatttggagaagagggtaattcaaaggccagagaaattaaactttcagaatgttctttatgcgtctgtaatttctttttaaaaaatgccctctaaagacagtcctgacaacttaaaaatgaatgaagacctgggttgtttttaaaaattaacatcatctttggatgtggttttattgatttatttaagataaattggagagaggaccattgaagtgctagaaaacaagatactatctagttcatctccttttcaggcaggtgttgtctaaatagctcacagatggcagtcttcttctcttacatttcaagatcttccaagatgaaaataaatttttccccactttaaaaatattacatttgatcaaatttaaatatttgcataattaagaatggtatatggtctgctgggaccaactgcaacttggttgacatgggcacatatcctgtatctgcagtgatttgagaggtctaggtcttgtttggtcatttaacttctctaggccagttatattgtgtataaattggaatgttggactagtaatctctacaattttgctagttcagaaaagtttctgaggcaaccattatctaaaaatctatgttttgtgaatctgaaggttaacaggtctgcttttaagtgataatattcctatattaattttgataatgagcacttgaactatgacattaatgaacttaatggttataaaatatattgggtttttaaatatataccttaaascagaagacccttactttgtatctactgtagttgctgaataagacacataggaaggatttgaagattggtttcatattgattcccaaccatttgtggaagtcatactaaaagtactatttcagattattgccattacctttttttcattctaactaatattatttttactttgttcttaatctttatcatttttttcttgaagaaaacatcttatattactgttgaagaaacagtgaaacttgaagaaacagtttatgttacttaaacatctagtttccacttagaaaattcaaagaatcataagtaactacttggctcaaacatatgcagttttataagagcctgtatgaaatgtgtgattctcaaggaaaacataaattgtaaaactgactataaaagagatatatatatcaacagatcagtagccaaagaaaaaacagttgcccacccaacaatggcaccaggcacagattgggttttgtggaggaattctactaaaatgttaaggagtggataggtccagtgttatttaaaatacttgaggccaggcatggtggctcatgcctgtaatcccaccactttgggaggccgaggcaggcagattatttgaggtcaggagtttaagaccagcttggccaacatggggaaaccttgtctctactaaaaatacaaaaattagtcaggcatagtggcatgcacctgtaatcccagctacttgaaaggctgaggcagaagaatcacttgaacccaagagacgaaggttgcagtgagacgagatcgcgccactgcactcccacatgggcgacagagcaagacttcatctcaaaaaaaaaaacaaaaaaaaaggttgacttcaaagaaaaattttcccatcagtattaaggaaagagatgctgtcttttttacaaaattgagatgaacctcagatgaacatgtagaacagacagttgggaccaaggatgaaagataacagtgagagttctccaataaaaccttgaactttgagcctagttggtgcctttgtgccttgttgataattagggaattaaattaagaaaggaaattattgtcagtctggataggctttgtaaagacatggatactgttaaacgtgtacttgtattttactcattcatcttttgggggcattaagtgtcctggggcctagaacagtgaacaaggccacctgtttcgaaatgctgcttcctaccctggtaccatcatttcatctgaactttgccaagttgttacctcgtcctttcttagatctaggatgaaggaagcaagccaaaggttgaaacagaggagatgggacagtcagagtttagtaaatagattaaaggaagaagatacccaatacacagcattttacatgtttggcataacctctttactataaaaactagaagtctaatatcaccaatggtgacaaagacttccagatgctatcctttggctacaattattactgaatcagcttcatgttgagagagaaagagtgagagggagggagaaagagagacaggggtgtgtgtatgtgagagagagaaagagagagagcgagccagttgtagtttgttgaagttcaccacaaaaagatgggaaggatccccagccacacttgatgttttgtgtttaagttttgaggtttgggattgttaattttcatattaagtcacccatgcaatttaaattgtagatattatgttagtaattttggtgcagtgaacaggagtgcagcatctgtcttttaaagggatttttatgtgtgcatttggattgcttggtgacctttgaaattttgttttgcactgttatcmgaaacgtaatcatttttctttctgaagcagattttaacatctgaaaaggttgatgaagctaggatagttttagtgaaatattaatctatctttttcaatgtcaccattgcttttaaaactgttcatcagctaccggaaacatcagcttaaggcactggagttgattttaattaaatattctcattgtggtcagagtatagttacagaacagaaacttgtccaatcttcttcatctacagctcactttccaaattctcttgtttttaaagtcatattatttcaatctgtatttctttatctcaatagttaacttgagattttttatatttcaaggaggggagattgttctgaatactggcaccaatccttcaaaatctagacagcttaaggatattgacttttaacaaaatttaacttaaatgtctactttaaatatgtgtcttgtcattaaaaggttatttacatttaaaatgctgacctttcaagttgtgcacaagagtgttctaaaacagagtttctgaacattggccatgaaaccactgtcttgggctgacaaatggattggaaataagctacccaacactgggaatgggccattaattttaatcaaaggtgatgcaggaaggcgaatgggatgcatgacaatgtcaacagcccagtaggtgttaagagaccacacagccttccttgttacttggtcgggccattagttgaggttgggtgaagacagaaagccatgtctggaattgaatgaccaggtcactccaaaatctaatggagaactccccatttcagaaatcacattgtactgccattagaagtcaaggacagcatttagaaaatattggtggatttttttttttttttttttaaacaatcacctttctagtttttcccaactttgtcaagcttcctgttttcctgccttctttccttcctaatagatcattgatatttacaggggactaagaaatcaaacagacttaggaaaaaaaatcttaaagccttaaaattgcttttcagaattacatattgttataaaactcaggtaaatgtcagaaacaatagcataccaaaggaattaagcaggataactaattctttatggcgatctcattgtccttgtctctttcttgtgtgtgggaatagtttcactaattgaaactaaactttcgtaattgctttattgaaggcattttttcataactgtgaaggccactgtgcttgcccctttactataaattttcaatactggctgataacatttgtaattttcacagtggtgaaagcctttattttaaatcagtaagtatattaccttattttgagtactttcaattacaaaaaaggtagtatatgacagcttgaactcgtgatgtttataataacgaaaacatgcagaaaaataatgaaagaagcatatctgaagcatatttacgcttcagtgttgttcagaaagttcattatttctgacacagcactgcatgcataagaaagatatgtatgactacagtagtaatttttatacatatttaagaaataaaaacaaatatattcctatcttgttaattgaatagtgttttaagtwaatagtgtttgttcttcctgtagatgaagatcagcttcgtgcaaagggttatgacaaaacaccagacttcattttacaagtaccagttggtaagttctttaactctgttatgcatttgtttttagagaaaagggatgtattttttaatttttttatgttaatattagctttataatattataaatgggtggataattggaaaatgttacttttaaacagcagaaaataataggttcagaagaaatctgtcttaaaatcttttgcatatattgagaaataaacatgttttctaaagatattttggttgtcattttcaacttatttctctaaatttcaaattccttaaacatagatctcttgaaaagccagactcattttggtctgcttgacatggcacttgtcgagttatacaggcagtctgagaactaggaaagggagttttgaagaatataatgaaaatcaaagggatatgattgtcacataaatgttctttgtaatgaacatatacagtgtgttgttttgtaattacatttatagatgatggtaagggctaagcctgtgctcattaatgtgaagcatagagaggcctgtacagagttcagaattttcaatcttcccctcccttctccgtrtattagtaatgctttgtcccttagctgtagaagggcacataattcactggattgaaagcaaagcctcatttggtgatgaatgtagccaccacgcctacctgcatgaccagttctggagctactggaataggtaaggtctcattatttttcttttaagataaacgatactcagctgaaatctcattagaaaaaaatattttgtttagctggtaaaaatgctagtagccgttgtttctagtaaatacagagttttgattaatgtattcatttcagataatttaaacttctctgctttcataatgttgcttcattttttaaaactaaaaatctctgcataaggtcaaaattagtatatattccatttttcattcattttacaataatattggtgtcacttaaaatacagataataagatgtggtgtatattacagtattgacactgaacttttatccttttgatgtgaaatttatgcttactcagaccttaaaataatttatcctcagctctctgaggaaagtagccaaatgatatgaaagatggaaataatacaccttccaagaatagagaatagtttacctaccaactcatattaacgttcccaaagacatggaaatctcagcgttaagaaaggagtgggagggtcttattttactgtttatctaccacatgtccgggaagttacttttgtccccattttacagataactaagctgatagagaaaatgatgtgctgtagagctagttatcatggggctgcatttatctctcactcccaaatctgtgtgatttccagcacaaccctattgtcatttacaatacaaccttccaaactttggctttttctattattgcagtcccgtgttcacactacatgttttttcccccttagaacaggaatgccagccaacagtaagaatacaataataaaatgacattggctcagatccttaaggaatgagacagtagcatctgtgggtaatagccttgtcctagggtaaaaacagtgaccagctacagaatttggcattatattgttactcagctttacaaaaggccagtggacctcgcctgtggcagctgtgctaaactaagcccactttttgccatggtaacaatgatcatgacaaaatgctgaatgtaatagctttcttgattttcttgtgtaattgtgcgtggcatccgagctttactttacagggatggaggaggaaagtgcaaaatgttttagaaatcaatgctgtttcagcgtttcctgtgttttattcagccattattcaaattagcagtaatgtggcaaattgaattttagatttttagcaattttatgatgagtttgaaatagtaaagaaagcatcatttttggaagtatagggaaagcaatgacaggaaaatcaaattgcataagtttaggttgctaaagtattttaaaaaaaactgataagctcaatcagtagggaggcagactgtttccccagctttggtaccagtcatatcttttctaaggaaaaattacaaaccaaatcccaaatactagagcttacttcaaaattccaaattattatctttcttctaaaacaactcaattatttattgaatacctactgtgtacttaacattcaccatttagaggctgattaaataatctagtcacctagatgatagatttagggattattgacatgcctggaggatgtctgtgtgatagataatttaatacaatttcctttggattttatatcactttgttgcattctasttttacccttctggtgatgttttacttagactactattgatttacattccctgagcacattgtttgaatatatactggctaagtgagcataattcatttagggcatgatgtgtgatacgggaatgttagccttggttttaaatggtccagatcatttaaggagtaaacgtcacagaagtcactgatgttaccaaaggtctgcagagaggccaagaaatgcaagttcaaaaaggaacatttagtgcccaggtttgaaatggaactttggggtatttacttatatataaaatttgtaacatatgataatgatacaagctgaccggtgatagagtattttgacagaaggagaacttaccccatttgtgaatgtatgggatcctcctcttctcgcattttgcctcaacacaactcatgtatattagcaattgctaaagttcttcagcatataactttagcagcttctaaagttcttcagaattggaagaaattctctcccacctgtaggtagcctttcaaggaggctattggttagaaattgggctttttgctttattcatgtgataagcctctagtttatataaaaaccaatattacctaattgtcccactattttcagattaaagattggattttacaataagactgttcaattactatttatagactaatgctttttttttttttttttttttttgagatggagtctcactctgtcatccagggtggagtgcagtagtgtgatatcggctcactgaaacctccgcctcccgggttcaagtgattctcctgcctcagcctcccaagtagctgggattacaggtgcctcacaccactcccggctaatttttgtgtttttagtagacagggggttttaccatgttggtcagtctggtctcgaactcctgacctcatgatccaccttccttggtctcccaaagtgctgggatcacaggcgtgagccactgcacctggcctagactaatgcttttgtataaatccatttcccacacaaataactacagagccaccaatttttagattaacatttctataagagttttcttttatagtaaattgatattcttactcagcttaactaaccttgaaaacatttaaattttacaatgtagtcatcttccccaaaatcagtgctactgagtaaagaacataagcagccgttcctacaagcacatctccatcccaagacccagttatgaaccttggttaaacaactactcaaaactctgtagtctctacttctacagagttaaaggagataaagaatgcctctgggaagcatttggaccataaatataaccccaaattatataaggctaccagaaaatacatttccttatgaaatcaacacacaaaaagtcttctaatcctatttcgctaatcaaaaggtgagttctttgacaatttggcatctattactaagtatacttttatactgagatgatgacttataaagaaagaaaccaattctaccagtctaaggtcagattacatatatggtctctaatgtgtgacctttcaaagaggcagggatagacacattgtccttacttttggtggtttgagataaagtgggtcagtttgaatgaaaatattgagtgaccttaaatgacagagaaagagccatatgctataaagcacatgaacagtgaccaacaaccactgatcaagaacatggaaattgcaactgcaagtttcagcccctccatctgccattccagtcacattctggcacgttctcattrgagacatctctttaaaaccaaagtgcactttgttgatatacctctctgcttctctcaaagaaaatctaagcttcttggctggaacaaatggggcaaaatttgttttttcaatttagtgatccttgaagtaatgggaggaatattgggtttgaatccagagtatgccactttctggtcccatgactgggagcaacttactgtgttttctcctcaataaaatggactgagtaaaaccttttttgccctattactctgaagatcagttatttaatatatgcaaagcactttcacagtgcctggcagtcaaaaaaatattagttcccctctgcctgtttttctgtataccactgatgaagtttagaagtcttccgactagacatttttaattgccttctttgccacataaactactcagctaatttcagcactcagcttggctgacatctctttgagaaaccttcctgccttctaggattgggtttgatgcgcctcctgcgttttgctaataatttcgtaacatctatcaaacatgtcatcgcttgtttacttgtcaacctcctccaattaatgttgagttccatcttatctactggttttatccatctttggttgtccagaatctggcatatagtaggtgatagtagatatttattgattgtatttactgatgtctgacagacaataatgttttgaatcggccattgaggaatttgtcaggcattgtgacattaagccttagtacaatcaaatttttttctttgagaattcaactcgaaggatagtgaggaaaatgcctgatttttctgaaaaacttttacgcacttttcaaatgtgtagacttttgcagtcctatttcatgaaatagagcataaatgtatttaacataaagatttttaaaaacagaaaataactgagaactaaatgacaaatgcactttataaaggtttttagataaatatgtataatcttatgttggtcggttgctttcccaaaacttcagacagttctctcatttgaaatttgacatagaataccgtgaaaattctaagcagaggataaactctagtttctttaagggttgcatgaaactgggcctggagcaagagtacaaatggagccttatatactatgtgtctaaatatgtaaagttacatatnaagttaacagaccttaaataaaatatattctattctacatgaagagctgaaagtttagawttgcataagaattcctagattccttggatttccaggctccgtgtgtcagtgcagggagaggtggtcccactgcacagcctgccttccttttcttcccaccctcagctccatcctacacctggaaaggtgtcaagcacatgcccagcctgcatatccaagctccacgtacattcccatgaaccactgctctcaggccagagttgcacactctggttgtctgccctcttatcaggtgaatgaacctgaaagggccctccaggccctgggaatggtcttggggctataagatcaggaagttctgaggtcactgatacctggaatgtggcctagaaactggttgagggaacaggtgtcagatggggatgtttccttggccccataaactccttacttcatggattcagatataactagacaggggccagagcagagttacctaaagcttgggtgcaggacacggacctctcttgattggctctaaaggacagtattaaatgaagcaagtgcatagatctttgaaagccatttcttgttctgatgttaggataggaggcgagatgagcaccagaggaaatatggtcttgatcacatttatgtaccacggaaacgattaagagctgagttctatctgtcagatttttgaacctttggctccagagagtctactctcctgaaggcaatgctaagctaataccttctgccacagaattgatttgactttagttcatacctctaagtattttttaaagatcagttatttactcaatggtctggcagttgctttctctggtttgtgatagcttgagaggagaggcatttagaatgggaatgccaaccagttagagttaaggaagatatttttcagagcatggccaaagtttttcctgtattaagatactttcaggaaccctgcaattagccaaatcacagatttccagttatttcggtcttgttaaaaacaaggctgatcacatctgtcttaagttggagtatgtgccttagcaatagaagctcttgcaaacctttaattacagcagcctcagaagcagcactgctgccgtatactatcaagtagcaataacaagtgacagattgactaataattagcaaatgctctgaagggggcttcgataagggtaaaatatgatttgctttttctatctcttaaaattgagttgattgtgagatattgatgtcccattgttccagacagatacttgacactgttgctagctggagtaacctcaaaatattttatcaggatgagggaagtgttttctgtgtatagagtactttgagaaaaatgacttctcataatggttataatggataagtatcattttttcagcatgttgaatgtgaataacaagacttttctaagtgaggaattcatattttctgccatcattcattggttttaacaaaactgagcaaagtatagaaatgttatcttaggcctttagagtgatattcgtaataaggagacaattgttgagaaactagaatgacttaaatcaaagaaaacagatctataagggaatgtcaatgaattatagtttctctggctagaaagacatctaaatgattactcttgtcaagcatatgtaagatttttacaagaggggtatattgaccagtttcacaaatccaggggaccagacaattgttgagaggatgacttcgtgttgacacccactatgacaaagttaatctgagtcatgtatagctcagaaatcttacaccaaaccaaaccaacaagcaaaggattgagtggccgttctaggaatggaaacacaccattatgatcatccagagagggtaagggaaaaataaatgagagtttaccaatatcgggagtatagttattgtcaagaacccaagaatacagagtctatttctgaggctaattctagaataatggagatcaggtcaaaattgatactaaaaaggcttggagtctagcttaatggttctcaaagtttactgtgtgttaaaatcacatgcgggttgtttttaaaatattgatgttggctttaccctattttaattggtgtgcagtgcagcctggactctgggatttttgttgttgttgttctgtttgaaaactatgatgaggttagtctgtatctaacattgaagtcagactcttctttaccgagcctcaacttgctagctagccgtagcattcttagcttatctgcttccaaacagagtcttcatgaaatagttgctttatgaagaaatacaagtccaggtcagcaaacatttacaggcactgtgttaggcagtagggactcagcccctgcctttgaggggttaacagtgagaactgagcagtaaactgcagaggcagcacctgaacccaagtctctttgtgaactccacacctatgctctttctactccaccggcagcttcatgtctgtcatggtggtaaatacgttggaagaggctactttgtcagttaatgggcttgctaagctaaaactacaaccctctccagcatacaagttttagatattcaccttaatgtggttggagaaaatggaccatttgttctctgttcttcgagagcctatattctgtattttaaaaaacaactttattgcggtataactgacacagaataaactcatatttaaagagtacaatttaatgttttatataaacctataaaattgttaccatgatagagatagtgagcatacctgccacccctaggtttcctgatgcctctttataatccactttcctaatcccttcaattctccctgcacctctgtaaccactgatctgctttctgtgactgttgattactttgcttctactattttatgtaaatagaactatgcagcatgtacttctttttgtctagscttttttactcagcataattatttcaggataatatatgttgaatgtaccaatagttcatctttttattgctgagaggcattaagtagcatggctgttccactgtttatttatccattcacctgttgatggacattgggcttatttttagttctggctattactaataaagctgatctgaacagttttgtaaaatattaacatgatttcattactcttgagtaaagatgtaatgtaatcatttcatacctgggaatgaaatgattggaacatagggtgggaatatttttacctttttacaaaatgactaaactcttttctgaagtggttataccattttatattcccaccagcagcttatgatagttccttctgcttcccatcttcctcatcacttagtatggtcagtctttttaactcaaggcttcctaatagttgtgtaaaaatgtgttaatgtgatttttaatttgcatttttctaatgataaattatattgagaatcttttcttatgtttatttgctgcctgttttcttggaaaagtttctcttgaaatctttgcttcattagttaattgagttgctttcttattattgagttttggtagkgcatttttattttatattttagtattctggatataagcttcttgcatgtagaaatggttctagaacccttttttgagaagactcttttttctccacctaaattacctttgtacaattgtcaaaaatcagttgttcatatacgtgtgggcctgtttctgagttctctgtttgttccatcatcggtttgtctataccaattcaacactgttttgattactgtaacattataattttgaaaacagatagtaggtcctccaactttgttattcttttcaaagttacattttgctgttcaagatcttttttaccatatgaattttagagtcagtttattaattcctataaaagcctgctgcgatttagattgggattacattgaatttacagatcaatttgggaagaattaacatcttaataatattgaatcttctgatccatgaacctgacatctctccatttrtttaggtcttttaacatttttctcagaaattgttctgtagttttcagtgcacaaatttcacattttttgtattgattgaatgatgtaagtacttcatagttyttaataatattagtaatgatagttttgtttccatttgttcattgctactatagaggaayacaattgattttgtattttgattttctatactgcaataaaacccatttattaatagtttacatcattggtggaagtgataggattttytacatagacaactatgttgtttataaagactattttacttcactttcaatttgtatgctttttttttttttttttttttttgcttttgcttcatacaaaagtgaatggtaagaatggacattgttgcctcactgctgatcttagaagaaagattttagatcttttcaccattaagaatgatgttaggggtgagcacaagtgacttaagcctgtaatcccagcactttgggagaccagtgcaggagaatctcttgaggccaggggctcaagaccagcctgggcaacatagtgagaccctgtttctattaaaaaaaaaaattagccaggcatggtggcacacacttgtagtcctagctactcagaaatctgagatgggaggatcacttgagcccaggaatttgaggctgcagtgagccatgatcataccacactgcacactagcctgggcagtagagtgagactctgtctctaaaataaatagaaaagactgatgttagctataggtttttgtagacgccctttatcaggttgaagaaactcccttctagtcctagtttgctacaagtttttatcaaaaattggtgttggatttttgtcaaatgctgtttctgcatctattacgatgatcatataagtttcttaaattagtcaatatagtgaattaatactgattgatattttaatgttataccaaccttgctttcctgagataaactgcatttgattatgaagcaatacactttttatattttgctggatttgatttgttaaaatctgttacgaatttttgcatctatgtttatgagtgatacaggttcatgttttatttttccttctaaagtatttatctggtattggtattagagtaatgctggcctcttagtatgggttgggaggcatttcctcctctttaatttttttgaaaagttggcacagaattgctattatttcttccttaaatttttggtgagattccccagtcaaagcatctgggcctgtggtatttttttggtgaaagatttttaactataaaatcgatttcttagtagttataagacattcaggttatgccttttttttcttgaatgagctttggcactttgagtctgtcaaagtgtttgtccatttaatctaagttgcagaatgttttggcataatcttgttgaaaatattcccttattatctttcaatgtctgtagatatgtctcctttctaattcctgatattgataattgtgtcttcttttctagatcaatctgcctagaggtttatccattttattgttcttctaaacgaaccatttttttatttgttttttttattaaatattgattttcttttttctctttcattggtgtgtaatcatacattattttctttttgtgtattaatttctgtttagtttgctcttctttttctaatttcctaaggtggaaaactgaagttgttgattttagttcatttttttccaatataaacattttatttatttattatttattatttatttatttatttattattatttttaaaattatactttaagttctagggtacatgtgcacaacgtgcaggtttgatacataggtatacatgtgccatgttggtgtgctgcacccatcaactcttcatttatattaggtatttctcctaatgctatccctcctccctcccccgaccctatgacaggccccagagtgtgatattccccaccctgtgtccaagtgatcccattgttcagttcccacctacgggtgagaatatgtagtgtttggttttctgtcctcgtgatagtttgctgagaatgatggttgccagcttcatccatgtccctggaaaggaaatgaactcatccttctttgtagctacatagtattctatggtgtatatgtgccacattttcttaatccagtctatcactgatggacatttgggttggttccaagtctttgctattgtgaatagtgccgcaataaacatacgtgtgcatgtgtccttatagtagcatgatttataaccctttgggtatatacccagtaatgggatggctgggtcaaatggtatttccagttctagatccttgagggatcgccatactgtcttccacaatggttgaactaatttacacttccaccaacagtgtaaaagcattcctatttctgcacatcctctccagcatctgttgtttcctgactttttaatgcttgccattctacgtggcatgagatggtatctcattgtggttttgatttgcatttctatgatgaccagtgatgatgagcattttttcatgtgtctgttggctgcataaatgtcttcttttgagaaatgtctgttcatattcctttgcccactttttgatgaggttgtttttttctcgtaaatttgtttgagttctttgtagattctgggtattagccctttgtcagatgggtagattgcaaaaattttctcccattctgtaggctgcctgttcactctgatggtagtttgttttgctgtgcagaagctctttggtttaattagatcccatttgtctattccaatgtagacattttaatgcaataaatttacttctgagcactgttgtggctgtatctcacaaatatttacatattgcattttcatttttatttggttccacatactttctacttttgatttcttctttgacccacacttattttgaagtatgctgttttgttttgaaatatttgagaaattttcagatatctttctgtttggtttctaatttaattgcatggagatcagagaacaaatctgaattcttttaaatgtattgagatttatgttatggctcagactgtggttatctctgtaaattttctatgtacacttgaaactattccacttttgtttttggagtggcttataaatgtcaattaggtcaaactggttgtttgtgtcattcaagttttctgtgtctttacatatatgcacttatcagaactcttctgaatacttgagggagacctatttaagttcctggaatttctctctctctctctctctgtctgtctgtctgtctctgtgggcagctttctcctgctgatattstgccctttaaactctagttgccttggctttcccattcttctagctacaattcctcaactcagggagactgctggacttcacctgggctcgccatttggacatcacagctgggaaactctgttaagctgggccaatcaaatggctcactctttgtaatcccatcactctgggattactgttcttcattgcttgatgtctagtgtttaaaaactgttatgtcatctattttgttttttaactttgaacagagagctaatctagtctttgttaccctaacttggttccaagtaggagactttcaattatgattttaacacatagtttaacagatttgtgtaaaccagtttgtcttaaaattaaccttgtaatcttaacctttgtatctttattaaatccatttaacttatagacttcattgtcatcatgaaagagagtactgtgcagtccttcaggttactttcttttgagatctctctctctctctctctctctctcagacatccatatattctacctctctttccctcaggcttctgagagttggaatgggatttttcatttacaactttatgcccagcaaaagggcagtctttaatatgttcaaggccaaggattataataagcatacggttgttagaaagcagctttctttggttatctactggtagcactcagggcttcttatgcctcttggattaaaataaagcaggccatattttggtgagacagagccctgttcacagcagctatgctttttcatttcctctgcctttaaggagcatatgttcccatttccaagcatcttctgatgtttggtatcattcaggtatctcctggaatggataatgtataagtgatgaggctacattgccctggtttgcctgtgctcattctcttctcacatatgtggaatatggaaaatgagtcatgaatgcaattcgcatgtctcgtactcttctcataaaacagaaatcttcatggatacrtaatggcaatggtgaacattctttcattctaatttctaattgactctggaagtcaaattcttataaaaattaaatttctcctatgaattccctttattcattaacacaagtcaattacattcacttgtgtgtgtgtgtgtgtgtgtgtgtgtktttctctctcccttacattcttccaatctactcttaagatctgtgtgaattctattctcttaattttcttccttttctatctgaatccctgacattgagatatttcttgtgttttggtcaccttttctcacacaggattgtactagcaaattgtcttgttaaccctttcttgcttctctttatatattcccttttgctgtttccttcccatttgttgctggcagcttgctaaccattaccaccacctcccattttaaatttaatcttatagctggtatttcattccaagtgatcataagttaaaaactaaagccaattttttttatttagtaaagaggatttttttttaggattcatcaactcatataaataggaggctattttagtcatctttgataaccagctgcagtattttaagagtactccatattgattaagaaggtattaaaagtgaagtcattggttgtgtgctaatggcaggtatataaagccatattgaactcaacactagattaaaatatttgatgagccctaattacctttcattggtttaatgtgaagtattttttactacttcatatttcttttatttattttttattttagagacaaggcttcactttgtcagccaggctagaakgaagtgggcactcgtagctcactgcaaccttgaactcctggtctcaggcgatcttcccacctctgtctcccaaagtgctgagactataggcatgggccaccatggctggcctgcygtattcctaatgcaacaagttctagcaaactggcccatcagtagtggcatagatatacagttaaattcagctgatgttcaataagttacttctatgtagaaatagcatattatatatttcagcgcatacaaaggtgagcaaaacttaatcttgccttcagtgaatttaattcaaactaatagggaaacaaagatgtacatagatcataataatagctaacactgaacaccaattatgttcaaggtgctggtttaagcacttacatgtattttccactctaatccacataacagtcctatgaggtaaatgctagtattttatctctgtttcatatgagaaagttgagctatgaagaggttaagtgcccaaatcaaggtcacagagctagaaagccagtggagttttttgaatagaagagtgacgtgattaggacctaactttaggatggatattctggtagcagtgcttagattgaatagaaacaagaatttggaaatagggacactattgctattagtcatccatattgaaataatccattaattccccaattatagtggtagtagtggaaatggaaggggaccgtatagacttgtagagattataaagacaggattcacagaatttgtcaagtaatgccgacattcaatacatcagtaaaagtgttgctgtattaagtggtttagaatagagataactttgaggttttaatattggtggtggcaaaataatgatgctattaaagaattgggaatagaaagtaatgtaggttagcaatagcttcagttgggatgtttagagatgtccaaaggcaactgggctgtgggagaggaatgtgagtgatgggtcagagatagtttgatttagggatcatccatggtagaaagagattaagtggtttttctcagagggagagaatagaaaaatgcctcttataaacagggaaagaagacacttgtgacatgacatcataataaagtttagagaactgattaacaataattatgactcatagcaaattaaattatttctaaatttaccgactcccacccttcatctcttgcatttgaacatttataaagtaattttagtctggttgcactgaatctgattattcagggtattgatagttaacctcacatcagtttctaccatgagttatgtgggtttagaaagttgtaccaaaatgtacgaacctagggcttttaacaatcacacttgaaagaaaccttgggagttgcatttgtcaagcagctaggaaaaccattcatgcataccccacatccaaagctccatcggcagcccaaacataaagaactgaaaggtcattyttcttcctgcaatgtgatggcttgttgacgtattttgacacaacggtacaatgctgaaagggtctgaccttcctgcaacaccgagggactcaggtttggtcaggatacctgacactcattgcatttctctccttgccttccttctccttcacagataaacacactcctcaaacacaaagtgctgccctcagtacagaaatattaaatcatttaaatagatataaatgattgctttttacatttctcttgcctctttttttttttttttttccagttaccatcaagctgaaacccttacttggaactattaatgcttttaattaaaaaataaaattagtttttcaaaatgacaaatgtgaatggagattgttaatagctggaaagagaaaaactaaacaaatgaggaggtctgtgtgctatcttatgttttatagtctatctttttgatagaaaccaatttattggaattcagaagtttgaggattacttctgaagtgcaagattaatgtacataaaggtaaattgtagataaattgaagtaattatctcctgtgtacataatgtgttaaaaggttgaagagttagttggaggcaagagaactatcaagaggattttctgccatttataaattgatgttctatgttagatttatctactgtgaagtggggctttgactggttatccatattattttttaatttagtatatcatggtggcatggagaggggaagaaaaatgtgtactattaatgaatttctataaatataaaagtaataacctaagtgctttaaaaaaaaatactctttttaatgagaagcagctattcaggaagattttcatgctgtctccacagctagtaaatataaaataagtgcaataatattctccgagcatttagattgcactttgctaagtgtggaaagtttacatatttgtcataatattggaaaaaggagtattcaagtatttcagtggttttgtttccaaatgtgataactgtctactaaatgaaattaagatacttttgtccaaggtaaatattttaatggcatacccaaaattaggactgaaattttgaagtatttgttttarctcttcacctgttttactcatatcactgcacttttcagtaacccctagacatcatacatctttgtttgaatcatttctcttcctattttctccaccatttcaaatggtgtcatgtcactgggagctaatgcccactatcagctgagcacattcagcttctgtctacattaccactcggcttcagttccaatttcctggtattcctcattcagatcagacctcttagatggtgtgctatgagaactgacagccccccatcctgctctgcttgcccagggcctagtcacacacactccactgtgccaagcgtggccacccccacacacctttctgttcaggattttgtataacttttaattgacatttatgtctgacattgtagatgtacttctcattgtagaacatttatctacataggaatagttgaaaactgcttttcacttaactattacatggattaatgttacttaacaatgacaggtttccctgctgaaactcaagtgggcagatagtttcttgtttctaaccattctccatctaacattgcaacccaccactcagcactattctcactaattgcttgagtatacagcaaatccatttgaaatgatagagagagggttaagtcctgagtacagtataaactgtagtagagcccagtataaggcatttttttttctatatatgaaacaatcttttaacagggtttatcagcgacttaatttctatacatatctttcctctaaattcaccccagctacacaagtataaatttacccaattgtttctaatataatggcattctatatatatctttccctctgaaagcacagaacaaagttctgttgttttgccaggttcctggccttcttttataaattcttagtaaaatttctttcattgtggtgagaaaaaaatatattctatcaattattttaaaaagcaataattcattatagttgatcataaatgtcaggaagcaaagacccagctgaagcatttttgtcactaatcatgctgtttttcttctaattagttaatttacattttgcaaattaagggtaaaattcagacagaagacaacatcatagctttaactgacccatatttgtatctgccaaatttaagttaattagaaatgtagacgctgtttatctgtcagaaaagctcatcttttttcttaaaaaaaaaaaaaaaagaaaaaagtagacacactttttccccctcagcatttatcatctaaataatagtcttgccaagatggcagcctcataataaactcttttcagtggagtgatgggtaatgaagcttgcttgtgaaggcagcgaaaaatgttgtctggccaaatgcatgaatatgatggctagagaatcagtggactttctcagtcatcaatctttttagtagcctcttatacatctgaatattttgatagatgatctaataattgagttatctatctttctaaatatcagagttgcataaaaattattctcacatgctactgaatattaaatatattaggcatccagtaaatttttcataaaagggccaaaaggtgaaacattgttgttattctataaatatcttttaatatattgagtgttgagccctctgacatatccarctcttaactctctctgtgagaagtaggtatatattttaaaaagagaacatacctattataagtaggacacgtaatactttggccggtaaaaagtagaccctggtacatgtgtagatacaactcagtatygtaaaatggaatacacttgttggtctaacaccagccacacatttaatatgacacaaattttccatacaagaagcacagattatatgcatgctaagaattactgtatggctttggtgtctccatgattttgagaggaagatgatcctaccaaaaggaaaaacaaagctcccaagtattcttatgatacacaggtagttctttcccctcatatggctttgtatgtggagggaggaattgtttttgtttttttgttttttgtcatgcatcactctattaaaagcttatcaacaagtatgcttcactggaattgaaaaagtgacaaggaaaattggcaggaaacagatgacttagaagtgggcttctcccacccccctaccattcacagttcttcaaggtgaccttacagtgatgacttcccagtaaccaacattaaaatagttctgccctggaagagcagacatttgtttgtgggtctgacgggttaccaatcctctgcatcttgaaaggcactcaaatgagcagggccttgtaaattggatttctattagccagccctgatgatagctcttcatcagaggaatgggaggaagtgctatcgatagctccacctctaaatatctttgcttgtttttcttcctttttttttttttttttaaatgccacgcttatttttggtctctctcatccaaaatggtaatgaatgctaaaattaccagaaataattgcctttgaggttttaaataagccttaaaatgtgaaaaaaatttttttttcttcttacgacgaagtgttgctctgtcaccagactggagtgcagtggcacaatctcggctcactgcaacctgcacctcccaggtacaagcaattcccctgcctcagcctcccragtagctgggactatagacgcgtgccaccacgttcagctaattttttctattttagtagagacggggtttcaccatgttagccaggatgatctcagtctcctgacctcaggtgatcctcctgcctcagcctcccaaagtgctcagataacaggcgtgagccaccacgcctagccaaacaattattttttaatggttttcaactggaaaagcatttggaatgaaaatcagcaacacaatggccagaaacaaaaatggcaaaaatgtcttaaaccttgttttctatttaattcctaacaatgatttcatcttacggttgtgctatttataaaatttgagatgatagacttttttctctttatttttctggattgaaaataataattcaggacagtaccaattgtggaaatatgtctgtgggttacactgaggaactagtactttctagtaggtggatcttttcttggtttcgagactctccataatttggttggaaaaaaatgatattttattgtaagagctatcactgagaattttaaattcttagatatctatttaaaattatacatttaaaaccatttgaaatgtccatattggggaggttttaggggagggaatagtcttttcttaatcaaagtagcaaacatctgtgttctttctagcctgtcttttgattagcatggcctcatccatcactggtctttgatatgaacaccaagaagtcgtgtccttttgttttaaatgataaatatgcctttgtcatgaatactcataggcaacccaggatttacatctgaattgtcaaagtgtaactgcccagctcctgtgatgagtgacattattagtgaaataaagaagtttttaatttgtcatggataggccttaatgagactatgtgggttgtggtgctagaaaaagttgtccttcccccactatttttctaagatttgtcatttatcaacaagaggcaatctgccgcaggaggttctctgtgaacatttttactttagtgccattagtctgtctctaggtttcattatttaggctagatgactggtagtacttatcaaaactaatgctatctgaagtacccaggctcctgttggtcaaacaaccagcatcatgatttgttctgtcaagttattattatcaaagacagtgtttttttaaactttagctttatttcaaggtctatgtcaattatattttctaaatacatttctttgacatctttgttcccactaacccacatctactcacatgtatttatgtatgtgctatttatataaatacattgacctattcatatctacctatacaatttcatgttaatcatcaaaaccctcagggtgtccaatttaactgttgtatttgactcttcaactaagaaattaggaccattaaaattaaaaatattgtgaagtcttgatcttcacttgtctgcaatttaatagattacagctttcatatatttgctttatttgttcctacactattaatagacaaatagtttgataattttaaagtgtcttgtgataaatgtttcatgttggtaataagtggtttattctaattttatgtatacagagtatcctgtgaagatttggtattttaacaagtaacttttaacagaaattgcattaccttctacatgatttgtctttataatttcaatacaactgttttaaaagtaggcagagtaagagtgttcaatctctttttcaactgaattgaccrgtgaattaaccaaaacaacctttaatttagcatgttgggaatttacatgaaagttaagctatatattttagtttgatttagcatctctccataaaaatcattaaaatggttcaatcagtataaaagcctcacttaaattatattgtatttcaggtcatatccctcaccccacaaatgtattaatctttgattttcagttttgattgtttcaaaactaaactttagcactcattttttgaacaatatttcttgagtgccaaaaatatatattttaaggcaaaaaaatacatgattaacccttattatcaggcttgctcatcgaattcttttttctaatttttagtatttcctaaatcacctgtttcatagaaaatgaagtcttgttcatatttgtttcccaaaagaaaacaaacgcctggcaactctaaagcccaaccccttacattaatggagatttttgtactgtaatgtaagtgtctgagtttttgagaccctaaggctttcacccaacttaaagacaatgatgccagtgagcttctgtccagagttaatcagctgcagaatttgtaaactgcacatgtgtcaaagttgaaaatgttagcactctaatagaagcttgaaaaggttagatctgataaaagccatcagcagttaaagaaagtgatttatgggaatgtaatgacacaaaatgcctcatttatcactcatatatagataggttaagcttcctgtgtcatacttttaaaaacttgaccacttcgaattgtcaaaataggtacttaattgcccttcatccttttcattttgaatttatttcatttgaaattggtaatttcatctacgattactttactgtcattcacttcatatggttccatttaaagtcattcatatttaagattttcaaaaactgcatcaccgatctttttgaagttttattagctaaagctgttgcaaagaaagattaagccagtcttatatatgctaatttacacttttatgtaacacaaataccatggagatatgttcaagtttcattttctctttcctaacacttgtaattttcatcagcattttctaatcctctgaatattctatatatctctcttaaaaagtgcaccacaagatgttaaaagacagagccatcaattggtttaccatcctaataactcaacttaatatttaagctccacacaaattaaatttaatgaaaacctgcctgtctggctaaatgatccctaaaaatgggggcaaaagccaaagttaagagacatgccaaattgtatttctttcccaggattattaaaaaacaattctcaattatttcttatacattctaaggaagatatttataaacttgggatttctaaacatttattggcttatttgatgtcatttagtttatgcataaatatcttaatgctattaaataaaaactattttacaaacttcgttacgtcacagtagtattgtaaaacacaaaattttatgaatgattatcacagttttagactccttaatgtgacaggtagacttgctgaagggcttcatggagatctttcagaacatgaagtaggcagaaatgtcccaggacttcctttgcccctctatagccaaaaaataaatttgagaagtttggcaggtttcactttgtcagcccaatgctgcactttcttcaacagtgacgttccaaattcaattgaaaaagaagtcagaacagtttcttcaacaagacaaaggcacraaaaaaatttacagggaaagggaggaactgtactaggaaaaaaacttaagagacatcctaaccaaatgcagttgatcctgtttgttgcaccttgattccatcagactacaaaaaaaaaatcacattttttagatagtcattgaaagttgaatatgaattattgtgaattcttaacacctagaaattattaattttcttaggcatgacaatgccattgtggcattatgtatgaaattgtgtcaaaaaatgtcctttctttgaaaaagagatacatacaaaaatatgtaagggtagattgagttggtgtctgagatttcctctaaatatttcaataaaataaatatataagttcatagggaaagaaagatttaaagagggatatagaatctggaagatggatatctgaggtgagggatctctctgctttgtatacattgaaattgtttgcaaaaaataaaaaaagtcaggggaattatctaaaagtaccattttaaatataaaattataacatcctatattttctagtattttcttatcaccagtataagtttttaagtcataagatataacctaaaccttttttaatctccaaagtttattcaaaaaatcatctaattggccactaccaaatccatttacaatattttaacccagtagcaaacccagtattttttaaataaagaaaatgggtaagaaattctgaacatttattcaaaatatgacagaaacttattagcatacttctttgtgctctgaaaagtgtttaattcctaaatagtagcacaaatcatttttttgtttaaaatgattgttgatgtataacttcagccttatgtttctggcaaatgaattagagagtttataaatcttatattttaagctttgttttttatcactgtttacaaaagcattttcttgagttacagatataatttcccaacttaaggactattaaactaaatgtatttctagatgcatctttgttcagacattttatatacatatatacatttaaattaaaatcttgatttttttgtatgatttttaaaacctgcatttacttggcactttaagcacatatgcagtattttcatctttaagcaacaacaagaaaacctgaaaatctgagactctcagaatatacattgatttggagaaaatgtgttcttaatatgaatttatcatttactcaacttatattaaaggttagttagccaaatgtattgtatttttttttcctttttgtgaatcgtgtacatacattaagacaatacaagaagaaccatttcagcttaaccttccagagattaatcatttagtttgaaggagttctgttgttattttttaaatctgtgattagaaaaaatcatgtgtttatataatcatgggcatcaaaattgtctcaatctatgaatcttagcagtttgctcttgtaacaactatgaggaaatgtattagaatgccttaattacagagcaagaaaaagagaaggcacagtcttttcgcatatgatctttcaattgttcagcaaaggataaagaaggcattcaagcgtggtttcaagaactgtcagcaataagaaaatgcaaggtactttgtagggccttcaagacctttctggaaaatagatttaattaaaaagtaaaatagacttttcaaagaaatcttaaaaatgttataaaacttcatgttaatatattaataggggtattgtcttcttatcctagatgagaaaaagtcatccatgaagctattatatttgattcatacaacagtggagcttataaatatttttctttaggtttgatttaagagtgagaattataatgcattgaagtatataacagtgttaaaaggcctactctttttgattcacagatggtgattcaatctcacccgtaaagtaggaacatctatagtagtcttccccctcctaaaaggagtccttttacccaaattaaagtttaaaatgatcagaaatatcagtgcatatgctgtttgttttaattaacatgttcatgtacactttgttcatccttagaacaatactaatactatgtagtcgggtataagaattccagaggtrctttattccttccctagttactttaacttttataatttttttttttwaaaaaagctcatttattttccactgagttcagtcctaaagcttaattaacagtatatctccaagctgaattacagcagagaaggttaacctgactctgtgctaagtagctgtttataaataacccaagtttgttcttctagagcttcagagcttacatcgtcacctcagcctgcctagcctgtctcagggtttggagagccagtctgctctcatccaagcacacacacatcagtatttactggctattaccagacaccaaatatattcatgtttaaattgtctttgttttaggacacttcattcaaaaacaaatcaatctcagaaggttgtgtttttaagtaattactctttcattgagaatctgtttctgggccagtgttgctatttttccaactagtcaatgatcaatgtattcactgttcaatgtaaataaataaataaggattaatttggcagtgtacttaaaggccttattaaaatctcctgtgtctagacttccatttaaaatgacactagtgaacactagatacatagtacagggacttgtttccagtttagctcacacagggatgtagccactaaaaatgtctgctctatatttccattaacttgagtttctcagtttaaattattattctgcaaaagatactgcaaactactttgttcctaaatagtcattcagtggattgaataatacttgaagatttgttgcattttgactgtaggaaaaataatgcctctgtgtgataatgagtatatgatttgcatgtgtgttgtataatttacaatatacatatgcattcatcatgttattctttcaatatgatgaattacgtcagtttattgcatatgtctgcatgtacctcatctcttaattaaagcattaatcactaaaattaccagaaatacatagttttagtgtaaaatttaatgttgatctttgcatagtaatacacatattatttctaattggtagactatactaagacattttaagtaaggatttccctattatcattctatcatatcagttattttaaatatgcttatcttaatatatacttacactttttaaccattttaaatcatttttatttgagattaatttcctaaatcactaaaattaccaaagacatacatatgtgcatatatatgcatattatgtgatcaactttaaaatttaaaaactgtatatagtcttattgcacttttaaaatttaaagttgatctttgcattattcatacacattatttctaattggtagactgtaagadaagtgaagattctatattatgcttttatcatatcaaatttatatatgtgatcttaatatatacttgctacacactttaataattgtgttgtttaataatttttttccacttgggattaattatatttgagtttaatttcccagcacttaatattaattcatttgcaagtaataaacatttgctaatcatgcagttcaatcctttaaaagtccacagctgcagaacagaattaaaaattgtaatgcttagagggaactatttgggaaaaaagttactatctggtcataggatttagttgctaagagtttggtgttaagaaggaggcacatgtagcatcctccccattagttcatttaacttttctaagaaaacaattttatttggttactcctaaacagtttctataactgtccccattatctaccttcttagcccaagaccttgctccaaggcttctctgagaaggtagagaactcccacatagaactgctttaaatcacccccatttctctctctgtttttgcttattctctccacttgtctcaaatgaaggtggcttcttattacacttcttcctttcctcagttttccctcttccctagaattgcatggtttgccctgtgctttgaaaatctcccttgatttacactctacagctactgacttactctcctcttcccattgttgtccagtaccttgatattctttcatgctggtggcctctactccccaacccacttaatggaagaacttgacattctcccatgtttgtttcaaagccacataggcatgtgtctacgagatgctgctttgataatgagttggttatactcctgcatcctactcaattgcataaacattctctaattcctaatggaaaggctgaagaaccttaagcctactcacttggacctgctgttgatgagtgcctgggatgctgagttatttcagggctctgctgttaatgttctagcagtattacccatccagatctctttaaaatcttggtaaataatggctgtccattgcctgcagaggaaagtcaggcctcttgtcttgaagtacgtttaaggtcttccacagtctgacctcctcctttccagccatatcccaagatgttactccatacacttccctacttctagccaaacaaatatgcctcacaccctttttaatcatttaaaaatgcttcacactggccgggcacagtggctcatgtctgtaatcccagcactttgggaggctgaggcgagcggatcacctgaggtcaggagttcaagaccagcctggccaacgtggtgaaaccccatctctactaaaaaatacaaaaattagccaggcgtggtggcacacgcctgtaatcccagctacttgggaggctgaggcagaagaattgcttgaacccaggaggcagaggttgcagtgagctgagattgcaccactgcactccagcctaggcaacagagtgagacccggtctcaaaaaaaaaaaaaaaaaaaattgcttcacactgcccttttgcatgcctttgctcctgcaggttccaatacctgggtcgttcctatttttgccttttatatctgacctccccttctgctaaattattcaaatgaagtgattcatctagaatctagactataggtaacaaatattgcatttgaggctaaagttatgttaggagcatttggaaaatattaactaatctgcatgttgccagagtgtgccaccgtaatgtgacatgataaagaactagaccaggaggtttcatttgtgtgtgccattgctgtgacagggactacatggagtactacctcaagaattatgaggcttttgtggacagctgacttctgctagctcccttttctctgtctctcatatcctgtctcactaatagtctgggtcaattagttactgtctagctagttactgtccagttaatgactcttcatccttattaagcagttatgggatcagatcactgtaccggctgcttatgagtcagaggacaatcacttaatcagttggttgtatcccaagaatgtaaagtaatttaacccaaataagaatactcatatacagggaaatgcctggagctgctttttgtttagaaaagacatctgggtgtgggaggtacatagggtgtcctagattgtcacataaactcatacttattaataaagataatattgttcaagactatatttatgaccaaaatcaccaggtcagaactcacctttacttgacctgtccacaacatttgacaaagcttaccgatgactccttgaaacttgactttatttggtttatagagtaccacaccttttggttttctcccaatcttcgtaaccattccttctcaatctccattcatgcttccttctcttctaactgttctctttatgttggagtgtcccagagctcaacatttcatcctcttctctatttttttggcttggygatttcatctagttttataccatctgcgtgctaatacttccgaaagctatgggtctatactgaacctctccctgaacttcaggacccatatatccagttgcccattcaacacctctgcttgaatatatggcagatatctcaaattcagcgtagccatatctgaattccagatgtccttaaatgtttttcccatctcagttttgacaattctgtctttccatttgcttagatgaactaccttggaatcattcttgtttctctgcctcatatgccacttcttgcagtggttccctatgacccagagtaagagccaaaatcagccttcatggccctagatcgttctgccccagttattgttctgacctcatctcctaccacacactccccgcttacccactctgcaacagccattctggcctctttgctcttcctcaaacttgtcaagtacgttgctgccccaggccttttgtgctgactccctgttacatgaagcactgtcctsaggtacatacgtagctcactgtccaaagtcagacacatcaccaccttctcagacctaatctgacccccccaacagcctacagctttcttttttgtttcatgtttctccataatccttacctcctaaaatgatctataatatccctctgttttgtttgccccactaggataaaagtttcacaaggacagggatttttgtctgttttgtttacccctgtatcactaggattaaartaataagagcctattatgtgccaggcactgaatggtttattttgaataggcataatgtatttttaaaatgtaaatatcatgtaccaatgttaatagcacaaactgctaatgttacaacatttgatgttcccaaagtttctgagacttggaaggaatgttacaaatctaatatatatgccatggaaaataaacaatcatcagtctttgagttttgcggtttgaagaaaacaaggctgggtgcagtggctcatgcctataatcccaacactttgggaggccaaggtgggaagctgaattgcagccagggatttgagactagctgggcaacatagcaagaccctgtttcaacaacaacaaaaaacaaaaacaaatttaaaaagccagacatagtggcatgtgcctgtagttccagctagttgggagactgaggtggaaagatcccttaagcccaggagtttgagcatacagtgaacagtgatggtaaccctgtactgaagcctaggcaatagagtgaaagcctgtctctaaatgcaaaacaaaacaaaacaaaacaaaacaaaacaaaaaacaaagaaaagacaggctgtctcctctctccctcgctttggttttactgggaagcccactgcaatttctgagagaaataataccaacttaaagaaaaattattggtattgttttatatgttatcagtatgtttggagatcgtgttacaatatacttataaagccatttataggaaatgcacactgtgacacgtattttaaccattactggcaagtatcaaacttcaaaattaattatgcaaatattccaaatgttagcaagtttaaagtaaagcatgagatgatgtcttggatccarctgaaaataagtatgtattctcctattaccattttgattactgaaaattatacaaaaaccatgttattgaatttaaaagatccacagtgttggccatctctgcacatatcacatccaaaaaatttgaaaaattagtattctgaatgaaatatacaaagttttattctttttttaaactctgattgaatatgtatctaaaatgtcatatttactacaggaatccacattgcttagcaaaaacaacaaatttattttgtactggaaaagggcttgcccgaaagtttcactgaatatggtttgttgaaaatgctctccaaacaaaagttggggggttgaataattttggaaaatgttgcctactacattagaatattaacggctctgagaaattctgtgtcaaggaaacatgttttcattgtttaagcctacatttcttaaacttatttgatgaaggacctcttttttgcatctaatacctgtgtcccctttggaatgccctcttggactctcttgtgtggacgataatcacatcagtggtgggatatgagtgaggtagatgtggggggtggggagtaccacttttaagctacgtaagaggagatagtaaatatacttaggcatcctaactaaccatacctgtcataactgaaaagcccaaatgacatcaccttagatccgagattatgcagggaccagacagataacagaaaggagtggaaactgtggtgataccgagagatggtagcacttctacgtgaaacagccctgctcagctcatctcatgtggctatggagatataatgggcccactatggtcaaatctcgtaattcttcaaatcatgctgaatatcaaaatttttatgggctgggcgcagtggctcacgcctgtaatcccagcactttgggaggctgaggcaggtggatcacccgaggtcgggagttcgagaccagcctgaccaacacggagaaaccccatctcccgtaaaaatacaaaaatcagccgggcatggtggtgcatgcctgtaatcccggttattctggaggctgaggcaggagaatcgcttgaacccaggaggcggaggttacggtgagctgagatcgcaccattgctctccagcctaggcaacaagagcgagactccatctcaaaaaaaaaaaaaaattatgtttgctctcctgcatttcaattttttttttatttttatttattttgagacaaggtctcactctctcacccaggctaaagtgcagtggcacgatcatggctcactgcagcctctagctcctgggctcaagcaatcttcctacctcaacatcccaagtagctgagaatataggtgtggaccaccacacccagcttttttaaagaatttactgtgatggcctgggctatcccctacactttaaatagtgacaattaattctgtagtttcagggcactgaagcaaaatatatcccagaaccaccctgatgcatgacctctactttatgaggaattggtacagcagcataaaaaggagaggcatatggggtaaccagtgcactcctgccaaataatcaaaccctggtagaaacaaaacaactttaccttccatatttcctagactggagtatttccaactagttgtaagtgtttaagtctgaaaaacttcaaagaccagttgacatcattgtcttcatcaaataattataatgacaatttaatatttgaaaagctttttttttttttttttagtttacaaagtactagcattgaaaaataaaatgatgctctaggggtcctagtttcctagggtggtcataacagaataccacacagactgggtggcttacaggacggaaatttattttctcacagttctggaggctggaaggctgacatcaaagtatcggcagggctggttctttctgagtgtcatgaggagaggatttgtccctagcttgtagaagggcttcttcttcctgtgtcttcacatcatctttcttctgtgatatctgtgtccaagtttcttcttcttgtaaggacattagtcattcaattagggacaccctaatgacctcattgtaacttaatttcctctgtaaagaccctgtccccaaatacagtcacattttgaagtgctggaatttagggcttcaacatacaaagtttttgggaggtacataacactakgaaagaactttgtggagtaaaacgagggctgtctccgtggtttgggttttggtattttggtttatttaaatacttaaaaatcagattcaaaatcttaaccataatattttatacataagccaggaaaagttcctttgtgaactgaaaataaaagcgtagatgaaaccaattatccaaataaaagagtagatggaaccaaatgtccaagtgtccagagacctacaaaaactagtgtgtatatgtgagatactaggaaaggaaggattgaaattacaggtcattcatctggaccaccgtcaaagacccaactagacaagaccagctggaagccaatttatatctataaatacataaaatagagtataaatggaataatatgtaaaatgagatacgaacccttactgttaacatcaacatgttctaatgcataaaagttcttagtagtctaagcctatgcaaaacaatttttttttgttttgcttttgttttctctttagtgtttgttcgttaatacacaggaaaacaaaaaatcagtacattgagttttgatggccaacgaagaaggcaaaaatcaaacagaatctcaaattcaacattgattatgtaaaataaactttttcaggtcacctttattttgtgaactgctttctcacaattttctttataccatcatagatttctgagaccccaatgtgcttgagttgagacctccttctggagtcttcctgttgttggtttgcctgtgtagaataagtatttccagatgcaggccagttttctttcaaaactgcagcagattgctgaagttcactcattcacacattcattcgtttattcattaaactggtaccttgtgctgggtacaggggtaggcaataaagataaaagataagcatggcctcaagcctcagtaagctcatggtcttgtaaaataaacaaaaatgttaacaaggaatttagtatgttaagtacagtagcaactggcttgggtcctcagaatggaaatagtcattcaagccagaggragtgggaagacccatgagttgagtcataagaaaagcacaaaggttttctaggtaacctattaaaaggcagaccaaattacctggcatgaaagtggagaagtttgaaaatagatagtatattaaagaaatggtaagtaactttggtatttctgaagtatcaactgtgtgtcaggatagagaagatgatattggagaagtaagacgagccaggtcatgtaggggaaaaatcacttcggcagtgggaagcctttgaaatattttaattaggggagtagcatgatcatatttttatttagaaagactgtatgagcagcaatatggggaatagattggaaaggaaagtcactgagagtcaaatttatttaagaaataagcagtagataatcttagcaaagtcatagagtagggtgcttagcctaaacataacctgctacctgtaccaaaacacacaaagatattctgtgttctgcaacatctcttttcagtatcaagtcccaacagtgcagtgccctcttttaatctaatcaaatgcaataatcagaactaatcctagtatcagtggatgctgcagtcagggtccctgcaacttctgatgcttgaaacccaggtatggagtgagtattatatataccctcagtgttccaaggtgtaaagagaaaccatgaggcaggccaggtgcagtggctcacacctgtaattccagcactttgggaggctgaggcaggagggatgcttgagcccaggagtttgagacgagcctgggcaacatagtgaaaccccatctctacaaataataatattaactgagcatggtgatatgcgcatgtggtcctggctacttgggaggctgaggtgggaggatcgcatgagccctggaggtcgagcctgcagtaaatcatgatcatgccactgcactccagcctgggcaacagagggagaacctatctaaaacaaaataaaaccaaaaaaaaacacgaggctgtctgtaaacccattgacttaaacattttattcttcattctaaagacattttttgtcttttttttttttttcttaaaaagtctctgaaaattttggttttctatttccctgaaatttactagaccttcatgaaatgcatcaccagatgactgactttgcaaacatttttttctgtccttccattttgtacagaggaattctgcaatgaggggacatagcaaaaaaggcccactttccttgcaggctcttcagagcaacatctgcttcagtggagacagcaacagactactgagtacttcccccaggcctctggtccatacccacagccctgttatcctggtttctccataggggagcaaatgtcaaccagccacattagcatcttttttatgttcattaagaagccagaggattattggttctgaatatctctctagctgcatcctgggatctaggtctccctcagcgtggtctgattgccctttccagtgtaccaaattcacataaactccttgagagcaagggtaatatgttcactcattaagttggtacctcttgagcgcctactatgttcaccattctgggaaccaggaatgcagaaatgaacaagacagatgtgggccctatccttagggatctcatactgtgatgagcaagacagaaaataaacaaggaaatgaatgaatacattttttttcaaatcatgataacatgattagggaaggtttttccaaccacctgtgataaaataaatctctataaatgtttgagttgaatctcatttcaccaaattgaatcggaccccctctgcacatcaagctcagatgataactttgaaaatggccttcaactatactgctgttttgtgtacagctctaattagcccatgtgtaatttgagacattgaatgttttggctgtaggacatctctgtggcatgaagtttttctgatatatggccattgacctgaatactgccatgtctagctttctacatcccagaagcagctgagtacctgtaatatcattatttgcaatcacttttgtatacatccataagtcaggaagcagaaagggtgaataagtggtgatgttcttattgtctgtatatttgagagtatatgtatgagcagattatgataaatgcatcttaatggaaacccagccagggttatacatacagtttaaacatcagaggtttctgatagattataataaaactaaagggaaaaaattgcacttttccaagcatttgtagagctgtgattcatttttaccattaaaatatttatattaagttaaacacttcatttgttatcagcccaggaccctataaaagataataaatttgtcattattttccattaaatttccactctttgataagtactgaacttttaaagacatgatgctggccagaatgaacttattatatatatttttaaattaaccatttgttcaactttggtatatattacattctgaataatctaattctggtctcattattattttaaacaactattactttccaaaaatatgcatggttcactgtagagaactctgaatgacaagtctgttgaactttcaaaacaactgttaactagtcttcttcctcatctgtaatattattatattattgatattgattttaggcatctatcaataaatatgaatatattacttttagatactcttagggtgtaagcatagaattgattcatatcagttaaactaactsatttaagaatattacttatgaggccgggtgcagtggctcatgcctgtaatctcagcactttgggaggccgaggcgagtgaatcatctgaagtcaggagttcaagaccggcctggccaacatggtgaaaccctgtctctactaaaaatgcaaaaattagccaggcgtgggggtggatgcctgtaatcccagctactcgggaggctaaggcaggagaatcgcttgaacccaggagttagaggttgcaatgagccgagatcacgccattgcactccagcctgggcgacagagtgagacgccatctccaaaaaaaaagaatactacttatgaaaaattgttcaaatcataggacacagaaatatatacaaaaaacagtttttagtacaattagagcgaaaggaacaggatccaggtaaagaaaagcttcctgtgacaccacagacttcagtgtctctggggcagcgctgatagttttgttgagcaaattgctaacataattcatttgatatgtggcagtattattaagctaccatgtagaagaccaattagaggtgtttggtttgtggggctctttgcttttggaagtttgttttgtttgtctgtattggggagtggaaatagtagagagamagaggaaggaggccaagtgggaagttattgctgaaatacaagtgcaaaatagaaaaggaacaaaaacagatacatggaagtggagaaaatatatatgggatattaaggacatgtattgtcctcttctgttaaatttaggttggaaagaaaggtatttatgataggagtagttacattccttatattcagtaccatttaaatcatttgcattgtttagtgtccaacttatttgcaccaggaattgaactgagtgcttctgagttctggtgtgctatgttctctgttttaatgcttcatctatttcaaaaacaaaaacaaaacaaaactgttacctgcatatcatacacgtatatgcatatcatatataaatatatggttccacacacacacacacacacacacacacactgctactttgtgagtaaaagaaaacaaggtatcattaaaagttggaaacgtgtctttttttttttttttttttttttttgagacagggtctcactctgttgcccaggactatggctcactgcagcattcgcgtccccctcttccaggctcaagtgaccctcccacctcagtctcccaagtagctgggactgcaggtgcatgccaccatgcccagctaatttttctatgttttgtagagatgggatctcacaatgttcctcaggctggtgtggaactcctgggctcagcgattcttctgcctcagccacccaaagtgctggaattacaggagcgaggaaacattttctaccaggaatctttatgaaatgtgtttgtaaataacaaaaaacattttcaaattgttggaaatttctcagcagttagtgcattaaaaaaaaaaaagtttcaaccagcatgtgtttcctcatcttaaacaataagtagcaatgtttggaaaatgtttgttatattatctctctaaataaaagttgatagttcccgtaacacttgtaacaaacatttctgggtgacaaaataatttgcctttcaggtcattcccaagtaaatttatttttaaagcatttatttgcagctgcaagggctcccaaaaaaagggcggctgttggacggcttcagttggcctagagttttcatttattccatgctcttttttataagtgaacttttctcaaagttgtgtttcttttcttaactttcattcataaaggtaagtgtctttatttccttgaaaagctttatgagtgtatttattagaattaagtggttttctttaaaaaatcacagacttagtcttcttagagctagccaagatctctcatagatataatctaatttcatgagtgaagaaaccaaggcccagggagatttaagtcactcartgttgaacactaatcagtgggttgagtaaaatctttaaaaacagaaatgaattaacatttatggtaggaattgtttgaatttcacaagtacttagtattatataactgctgtctaccactttgacatagagaactctttgaataccaaaacatttttcctaataattagtggcagccaataatattatcagacccccgagccaaccacatgctgacctaatacaagacctgaggatttttcactctgagtcttgttcccttgctgctacataacactacactgtgagttaaaatcagctaataaggattttaaaaatttaaccatgaagggaaatagtctagaagttatttaatcattcgttacaacccaagaagcaatatagctgagtagaaagggcacaggtctgggggagtggcagtgggaaataactttggttctcatttggtctctcatttgtatgacctggggcaaatctctcaatttctctctcttttcttactcatctgtaaaatgggcacaatttggattcttgtaaagtttgagtgagcttagatatacatagtgcctgccacataatacacatttgacaacaggtaactagaagtacttgatggaaagtatctgtaagtaaaccagtgtgtgccaagttgaggtaaatagatacgggatgagatgttttgcagtcattgccgggtcttagtttgtgactttgttataattctgtgctgtggcatagatgccatagccagatgtctcacttttcagtgtgacactgctaagaatctgaacacttctgcaggrcagaaaccggtgcactaacaaactgtctccttgcccaacaaagtttgcctccagcagaggccttttcattttcctttttttttttcctctctcacaacagctgtttccctgtttttggaaccacatagtgaattcggattagtaatttcactttccaagatctcagatacttgagaagttagcagatattttttccattttagatttaggtaccaaaaaagtaaaaacaaacaaacaaacaaaacgtgcagccatcaactggggggtacattcaccacttgggattatttcaaagcaaaagtgcatttactagatctatgtgacttctgatttgagggtcagttttttaaaaacatcaccaaccacagacttgtaaagtttgcagaaactgccgacagacccaaaatgctaaaggttgtaatctcttgaaaggagttggttgattttcctgttgcccctcctatcaactttaacctccaaccttctccggcatgtatcactacaaataaaactgctgaggtttgacaagaggatataaagtcagtaggccatcgcacagagacggccacgtgattttcttcaacctgaaatgaatgctctttaagttgggcttttcaataggaagtcataaacactcactcgtatcgctttaagttttaataattactgttccaaaaaaccccagaaatatacatattaaatgatgtttgacaactggaatttagtggttttgttattggttgtcttagaccattaacttggatttctgttcttaattttaatgtatacgatttcaagcaagcagcatatgatactgatataaacatggcatttgtatactgcattataaatgaatttttagcttgtgattaagacaaaccagatgacctaaagcaaacaatgtgtttgtattgctctggtgacttaaaaataatgccctgccctggattcacctgcagtgccttttgtcctttagggaactggagatatgtggcccatgtagcatttaagctcaccaaggtttctgaagtttcattatttttatagatttctcaaataattccactgtctgtggaaattattcatcctacactagataaatgctgtcttatgaagtctgtggcacgattcagactgaactcagctggctgtctgccgctagatcggatctgaacattaggaatgggatgctattgcatcagtaattgaacagtggttcttcttttaaaaagcaaaaacaaaaaagtacatctgtgtttttgtcaaggccagcttattagctcccaaacaaccatagagaggtggcctacctgtccaagtgttcttttttcacgctgattttctcctatctatgttattttcaccaggccattgagtgaagggaggacacaggttctgaaggagcagcaagtctgagaaggaaagggcattggtgctgggaggtgggagacagggcaccaaccaggtcccccgaccttttggccacctcagcagaatcctgccttttagcagagccagtataccttctgcaaatgcattgtgttgccgtaatgaaaatgcctctgtttgaaactccagacccagtcacctgagcacttcacttcttcctgagcaggatccagagcctagaaaagaattatgtgttggttcgcggtggtggtgtggtgggggcacaggagaggggaagaagaaacaaatccaaaccaaaaaacctatgtgggtatgactgtcatcttaaaattcttagggaactacatttttgtatgttccttatggcaaaaaaaactgttgagaccattaggaacctccctcattcgtcccatgaaacagtgcaattttactctataaatccaaatgctaattattaacaacagctgtagtaatccattgcatttattcagcacctccatatacattatttygtttgagctaaccactcctctaggaaactgaaagcattttaatggataggaaagcaaaggctcagaaagataaagtgacttgtccaatattaattcatcagcgtcagagccaggatttcagcatttactatgtaccaggcatccaaggatgggtttgattccttccctcaaggtgcttacagtctctgatgtgtgggatggagggtgacgttgctgatagctcaatacttaacgtacagcaggaaggagcactgaggcagtggcttgagctcagtctgtgggaggagacctgttttgatccagctgccctcattccaagtaagggcagttttaagaattagctgtttggccaattgaaaaatatcttcccgttttaactcactgaattgccagttccgaaactttttaagataaagctatactataattataaaagaggccaaccttataactcaactgctgaaaagggagacaaagacctacaaaacttattaggaaaagccatggagatcagcaggtggaggtgtggggctagttgggtggacaactcagaggtaaaaaagcaaacaaacaaaattataggtaggacaagaaaaagcatctgtctttttgctaatgtgaactgccaaaacctccccttttattttttatatttttgtattgaaacattaaaataaatgaacaaccttctaacatttagacggtactgggtaagggaagcccagtctgattgatttaggtattttaaattttagatcaatatccacaaaatgaatatttttactacttaactaagtgttctttatgtttgcttttaccaagaacttcattccatttttattgataaaagcatatatatatgcttattttatatatatatatatatatatawatatatatatatatatatatatatatggcactaatagagttaaaaataggcatacatatggttgagaagagatttaattcatgtcttaatgccatggaaattcctaggtattcctgaaaacaatgttctaaaagcacccagtgttgcctaggtggaagactctaaagttaatgtgagagccaggcacagcagctcacgcctataataccaaaactttaggaggccaaggtgtgtggatcacttgaggccaggaacttgagaccagcctgggcaacatggtgagaccccatccctactaaaaatataaaaaaaaaattgctatttgcaaccattgtggaagacagtacagtgtggcgattactcaatgatctagaagtagaaataccatttgacccagcaatcttattactgggtatataaccaaaggaatgttaatcattctgttataaagatacatgcacgtgtatgttcattgcagcactattcacaatagcaaagacgtggaatcaacccaaatgcccatcaatgatacagtgaataaagaaaatgtggtacatatacaccatggaatactatgcagccataaaaaggaacaagatcatgtccttcgcagggtcatggatggagctggaagccattatgctcagcaaactaacgcaggaacagaaaaccaaacactgcatgttgtcacttgtaagtggctgctgaacaatgaaaacacatagacacatgggtgggggaacaacacacactggagcctgttgggggtgcaggggagggagagcatcaggaagaatagctaatggatgctrggcttaatacttaggtgattggtcgataggtgcagcaaaccaccatggcacacgtttacctatgtaacaaacctgcacatcctgtacatgtaccccagaactcgaaataaaagttgatgaataaaaatgatttaccttcatttaaatagcttagattctgttgcctataaatatagggcactaaatttttatttatgcaggataactgtcctggttatgccaaagatatattaaatacaatgtttaattgatgactcaaaacataccttaagtttatctttctagaactttgtatttcagaagataaagtagatgaggctgcatctgtctgcactgactttctcctcccaatgacaaagaacgctatctgttttgaagtgacttttaatttgttgaatattggtggtgagtggaaaatgaatgtaaatgaaatatcatattgctggagcaggtacaagggatgtgaatgaaagcttcctgttttatgggctgctgagaggtgatagctcttaaaaagcagtctgctaagtgatcccaagttaatgcaaattaacagttgttttctttcagaactgtgtgactgaataaacatttaccatttgtttcatttctactcatctcttgaaacagttgctacaggtcttaatagtaagactcgaaacatataatgtattagccttggcacatcaaaatattgttcatcttccaaacttgagatattccagtttggcttctcactgagtttataatgttctgagggtatgtatctaaaaacgcatcttactaatctcctggaattgatttttttaaaaaagtccctgtaacttgtcactattcccagcttaaacatggtctgtcaattgtgagattgatgrgcattgtggtacatttcaatcttaggaggggcctgaataagaaatttaaactattaaatagtgttttggaagagagacgtatgatatttgtgcaaaataataatgaggttaaaaatggaatttcagccttagctgaaagagcaatgcctcctgcttttttgtgcaagcctttcgcatgattcaatgtgatcaccttttctcatagcaccactgcggcaactgtgaggggtaaagaatttcagcaattgaacaacagtatcaaataaattcattttaggaactctcctaaaggtttattccaatcgttaacattcctggagctggtggtgtctgccaagtgctcagcgctagttcacaggcagcaaatttagcatgacaaagttgctcccattttgcaaatgggaaacctggagccccaaacggagcctctcacagtaaactgcagaatggagatgagatcctagagatacagtataagggattatctgggatcatgtagatggtttgcagttgcctttgtatggctaccgggttagatcattcttggcaagtttggtgaattagtatcctattcctgagtcccatttcaatacctagcttggaactcttccactccctgaaaacttccattgaaatttttatcaatggtatttgcatagacaaaatggaatcaaactattgacatgtacttttttattaaaaaaaaaaaaaagcaaatttatgtgaatggtttgtcagtggagataatttagccaaaggcacctgtgttctctaaggactctgcctgaaaagacttttagggggagcttggtgaattttttgtctttaaaataaagctgtttttgaggtataagagaagcttggtttttgaaatggcacaatgaataacaaaagccccttttcaccccccagaaaaggactaaaaagaacatttgttagactcttggggaagaattgtgctgttaacatgaaagtctagatacaagaaaagggaaaattggaagaagaggaggagcaggtaatactggagaaatgctggaccctgaaagcaacttgttttgcaaagatgattacactcaagtttgggttcaaaacgtaagaaagcatgcttatagtgaataaaacagctagaagataaaacttrgcagaatatcctgccgttttgtacagacttatgcgtgggtatgcatgtgtttctctctccattccttcctcttctcccacagtggccctctaagtatattctggcagacaagtggccaataaccagtcttcataatggaggtcaggtgatttgtatttctggatttttagaatagacagggcttatcattgatttgaagatggaaagtacactatttcactaccccctgtcatttagtggatgtggttcttgagtatgtccagaattatawggctgttaatgtgtcttgagccctgacctaaactgtagatgagaaggctctttaaatattaaaatggagaacaaacaggattgcttatgcagtaggaaagtgcacagtattcagaagtcaggcctaatctttttatggggcagctattgggcatgctacatttctgtccaaaatataactcttttgaaaactccctctttaacaaaaatactaagttgatggtctctcttaaaaaaaaaaaaaaaaaaaaggccaagtaagggaatatataacttcagagttatcaaatatatttatcccccttacatgtcaaagtttaagtgctgtgttttgtatatacagtcatcatgatatttgaaaaggccataaagaaaaacaattatataattgtttttaaagaacgcagaagcaaggataaaaaggcctttagaaactagagaacagtattaacaattatagtacctgaagtcaagctgcaaaattctgtcctaattattggggatgattaattaagcgtaaagttacacgccttgaaagaatttcagaattatttttctttgatttttctaccaaaaaaaaggcccaccccatcattttctattttagcagtttccacaacttaaacattaaattcttattgtttgatttctgttatattagtagtgtgtgttttgcaattctaatcttcacgtttttctttctttatcactgaagtaggccttttgaagctgggaaatttttcatagcaatattgacagtgttcacatttgcatgatgacagccaaggaatggagcagtaatttttgaaattgcagaagtatttagaacactgataaaagctgaaatatatttttgatggattgaagttaagcatacatgatttttcctgctgtcaaaaggctctgaatttagtgaatatttgcctgctgtgagaatgcaagattaacatcacaaccatcacccgggcacccaaaccctgcaatttaatagctttttaggttctttcctttttctaaacagcaattaatctcattttagtacaattttctcgtttctgaagtcgctcattgaatcgctgttttgttcatatttggcttcagctcctctgcatagtcattaaagtcccaattaatgtcacctttagctgaagagtactcatttttattgagaaaatgacagttgctgccatgagtagtgcagtgtaatatacattaattgccctgtaacactggtaattacgagtttttcaagcctctcagtaaactgtcatgcctagacaagactgtgctaaaatagattactcattagggagacctgtcctattttctggtgagttcttagtgttggtttaaaaaaaaaaaaaaatcttgagcttgaacaaatagttgccaagagcaatttcctacaacaatatcctcgtgttgggtttttcagccatcacttaagattgcggtcagcaaacagacagggtgcagtggacgctacagatgttgaatcttgagcctttatttatgtggatcacaagagcgaacttaagggcgttttattcagggttgaatatagaatgtaactgaagagtgctcctagagggtgttgtgttaaaacaggttcattccctggtatttcgagaatatgggagagaaccagtgtgccacacttaccaggtctttatcacctctgtgctgagtccagcaaggagaagcgttgatgcctttattcaacaaattcctatgaggactggagtagataaataagtttgaccccgaacatggtgagctttattggtttatatggttttaaggtacagttttaaaaagggagtggggaatccttagttgaagagaactgtaattatcttaaatgtgaaattaccagcccacaatcttgttttaaaatatatggttgctgactggcacatttggcagtaggtttttgtttttgtttttgttttcaaatcatatatctaatttcagtgtrgagattatttttcaactccctgtttctctcatatttcatatgttggtgttttaacacaaaatagtgaactttaaagcccatagttgcttagaactgacaaaaagaaaacctttgttatatccttgcctaaagcaggtgttataacaatctgctctttccctctctctctaaatgaattttgtcacagcctttcaagtttccttgtggtgatgagctaatgaaagtagatagtacaatttgtgctgaccaggtagcaagtgccagctcacagctgaggatagtttaaaaaaataaataaaatatagcatcatatcactgatttacccaatacacagcattaatagtgagagaccttggtgtgtttatctgtttgtattggtgtgcatttatcgaattgtttatgacaagactaattggggtaattgtagacactgaaattacctgtcagctatatgtaaccacactccctttctttctgacaaatgatgacaactgagggaccccgtagcattactcatgatggcttttcgagtggtaataaggacaataggggccctggctaatttgacatggacagccttcacaacaagaagccagctaaatgacttgtcaggaggggagagaagtcagaaaagtaatggagtcccccatggcgctctgacagggagatgaggcaatttcaacggaaagtgaaaaggcttcagtttgtcaagtacttagaacaatcagagaacagctagaggctggaacctgacaataaatttgtgaaccatggtagcagtttcatataggtcagttacttcataatggctgtgcagtactcagagggtcctgttctcatcacatacttcacgtctaccaaccagagctttgtcaccttaaatttgtgctctgttttacgtcgtgggaatarcagttagggttatggaggcccaggaatggaaagatggtgtgagttgcagttgctagcctgttgaagattaaacaaaaatccagccatgtaatatggtgatggcagcccttacatgagggtagtattaactcttcacagtagtgagttgtagccacttgggtcgagacctcatgaactcttttctcgcttgctatcaatccgatacaaaatgcagtagtccctttctagtccgaggttttgctttccaaggtttcagttacctgtggtcaaccaccatctcaaaatataaatgggaaattccagaaataraccactgataagttttaagttgagcaccgttctgaggagcgtgatgaaacctcacagcagcccgctccatcctgcccactcatgagtcatccccttgcccagcacatccatgctgtgtacactacccgcctgttagcagccacatcttctgctcctgacatctagacatccacmtcatcttggctcggtgacccagggtcatctgaagcagatgatcctcctcctgacctactgtcaggagagcagtrgtagcctaatgctaygccaccaggcctgagtcattcacctcacttcatctcatcatgtggacattttatcatctcaaatcatcacaggaagagagtgagtatagaacaataagatagttttgagaaagagagagagaccacattcatgtaacttttattatagtatattgtcataatggttctttttttattgttactctcttatatgcctaatttataaattaaactttattatatgtatgtatgtataggaaaaaacatagtacatatagcgtctggtactatcatggttttaggcatctagtgggtgtcttagaatgtatccccactgggtacaagtgggctactgtataatactactattcataggctaaaactcctaccagcacctttttctctgattgtatcaatgtgatactaatctcagagcaggctagaaaactggtatataaggggcctccctcccctacaccctctacctccaaagctgtaagtagcttctggccttgatagtagcatgtggctacagtgtgaaatagtctagtgatatttcaacagttttactgagcttctggttttgtttcattggggacaatcttttcattgtaaaaaagcaagtttctaaactggacgagccactttgcctctctgtgcctcagtttcctcattcataagatgaggaaaggcaagctgattaaatttatgcagaagttgattgcatgatcttgatgcatgtacaagttagaatatttttaagcaagtcaatgtattttatgcacctgcgacagtctttttcttcaccaccatcactccagatctttgtaaaggcaataacaccctttacaaagaaatatatcacctttgcacttaatggaattcttctcggaagatttctgagcattatttaagctatgaaatctatctttttaatgttgtctgaagaagaaagtgtgtattcagtacacttattcatactatgttatttgtaagttttgaccttcatgtggagaaagattcctttctaaacataatacagtataatatctgttaaacttctcagtataacttaaaacatacagtttcacaaatattgttaaacctaaccaaataggttgcctaatgccctaagcaacagttcagaaggcttagaaacccatccagaaaaattatgaaattgtctttgcttttgcatttctctgggggtgagagtggttgggatagggagttcctcttatgcccagtaaaagcagctgcccacacatccactttgttcagtggtttttgagttgcctgagggtttcagtgtttgtccaaggttttcatcgagagcagaataagcattccaccccaccaagatacatcgaggggtgcaggaccccagcagtaggctcagggacatcaggagcaattgaggagtcacagaaggagtaagaggagaggcgcctcttcttgtctgtgctcccaagtgaacaaaggagaatttggcttaaaatgccccaggccatgggttctgtactacaaatatgtcctcttcccctgaaaatgcaacctgctgacaggaattctccattttgaattattaggtcttgcaggtccatatctgggatgagtctttccctgcatcagccccactttggagatattctttattttcctcacaattgctcagataaatatgttttttcttgtggaagaaartcttttaatttctaaaaaaaaaactcatttaaaataaattgtgctttttttgtaatacattaattctaaaaatctaaaagttccagataaacaaaagtaacatcattatcttcccaattcatttacattgacactattagcattgttaacaatagtctgttcttatacccctataaagaactacctgaggctgggtaatttataaagaaaagtttaattgactcacagttccacaggttatacagaaggcatgactgggkaggcttccagaaacttacaatcatggtggaagggcaaagcagaagcaagcacatcttcacatggcagcaggagagagcaaacggggaagtgctacacatttttaaacaaccagatcttgtgagaactctatcagaagacagcactaggggaatggtgctgaaccattaggaactaccccatgatccaggcacctcccaccaggccccacctccaacaattgagaacacaattcaacatgagatttgggtggggacatacagccaaatcatatcaggcatcacactgtatatactgtagaatacttatgtgttttttacctcagaggatgttgagattgtttttcatatctataaatatagctctatgtgaccctttgtagtaggttcctaatgcttgcattttatggcaatagaatttttttaaccagtcacctgtaatgggtatttaggaggtcaacataaatagcactgtaatgaacatcctcatcatgaaatgagttaagacatggaaagtacaatagcctcagtcaacattttcattctcttctgtcttgtaaaatctgtgttataaatgcataaagctgtggcacctgtgttttctgcaccatgatgtgacttttgtgataattctgttttttccttttaatattcaactaaaagaactgttttcatgatgccaagacattttcatttatccagttgtctagtaacctaaaacaaacagaaacaaaggtagcttgcacatatgcgtttgttttctaccatccagttcttaggaacttttaattcatctctaaagttattttagaggcaaagaaaggttatgtgttgttcttcaaaaagtatgcatttgtctcttccacagaaattttaagtgtttattcatttcccaactccatcccgcacctgaggcctccatcagcatccagaataaacattttctcctgtgaaggacataaggagcatctaagaaatggtggtggtggtgctggtggtggtggtggttgaacacttcattaaatcacttttcatatccatacatatttctttaggataatatccagataatagactttccaagtcaaagggatcacagagttttaaggccatggttacatatttgtaaactgcctgtcacagaatgattgtagcaatttcttcttctgcaagtagtgtgtaagtatgcccatttctcagcaccctggcccaagtcagatgccatcacttcatggatagtttttacactctcattgttactttccttccccttgttttcattcagaatgcttgcattttactttgagattttttgccatcggtcattttataagatacgccttcaccggcacatctaaaagctaaggcacttaacaattagaaagttgtatgatagagaccttcagtctccagttataattccagctctttctgaccctcaagctctggaacaggtcacacttttctctgctcaggacactagatatttcagattatttcaagcagtctcctgcccactttcctgtgcctttgttatagctgtcactgtagattgtttccgttgtgcatataattgcttcattgctagtaactggcttaatgttgtcacagaccttattggctcttcttacctcagatttacatatagcatcccaaggctttctttagggcatttatcatttttcctccaaatgatctggtgacagtatacagctattcaagttttcatcagccagcagatgatacggtctttcttctttgctgccacaagccagaaaagagaggaaatcaggggaaatgctttcattactgcacttcaaggaggcgctgtcrtggagtcagggagggaagtttcccaaagttcactgaactgacactggaagaagctcttgtgggcagccccatccctttgtgacaccgcaacgaaagcacttcatcatctcttgccgatcctgctttcatgcagacagcgaggcatcttstaatgccagttgcctttcctgtttacttcttgckccaggaaaaagtctgagcaattttttaggacattaactattactgttgcatactgatatgcaagattttgttatactttcttgaaaaggcccattattttcatttggaaagggaaaaaataaaatagagattgccaccaattgcaaatgactaacactaataaatttaatgggtctaatagcagctgtgactgtggagttccttgtatactgaaatggggttataaacggtgttaagctcacaggctggccccrgaagtctattgcaggcagaatgtggcaattctagratatcagtaggaccaaccttggtttcctrtcatatctagagagtaaattaaaaatgttcaaactctaaatgaaaggatttgaagccttaggattcactgggcaagctaaactcagtaggaaggctgcccttgtggtgagcactcctagacttcatgcctttcacttctttttccctctgtttctaacctctcctattctttaaacttggaacttttccttttgttacacgcaggcactttcttggtaaggaatccctgagaaaagcttcttgagggggcagtgagcttttttggtcacccacatattgctgaagtagttaaggcctacaagatttatttataaaaatggctattctgttctgatttatctacaagtttttgcttaagtgacttatagatgacttttgcygaggcacctctgccccatatgttgttttgttttgtttgtttgtttgtttgtttgttttattatactttaagttctagggtacatgtgcacaacgtgcaggttagttacatacgtatacatgtgccatgttggtgtgctgcacccattaactcgtcatttacattaggtatatctcctaatgctatccctccccmctcccaccaccccacgacaggccccggtgtgtgatgttgcactttctggtccaagtgttttcattgttcaattcccacctaagagtgagaacatgcggtgtttggatatttgtccctgcgatattttgctgagaatggtggtttccagcttcatccatgtccctacaaaggacatgaactcatccttttttatggctgcatagtattccatggtgtatatgtgccacattttcttaatccagtctatcattgatggacatttgggttggttccaagtctttgctattgtgaatagtgccgcaataaacatacgtgtgcatgtgtctttatagcagcatgatttataatcctttgggtatatacccagtaatgggatggctgggtcaaatggtatttctagttctagatccctgaggaatcaccacgctgacttccacaatggttgaaccagtttacagtcccatcaacagtgtaaaagtattcctatttctccacatcctctccagcacctgttgtttcctgactttttaatgatcgccattctaactggtgtgagatggtatctcgttgtggtttttatttgcatttctctgatggccagggatgatgagcattttttcatgtgtcttttggctgcataaatgtcttcttttgagaagtgtctgttcatatccttcacccactttttgatggggttgtttttttcttgcaaatttgtttgagttgcccygtactttgctggccacactcagtaagagtcaagattacatccagttggcttcataaaacaggactttctaggacagctgtgctttgcttgcacctcatgggagttcagggcctccccagactggaaagcatagaatccagtttctctaggaacccaaggtgtcaaaacaataaatccccacttctctgccatcagcttgcactaccacaagccagaagagagaggactgtacccccccatgttgtggtgagaaaccacacccataacgtctctttgggttagggagccttccttgctttccacgtggggttcagggagcttgagagttggcatcaaggctcactggagtccccttctacattgtatgtctgtgttctctgtgtagagttcaactcaacctcaggccaagaatcagctgctggctccacctaaaacctgtttattccttaactagatactcctttcagcagctgtggcttctaggaggcaaacactaactagagggaggtggcagcaaaggctatatatacatagtgaatgtccacattcagtgacagcctgtataagtctggtgactgtcagtatccattctctatgcgtaccaaaacaaaccacaagttcaaaaaatsattccagtaaatcaccccttctattcagacttcaaacaaaagaagattgggggtggaggagggaatcagtttgacctcacactcagagtgaagtatctatgctgtgagttgttttacctgttgtgataaattagcaaagccaataggccaatccagaaatccaccatggactaagtcctaataagcatttttattttctttctgtggttttggttttttttttttttttttgtcattgtgaaatctgctgtgttataaatgcataatcctgtagcacctgtattttctgcaccatgatgtgacttttagagataattctgtttttactgttttatgatgccaaaagactcatttatccagttgtctagtaacatgtaaacaaacagaagcaaaggtagtttgtacatatgcatttgttttctaccagtagtcttcagagctttggattcagtttttaaaggtatttagtaggcaagaaaatgttaatggggttgtatggaaaaaagaatgcrtttatctgctacatagaatctttgtgtttgtttattccctgccccattcccatgcaaagcttctaccggcatccagaacaagctttttctttttatggttttcatcttcattaaatcttgaccaacagcttaaatatctgcagctgtcccctaatatctgttctccccttctttctttaaatcagtgtytggttttacttaggtatgtagtcacctagaataaaaactccagctccccttgcagtaagatgtatccatggggctcatttctggccattggaatgcacataagccgaagtgtccagtgcaactttttaagaggaacagacacatgcccttctttgccatttgctgccgataagaatgtgggcctgatgggtaatgcctaggttgccattccagggcatgagaggaaactatatgctgaagatggcaaagcgagaaggtagtaggaatctaggttcctgctgactctgcrgtcaccatgccagcctagaactactttcctttgtgcttaattttcttttcttttatttttctttctttttytttttttttttttagatggagtctcgctccgtcattcaggctagagtgcagtggtgcgatctcagctcactgcaacctctgcttcctgggttcaagagattctcctgtctcagccttcctattagctggggtaacaggctcctgcctccatgcctggctaatttttgtatttttagtagagatgggatttcaccatgttggtcaggctggtcttgaactcctgacctcaagtgatccacccacctcggcctcccaaagtgctgggattacaggcgcgagccaccatgcccagcctgagcttaattttcataaaggagaaatacacttttttcttgtttatgctaccactattgtgatttttctttcacttgcagcagaatttaattctaaccaacacggtaggtgagatgtgggggataaaaatagatctatatcaagagagtttacgttaaaaaaagtagtcaaacacaggccttctaactctggggccaatgtttttcccatgtctttggaggccatgttccattaaatgtaatgacggttgaatttatctaattttgtttttaacttgattatttatagttatttaaaattcttaattattatcctttttcctaaattatgggatttgaaaatggatctacatttttaacagccttgttgagatataattgatataccaaaaattgtatctatttaatrtatacaatttggtgagtttggacataagcatctactcatgaaaccattgctataatcatggtgatagacatacacactactccaaaagttttctagtgcttgctttattttggggatttgtgtgtgtgttttctatggtaagaacacttaacataagatctaccttctgttaaaatttgttaaaattttaagtgctcaataccatattgctaactataggtactatggtagacagcagatctctagaatttattcctcttgcataactgaaactttatacccattgaacagcgacttccccttgcctcttcctcccggtccctggcaactaccagctgctctctgcttctatgaatttgactattttagatacctcatatgagtggaatcatgcaatatttgtccttgtctgtcttatttcatttggcataatgttctcccattcatccatgttgttgtatatggcaggatttttttcttttttaagcctgaataatattccactgtatgtatgtactacgtattctttatccagtcagccattaacagacctttaggttgtttccatatcttagttactgtgaatattgctgccatgaacatgggagtgcagatatctcttcaagatcctgatttcagttcttttggataaatacccagaagcaggattgctggatcataaagtagttgcatttttaattttttgaggaccctccatactatttttcatagtggatgtaccattttacatttccctccaacagcatacaaaggttccagtttgtctacatccttgtcaacacttgctaccttttgttttatttcttgttgtttttataatagccattctaacaggtgagcggtgatatctctttgtggttttgacgtgcaattttctgatgattagtcatgctgagcaagttttcttatacctattggccatttgtatgtcttctttggaaaaatgtctattcaactcctttgcccatttttaatagggttacttgggatttttgttgttatttgattttgggagttggtcatatattttggacattaaccccttcttagatatatggtttgtacatattttcttcattctgaaggttgccttttcattctgttgatgggttttgttttttgtgtgtttttgctgtgcagaagccttttagtttgacgtagtctcaagtgtctatttttgcttttgttacctgtgcttttggtgtcatgtccaggaaatcattgtcaagaccaaagtcaggaagctttttccctatgctttcttctaagggttttacagttcaggtcttatatatgtttttaattcacttcgagttgatttttgtggatggtgtaagataagggtccaattttattcttttgcctggggatgtccaattttcccagcagttaaaaaaaaaatggatctatatttttaatactcagagttgactctgaatcttgggaaagtttccttccaaatgtgttacggttcagcagtttggaataaaattgtctcagtctgttctctgttccctatgtaatgtagatgtatttttgggcttcctgagtcagatctgagcataacaaggaccaggagttctagcctgtgggtaagggttagattccaacatcaccagaatgtgtagccccatccccttttatggaaatggccttacaaagtcacctagtaatttcatatctgttgaattctagttgtgaaagaactattttaagagttgacacagttacatgtttattaagtgtttataaatgtattagtcactgtgcaaacagagaagcaggtgggcttcatattcccacctgttcaggtcactgaagcaaagccacctggaaagcttcacatgagtaattggaccttcagccttcagacttccacttgcattaaattcagcaaccaagactttgacatctcctgaaataccttctccatgtgccctttgttattagaaattagccttttttgaatcatgtgtagagtgaacttgaaattcaaatgtattgcagtagaggtaatacagacagtataggtgacatcttggagtgacttgtaaaaggaggctgatccaataagtgtttctaatttgccttccatcaaggaatgacttcctcattttaagtagtcattattaggaatttggaagccctgagaaattggaattattgattgagtttcttcataggaaaccacctaaggaagagagggctgtttstgacccctcatatattgtgctcattgcaaatactagtctgtggttcagctcctgttacctgcccttaactgcctcccacccccaggacccctgcatccagaggcttatagatttcacggacagccagaggaagccagacagtgttggcctgcatgattggtattagtttcatgataaaggagatgtaatctttaaaccctgtgactccacctgagctgttaaaggccacatggcattgtggaagaaagccctggactctgcatggaggggcctgacctttggtccaagtcctaggatccgtttagctactgcctcaatcagacctcttctctgggcctcactgtcttagtttgatgaataagagagttgggctaaataatccaktgccaacacttgatgcacagacagatccttccactcagctggccttctttccaaactatttgtgggaaaatttgaactagactgtagctgctggagtgctctccctgttcccaaaggtagcttttccccttcaacttctcgcctctggccagcttttctgcaagccagaaaagaagtttcatttgggaagccaaatctgaggtgtatcaggctgcctttacgcagatccccatccttgcattacaaaggggtttgctgtaaactgctgcgagaatatttgttagtggcctcaactggtggtcagagtggggtggaactggagctgctgccctgttgacttccatggaggaggtagccaggctctggtgaagcaaatcaagtggaatccaggctttggctggggaagcaggaaaaagcaaagaagagtaaaagaatgaaggtagctgaaggagccaaggagaaaggcctcagagtctgaaagaaaggagtttcctaggaggacctttaaattcagctgtgcactctaaagacccagttgtcatttgtaccctaattatgttatggggctatcatgaaatgtagagagaactggcctgagatctgttataaaaaaaaattgcaaaaggttgwggagagataagagattatattcaagtgcagagttaagaatcatccctgggccttctgataaaggcagattaatattataagccccacacaccctaaaatatgtagctaayattgaatatgcctttggttagcrcattacatttattaccccagaggtagtttatatcagtcagggttctccagagaaacaaaccaattggacatatgtgtacatatattgagagatttattttaaggaactgactcatgtgattgtgggggttgccagctctgaaattcacaggataggccggcagactggaaactcaggcaggaattgctaatatgttcctgagtcctaaatctgtagggcaggccagccgcctagaaactcaagcaggatttctgtgttaaagtcctgaggcagaattccttcttttctgggaaacctcagattttgctcttcaaggccttcaacygttggatgaaccccacccacgttacagagggtactttgctttactgaaattgattatggatgttaatcgcatctgcaaaataccttcacagcaacatctggattagcatttggttaaataactgggcaccatagcctagcctaagttaatgcataaaatttaaccatcacaggtaggtactgttaactccattctactgacaatgaaacgtgaagctgaaaaaggtttattaagtaccttcctcraggtgacaccattctttcctattctttcatggttgggccaagcagtcagmcttagaaacccagctctcaacctaaaatgcttagctgcctgccaaaaacgcaacgagccctgggggaaggtgtttgctctaaagtctaagaacctgtgcgataaatgatgttacagtcagctgatacagcagggtacccaccggcaattttaaaaagctctttttgctctattgggcccttatgaaatgaacctacagggtcaaatggacgatgtcaagacataacccattytcttttctctcccccatctcttttcccttgattatttctcccctttcagccttgtttttcttccccactcagcttgcttcattttccttttctatttctctcctttctccctttctctctctctctctctctcattttttcctgtgtattctttttaaaaaacattatttcttcctgaaagggaaatgaaaaggaagggagaaaaataagggactttataataaatggaatttgagccacttctgacatctgtagtagcaactgtggcttgatcaggaaaaaaaggggagggagcgaaagagggagggagggaggaaagcaaaaaaaaaggggaaagggagaatacaaaggaaggagggagggagagagagaaaaggagaggggagagggagaattcaatcttaacttcttaaaaaacacaatctctttctgatgatgatgatgatkattattattattattattattggagatagggtctcactccgtcacctaggctggagtgcaatggcacaatctccactcactgcaacctctccctcccgagttcaagcaatccccccacctcagcctcccaaggagctgggactacaggcacacaccaccacacccagctaatttttgtgttttttgttagagacagggtttcaccatgttggccaggcggtctcaaactcctgacctcaagtgatccgcccacctcagcctcccaaagtgctgggattacaggcgtgagccaccacgccgagcctctttctgattactctggatgattttatgtgtttggcctctaggagatctatctgtttcagctaagaatgttcaagttactagagcagtggctcccaaactgctgcacattagagtcacctggtagctataaaaatgctgctgcccagcgagatgccacattatgtgaatgagcatctctggggtgaacctagtgccagtccttattaaaactctaggtgatgccaaagaacagctcagtttgagaatgaatattacaaaatactggtgcttaagactgctggatagtgatgagaagtcacaggacataggagtgcctcaggggaggaagagaggataaataagaactggaaagggactggaggaaacccaggccattctgtatctcattctgaggaatggttacttaagatttttatattttatatttcttattgtatatattgtataccccaagggtggagggctagggaagggatagcattaggagaaatacctaatgtagatgacgggttgatgggtgcagcaaaccaccatggcacatgtatacctatgtaacaaacctgcacattctgcacatgtatcccaggacttaaagtataataaaaaataaaaaacagcaaaaaaagaaaaagtaaagtaataataataatacatacacaggcacactgatagctggtcctacccttagggattctgatttgtgtggcctgggcatcgatgtgtaaagcttcccagccaattgtggtgcacagccagggctggaaaccatagctctagaaggaggctcactggttgctttcaaccacgcttcaagttagcagtgccatggccaggtctctgtagaccagcatctggcttcagccttctattttatccattcacaagaatcaggcaggtgaaagaagacagtggctcccgcctgtaatcccagcactttgggaggccaaagcaggcaaatcacgagatcaggagttcgagaccagcctggccaacatagtgaaaccccgtctctactaaaaatacaaaaaattagctgggcacggtggtgggtgcctgtgatccagctactcaggaggctgaggcaggagaattgcttgaaccagggaggcggaggttgcagtgagccgagatggcgccattgcactccagcctgggtgacagtgtgagactcagtctcaaaaaaaaaaaaaaaaagaagatagactcacacaaaccaaactcacagcaactgactgaattctgtagtcctgtgcattcatgctgttaaaagaaatctgtcaacagaccagaagcatttgtttcagggacagaagtgaggatcctctttggttcttcttttcttagatattatgttaacagttaccctattgccaacacatcatatcttcaagtagagtgtactgtcccttatccacaattctgaaatcccaaaaagctatgaaaactgtattttttttttagtgaggtggtgtcaaaacatatttagcaataaaacctgaccagaactcatgtaaagttagttgaaggctttacttactttacttggcgcaaatcgtcatatgtttttctttggatatatgaatacatttgattgcatggtgctgctttgttccccactctgggtataacataatgtacaatatttataaatttctaaatctgataaatttagttcttgaagccatctggcctaaaggcttcaggtaaaggattatgatagcttctttatatattaaattcccaaaggacctcctctggtcttgggtaatagcccagcctcagggcagtccattttctaaccacttttggtttgactatgctggcaggcaatgatgttcatctcagcagggaccaactcagtcttgcttcccattgctgtgcacaaagcctggaatggtgaggccctgatagatacatactgaggaaatacagcaatctatggtgcattgatttctctagttttgctgtcagagggtgaccttttccagtcttctccctaaatcctgggagcaccatgctctgataggatctgttgagctgtatctccaaattccaaaagaattgtgttaacagaggaaatcagttatttaaatatattgttatagagagtggattgattcctaaagagaggaaagaaaaacctgtataacgcaaatagattctgttgcaagaaactagtagtattagcactatagtagtaacagtaatgctttgttctctcctccctctcctgcattgtagttacatgcatatttcatctgctagtgttcaggcagacttttagaatcaagaagcccctcattcttcatcctgtttgtggggggtggggggaggttcaggaaaaaaatatcccaggtgtgcctttggtgttcagtttttcttaccctaatagctatatgggtctagtgatctgggctcagacagtgactgaaaactgagatttctctccactcttgccaatggcacttgtctctgagggattttcaggatctagggctattggtcccatggtggatggggcagtacatccatcccttattctctagatctgtgctgttcaacagaacattctgcaataatggaaatggtttatatctgtactgtctaataccataatcactagccttatattgccattcaacactggaaatgtggctagtataactgagaaactgaaattgtaattgtattagttattttttattttgattttaatattacacgtggctagtggctactgtattggacagcacaggtctagatctggggtacaggctcttttcattctgacataaatggctgaggcattctaaggctacccagagaagatcactcaactcagccttaaagtatgggatgaaataattccaggcagaagcagaacaagtaaagcaaaacaaaaayaaaaaccaaagcatagaaatgctaaagaacctggcacattcaaagaactgtatctgactctatatggctagatattatkatartgtaggttgggtgagaggtactgggaaagtggtaggaagtgaattttctgaaaagacctttcaacttgtcaggctagggataaacccttcagggtgtttaaaggtgctcctgtaatgtcagctgctattctgaggctaagaactctgacaaggagttatctgtgccacttggcaaatgtctccagtccttgacacctctgaaagctacttcctgcacaccagaagcatagtttggcatggaatgtcctcctgaagttgaactgcgaagagatttcttgtggtttctgcagatggctactgtgcagtactgggagtcagagaagagtcttctcagggacctgagtttagggccgccttcccacacccccaggcacctgccggcaagtaactgacaggggtgtgtgtgtgtgtgtgtgtgtgtgtgtgtgcgcgcgcrcgcgcgcgcatgcatgaggggagtcacaatcatagccccttaggttactagagacaggatttaaacttagatgaagggtcactagtcctcctccaatactctccaagggttaacaaactggaaattcatctaaacaaaataagcacgacctattcctactctggttgtttttttcccccaattgataagttgagctatttggaggggacgtctgtaccatgtgtttttcctatactaaaattttaaaagtaattcaaaacgttcattttcacggacctaggacagtctaaaataaattgaaccaagaatttaacttttcatttagcaaaaaaaaaaaagtttttctctgaagggtaggaagactttgcaaaggttatcataattcacattttttccttatttaaaaagaaaatcccaatgtgctgttggtagttttcctctttttcttctgaatctgattctgctttgacttgagttttgttggtagaacagttgcagatttgactcttacaagtcaaacatatgaccgtgtgattagtagacttcctcaggtgcacagtaggttattcaggccatcttacactcctaggactggtctccaggagaaacaaagtgagaaacaaaaagaaaataaatctgtcgcattattaaatttgtgctcttgacgcctgcagttgttgactgtagcaagtgggggttaaactgtcagcttgacaacttgtaaagctctttatcatagaaagcaagaaaaaaaatcaatgctgaattacctcaggaatattattgatgacataaatgtcattttctgtttttattrctttttattgtatttagcttgtaattcaaaccactttctaattaatttggtttggctcagttggaaatagaaaaagctaactatctaataggtgacacatgtcgcagagaaaccttacaacatccccatttccctgagatcaatcagccatgaaataacttaccaaacttttgtttttctagcaaattcttaagaaatacaatgaaattaaatttgtctagtccaaagaaacgggaagaaacatgaatgagcaaaagtgacctgaaagcccagttttatctagctgtaatctctcgtctagttgttaaaatatcccgaagcactcgatcatgttgcattttaatttcaaagccatgtgttgtattagcaaagtgcacatgttcctgatttgaactatgagttccccggctgttaaccagaattctcggctggcacggacaaggtctccaggaggtcagaggcctagagtctacatcttggttagatcttacccgtgtggaaaccagaagcctgggtcaggcagcagtgcctatgacaggccctgattagattaggactacatttatcaactacrcagagagcacacttaacctttcaactcaagagtcttgatgtacctttattttaaaacaaaaaggtgaatgttactctgccaaagtcttgatccaatagcaatgaagtataacatgcagctttttctaatttcatctattaccagatttacacagggacatatgcaagatgtataccctgacaagcgttttatctgttttctaaatgtataaatatgatatttcgatatttatagaaacctacttcgtaattttacattatgttcatttttttccttaagagcttagaatttttctttggtttctacctggatttacttactgtatatatgtatgtacgtatgtatgtattcattcatttagatttagtagattagaactattctagtaatcgattaatatatcatgaaaatccatctgtggaaggagtaacaagctgcttttagaaacttgatttctttttattctcccaagtatttggcttaaatatttctttgaaacatcacttaattttttcaaatatgtggtttaattttctaggaagtaacgactaaacttttaacaagacaaattgaataatacagttttacagtaggtttttcaagtacgacccattcacattcttctgatgagcctttgatcaagtctttcactgctgggcagtcttacctcacagatttaggatatgtcagggacatctgtgtcctcctaaatctgtattggagagaatattcagggaacatacatggtggtgatagaatcatggtatggggaatggtctgaattcaccaccaatgaacacctgaactctcttcattcatttatcttctagttcctcactgagcacctaccgtgttgatcaggtggagagaacactccctggcctcttgaaactaactttctactttcccagttctgcatcagaatccttgttctatgccagtgccaagtcacatagagctaaaaaatattcttcttggtaatcatgcacaggctgtagccttcaaaataaaattattcttcgtgctaaaaggatggtgttttctgtcattatattgtttctgcagtatgcttgttcagttatgtaaactcattttctgtgacatttataggatcctggcctagaatgcaggtttaaaggaggaaaaggcagcaaagagctttggtagaaataattatttccctgagtaaaataaagataaaatgagttcatttaaattatagtaaaagtggttgccagtcgcccaacatagtgatctcttttttttccttacctaaatgaaatctaaatcttagagccattttgaacgttttctaaaacatgaggttgttttgccaattcgctttcatttggaaataatttttaaatttcctattatatcataaactttgaatttcaaaaactgctgcatgaagcgctgttttcatctttttgtcccaatatttttgatgccacacttctgatcttaaggttatataattttaaaggttagtctgaatttgatatttactggggaaaaaaatacttatcagtagggattaccattatcttggttgttgatgggcacattttttaatagtgcttactttactggatgtgtatttaataggtccatcagcaatatttactgagcccagagtgtgaatagaatgaaaatgttttcaacgttgtggctaattagtgacgggagaaaaaaagaaatacttgagcttaaattgttttaataatttcctcagtttctaagtaaatctctgcacccacacaccctaccaaactcacttgctcatttcaggtcaccttatgttggacaaacccttttagagttacgctttgttggtttttagatctgaaaaaaaaaaaaaaaggtccattgtccattccctccctctccctgtttttcagaaacttattttatatttaaaggttgccaacattctagctgtcaaggccacacacagtcaaccatttggacatctaatcaacattcagaagacatttattgagcccctactgtacaccagactctgttttagacatcaagtttgcatctcaaggtttctatttatatttttattttttgagacaagatgtcactctttcactagggcagtggcccagtctcgtctcactgcaacctccgcctcccaggctcaagcaatcctcccacctcagcctcccaattagctgagactacaggtgagcaacaccatgcctggctaatttgtgtattgtttgtagagatggggttctgccatgttgcacaggctggtctcgaactcctgggctcaaaccatctgcccgcctcggcctcccaaagtgctgggattataggcatgatcctgtgtacccagcatctcaagtcttcaaaggcaattggaagatatatctgatgacctagttaattctgctggaattggtagcctctgaaatgcttgggtgatcccttctgggtcttcacttgcttgattttaggatgtttctcccccttgtgaagagaatgcaatgttcagcgtgctcaggaatgtaatcctgaatatcagataccaagttaccacgggcctggcttagactgagtataagacctctgtttttagggttgttggctttgtcaccgtcaggtcttttctgcctctcacgcactgctgttaggaagtcctgaagctactgacccccacagatgcctcagattgggaggacacacgtcaggaaaggatgagagtgacatgggatcagcctggaaggcagcccgagaaagtggaggaaagtagagggtctgtgttcctagtgctatttaattaaatctgaaactcctttttatgggtacttatcattttaccctctgctacctaccaactttttcttctgttttgcctttaatctaaagtattttaataaggctcccttccacattcctatcctctgcaattgttttacatctctccttgcaattatcccagaaaatagtctctatatgacttgattttgaaatgtttcttagaattaatcaataacaccttgaggttttccagtttaatttgtatgtatttatcttggcatatagtgcacatctctctagcatgcaattttgtagttgtttggatgttggcaggttttaggggtgggaggggagaaagttgtatttttagctatagtgattcactttgtaaatggtgtacactgtcgtctgtcctccagttgatttactgcatatggaatcaactcactctaagcacaccctacaatttcagtggtttacaaaaccaataaaaatataaaatgctgaaataaatatttaagattccttttctgcattgcactaaagatatgatggaaataaattgtaaaagaaagtatttgcacttgaggaattcaggtaaaagtcatgaagctataattgaaaacaggattgtaggagccgagtaagactggggggagataattaaattttactatttgtcttatttttaatcatatattcatttacacaaagccagtcttgatggactacaaaatacaccatatgttgtcattttaaaataaagttttgtatttaaattaggcatgtgtgctatgtggctgtatgccaccactccctgcattaaaatccttctcaacacggggcttcaaggaaaccactaccaaacaattagagttccctaaacaatgaatctattcgctatataatttttagatgcacctccagccttactcctccttcacagaccctctgctctagctcgcacagttttcttattctcttacaaacatggcagcttccttcagtaaagatcaactcacaacccagcctccacctaagttcatttttttcctttggtgttcaaatctcgctccctacagaaaacttttcctggagactatagcccaaagacagatttcagtggttcccaagtcagactgcatatcagatttaatggagacagctgttcaaaatgtagattcctgagcctgccccagaccaccttactcagattgtgtctaaatctaggaatatgtgttctatcttgctcctcagccaattcctatgcaactgcttggcattctccattcgtgttttgggaaccacatgggtgacggaaagaatcagtaattctggagtctgttggacctgagttcagatcttagcacctgcacttattagctgaccaggttaccagacttctctgggcctcagagactacaaaattgcagtttcttttccaaagattttttgttttgttttttagaggaaggatgctctgaaagttgaagataccacccaactaagttggtacatcaagtagtgtgaatatagtcttctgaagatggtcctatgaaacagactgcttttctgagtggggtgtggtagccagtctcgtttatgatgtggtcatactgagtagcagtggcatttccctccctcccttcwtctaaagttcaaatgagttttctctcttcaatctagaactcccatagtcatttacgtttagaatgattccaaatggagagtgagtctcaatttcctgtgcactgaagcacccgttgtatggtgtataaagatattgggaacactagtgcctttttgggacctgagactatttagatattaaagtagatttcagagccatttaaagcagatttttcagttcctcattcaggaaaagagaatggcagtctcagaactggaagggacctcagcccttttactgagtcttcatgcctttatgccaataaatgcttggatcagaaaatctcattggctcaccaagctgagtcaggaaacctacctgtaataagacatgtgtaaaccaaaactatcaaacattttaaattgttttaaattgatgttttaaccaatggctgccatccattgtactataattgaattaactcgtatagatagaatcctattaggcaggtggattcctttatagactaccatatttagacacacacctccaccccaccttctcttgaaagcttttgaaaaggaatctttcccaaaggttgatttgactatctgcagtggaaaaaccttgaagagttaggtaacctcatttactaaaacaaaaagcaaagtgtatttgttgcatattaagtacttgtcatgagatggattctggaccagtgattttataattattaattctatgtgtatctcttattaattctaataactgtgcaatagagtagatactattgtttctattttacttataagaacactgaggcctgctcaaggtcagagaactagtaagtggccgagctaggaatccaacacacgtccaactccaaggacatttcatagcaagaaatgacagaccatgatttaggctgaggtttctaaaattttgaattcaatattaattatacctatgaactttctccctgcatagctttccacatatgcaacattttgcataccgtttcaaaaggtccaaggacgccccaaagtccaggatatcaccaatgagtatgtaactctagatttagcttgacaggaaagattgttaaataattacaagataaataaacaaattcctcatgtacctcacatgtggaatttagcaccatagatggtaatacaaaagaataatctaatgaatgcatgtgttacattgggcttacatgtaagttacaactgggagttcaagttgttctttttgagagggcagctatgccatttttagactacttaaaaaaatcacattctagtactcatatttgcttgtagaaataagaatagtaataaaatttaaagatattagggctaagcaagaccttaggcattatctgagattacggccttttcatttacagatgaggaaaaagggcctgagagtctctgcagtttatccaaggtcacacagccaattacagtcagggtcacacttggagcctgggatttcagattctttttcccgtgcttttcctacattgaactaactaattcatggtatgcacatccaaagaaacaataggtgtccattctgcatcttgagtccattcctttccaaatgactgaaacatgttcttgctcttttgaaaataaaacagtaataagagatttagcacagatatccttttcagtcccataaaggttcagatagaagctagagtacatgcacgaaattcaagactatggcacagaggccaggagccatgatgccgcagtgagattaggaatactggtctgttggaccagagttatggattatcataagctcaatgatctcagttactccctcacttcttcattcattcacaagtatttattgggcacccaaaggtgggtcaggccctgtgcttggccctaggaacagagacacatagatccagcccctgtcctcaccaatctcagaagcaggagggacattttgtttcctcaaaaggttttctccttagaggaaaatatttcaagtctgtattagaaggatattggccagtatacacagtttttccttcaacagggactccactcccagaagtagccatggattgtaaacagactaattaagaaataggatcctcgtattttttccatgaagctgataattagcagccttgacttttcaagagtgtctctagttatcttaatgaatattgaaaaattcccccaataaaagtaattctcatttctcataatttataaactaaattattgttaaatggtaaacacaactataacaaagttatgtggcaaaaacaaacgacaaggaggagatgtggctgctcccaaaaggtgggggtttattccattagatgatcaaaaatgtgatgatgccacagccattcacattttacaagaaaatgaggcaaaaccgcattttaatactgccagtttactcctagtaaatcatcactctctaaattaactaataatttagcatttttgttcctgctttaaaatgattctatactaagctgcaaaatggtgatggcattttcagattttgaatttttatgacaagttcaagttgcaagcaactcttttaaaccacaagagaaagagaaagagcttacgagcaagcgcacttgtgtgtgtgtagatatgaactaatgcatacagaaggtgttttcatgagggatttctgaatgtattataatgcaaattacatttttaagctgaccaaactattgatggctttattgaatgaaataatttattatagaaatattttagtcagatgacgtttcatcatcagataacactaaacacaatagccatttcctataagactgttgtcttgagccaagggcttaaaaaagaagataaaacttgctttgttccaaacgtagcattgtactaacaattgtttattacactacagaagaaaagagttctgccagccagacatggtggactggaaaaacatgccattgtgtcagatcatcccaagaaatcttcatttttccctcctctcctaataatgtttgacaagtggagatgaatttttaaaatccaagtctcttttatgccattcattgggataatactataaaatctctcctcgggtactcagagtattacaacatcaatgacctgtcagcagctgcatacagtttttatttttaagactctgtaaagctatggttaaattctaattttctaaaataggtttaagtgtggggagagccaaaattaagtgcacttttcttgctagaaatcagaccacaaattgtacattgtgcttacaaagatgattaaggcggtcccagccgcacaccagcagttcggcagattaattggagcatgcagatttgtgtaaaaacatatgttgggattggagtagctttttttttttaatgctgtttaaaagttttttgcaagttcctgtgtataattttcacattatctaatcctctcttaaaagcctgagtttaaattcatatatgcccaatatttaagcattttgtcaaaatgggagcatcttattgatacctttcgcccagttagttggtggcaagctttttcatttaggaaatcccagtgttcattattttttaaattgtttcatgatgaaaccagagccacttgtttaaacaaggcataactttaggacccaaaaagagctagagcctcagagctgtgatacacatgaacatacagtaaacacgggaaacgtaagttggaatttgctgaaaatatgattaaaactgcttgcggaagtttaatttacccctctatttgttaggacttgttggcttgacaaacactgtaccacaaagccagctaaacccacactgctcataatggtggcacagacacctgtaagagacatttcagaatattggccagtattttaataatctgcctaaaacctcattaaattaagatcagcaagtaactctaaatgaagagacatataacccattttgatgtaatataaagctcatttatcctgactttccacaggtttccagagttcaatactgacagggttcatacactaagagaaaatgaaagtaaagcaaataaggaatatttagaataagtaagcatgcacatccttaatacaaagttgacttcactttaattagagttcaaagctgtaaggctgaaaatatgcatttttaaggtaaatttttattcctttaaattgtctcaatcctatgattttataacactgttattaaaaataacacttaccggcttacaggagagatttgagataaaaacacaaagtgcctgtcagagtacctggcactttagcaggggctcagtaaagagtagggaggaagtggaggaggatcactggtagccgtgtaagtggtgctaagtttggacaactaggcagttaagccagttattcctagggagaaaaaggaaattagagtctaacaagcaataattgctcaaagcaattgtaaaggactacacatgtaactcccttgccatccacagataatgcaatttagacaatataaaagtttaaaaggtgtaataatcactggtcttttgcccttgtttacttaagaatctgtctgctgaaaattttcctgttgcccttattatatttgctttgcagcagtgacgaataatctatcttattctgtggataaaatctccacacttcacggagatttttttattgttggaatttagttggatctcatattaaataatgcataaacattgcgttatccaatcttatctctttttctttggtcctgcttgctaactaaattctccccctttaaaaaacattctttatatgcttgatatctctcctcctctttgctactttttccttcagtaccataaacataattgttgcaccatggtgctcttgctagaaataggctggaattcctgtaagctccacttgatcaagacagctcccctgttgattttgtggtatggcaggtgtgatttttccctgcccaagtgacaccaccaaatactgttaacttaagtggacctgttttggccatgaggagatgggttatctttctgaattagctaagaggttgatttcagatgtcagggtgctgcccttgtaaaggtttagtgtacacgtacagagtcaccaaaaagggcctctgtggttcttacttttgcacatttctgagaatggggtgaatgattcacatttacatggaggatattcccagctattaagccagccaggggaaatatctataagtcaatcacaaaatagctaaggtgttctcatagactttggttcccatcataataaaattacaaatttagtaaattgcaaaaagaggcactaaagtgatgayaccatatttcaatagtctgtctgatgctcttctaggctctgtgttaaccaaagagtccggtaggcctcacactttggcccagtgagccctggttgttcagttgaaaagcggttggataatcactaacattctgggatcatgacttactaacccgggagtcgagtagtcatgaattgaagcataggacatctgtgaggcagaagcaagggcctctacaaagacaagttacactgatacacacattcacatacacaccttagatcaaagaagagccactgatcagtgcctgagcggctgattggacttgggacttttctacacattgcaacttgaaaacttgctctccagtgacccagggaaaaactattctcgttaccttgtgcagataactaattggaagttgagcacctctcaggagttccaatactttttacagaaagaattggtgttaagctataattcttgaactgaagatttattgtaactgagaaactgcttgccgaagtttaatttacccctctatttgctaggacttgttggcttgacacacactgtaccataaaggcaactaaacacacactgctcttaatggtggcacagacccctgtaagagacatttcagaatattggccactattttgataattctgcctaaaacctcattaaattgagatcagcaagtaactctaaatgaagagacatataacccattttgttgtaatataaagctcatttatcctgactttccagtggtttccagagttcaatactgacagtgttcatacactaagagaaaatgaaagtaaagcaaataaggaatatttagaataagtaagcatgcatgtccttaatacaaagttgacttcactttaattagagttcaaagctgtaaggctgaaaatatgtatttttaaggtaactttttattcctttagataaaattgtctcaatcctatgattttataacattgttgacacagtgaatggtacagattgggttatgttccttatcaccttctaactctattaagaatgctacttgcccttttacctaaaaaattataatatttctgaaactgtgctaaatgtatagatttttyaatcgtagttgtttgttcactgtgtgtatcgtgtacttcccctgagtggacacatctcattgtgacaatctctcatttttattctctcagtattgtggtctttttaatcctgtgtccttctgattgagtctgtggacacaaatttcataaggtcaactgttttatgacacacaagatcatattagaccccagtatactggccaccaatatactgaaggctgcccatcccacatctaacctgctttcattctctttctgctgtgtctgcttttatctctgttcttttcttcatgatcaatcttgaaagagtcatctgcattcagggtccctacttcctcatgtctctgagtctgtctccacctccatctctggggtgtaactgctctgatagtacctcctagttgtcagaccctgcagagatgtcttgctccttatcctttttgaccactctcctctctctgacccttcaaacccactcttgacttctgtgataccactctttcctgattctctttccaccctgttgatgcctgtctgccggcataatcatctttgcttgttccttctcctccacctgccccttacattcttggcctcatgtttccatcctcacacccctggtctccttactcctccaacagtcttgtctaggtacctgtcttcgcatcatttccagacgtgtgtcatcagattcaatctttgttttgtttttatttttgttttttatttccagatttattcttttaactggctactgcactgattttcaaactgagttctagggaagccctgaagtaccaggcatggatgcctctatttttgtctctgccctggttcttacccatacatgcttctccatcttatatccttcttctcatccttcaaaaccaaatagaaatttcacctttttagttaaataagccacctccatcactaccattgaaatgtggtagcttttcaagcatttcrgtgtaatattagtagctgtgctctcatactcttaacccacactttcatttgcattagcaaggatactgtaataataagaatgatgcaaagttagaaggactacttttctagccctttaaaatcaatagtcacttgtatacagtttattcagtcttttgttatttgaatatactatctctcattgtatccagaactgtcttaagattatagtgaatatacataactccccaaaatctatttggttaactaataycaaataagttgttcttatagcactattgtgataatacatatacttttatatcttcttagtattaattctgaaaattagattttaatcgtactatagagatagtctattctgtcacttaaggactgatttctgtttgtttgaaaaatgtccttttgttttaatttcattcccaatatatagccataggaatcatagcaaagaccaaagactaggtaatatgtatcatatatttagatatgtatcacatatttaatatgataaatatgtattaatatgtatcatatatttaatgtgatattattcatactttaaatgatgttattcatactttttaatagaaattgtacaactcacaattgtgaaattgaactaagaccaatatattttcacttacctggaaaggtaaaatattgcctcacatttaaagagcaatataacgataattttatacatatatatatatatatatatatatatatatatttttttttttttttttttttttttttgagacagagtttcactcctgttgcccaggctggagtgcaatggcaccatctcggcttaccgcaacctctgcctcctgggttcaagcgattcttctgcctcagcctcccgagtagctgggatgacaggcatgcgccaccacacctggccaattttgtatttttagtagagacagggtttctacatgttggtcaggctggtcttgaactcccaaagtgctgggattacatacatgagccaccacatccagcccgataattatatttttaaaaaaacagatgagcagtttgaactcaggcataatgttttaatttttttgaagctctaattagtacatcctgacagataaaaattaatgttaccttcagaagttttaggatacctgaccaaaaataaaaaaacccaatttatatattttaaaggtttgtctatgaatacgaaataaaaaatagcttgtcagaaggtgaagtcagcaaaatgtgaaatatctgaatatctcaattagtttcaaaacaaaattattacttaaatatattttaataatgcttagcaattatatcaaatttgtagcatttaaacactctgaataattatcattttttttatttctgtttacaagataagatgcaaattgtaaggactcatttgataaatgtgatagggtttatagggtaaaatggttcaccaaaactttccagggttccttagtaaactctgaacaagaaatcagaagaccttcatcctaataactccagtatcttgccaataagtctccaggaagtcacttagtttctctgaatacttcatcctcctaaataacagactcgcattttctagaaagcataaagtaccatacaagcataaattggaagaattgtkttggtccacacataaaatacactaacactaataatagctgatgagctttaaaaacaatcacaaaaaaatctcataatgttttaagaaagtttacgaatttgtgttgggctgcattcaaagccatcctgggtcacatgcagtctgtgggttggacaagcttgctctagactgactgtccctagtgcttccattccctgcatgattactgtcatttaactttgggtaatttatgtacatttgtccaaaaaactgacatccgccactcacacatgcaagttgaggagttccaaaattgcagaccattttcttgagctaattatgttcaatcctttagagtaaacaaatwtagaaacattttaaataaagtttaatcagattatggtaaacactttggaaaagaaggtgggcattgagtcaatatatatactctaaatcttctgcgaccttcctagtttttcaagatgtatattttgttaaaaamttaatgggtgaaggaagtctgaaaaaaaggttggtcaacaggtacaaagttaccatgacataggaggaataatttctggtgttctgttgcacattagggagacagtggttaacagtaaggtatacttattacaaaatagctagaagagaggcttaagacaaagtccagacatcacaccgtgagtctcaaaggcttcctcttaaaattatgccccacacatgatgtccttcctcctcrtgaaagttattatttccatcctcttctgaaatgtctgttcttgtgctggaaggtttgagagcagcaactgactatctaaaggcattaaagtaaagaatcttcaaaattgacatggggctagtgaggcctaccaaagtcagtcctagaaaccattgagtaatcttggtgagataaaagaattcgcctttcaaatggtggctgttggtctgtttcagtaaaactaatgcttggtccataaataagcctaaagggtgttataaatgttgggagctgtgggtgattgatctacgttgggtatatcatgaaaatagactgaagccacaagggttgcttccctgtggaaatcctggtggtaaattgccatatgtgtccccgttatggacctaggtgatctgattgtggatataacaactttacagactggacttttggtctcttgagatctccagtgtctttctgtgaagtctaataaataaaatagcaccttgcttttcagcctcaagcacagaacttggcagggaattggaactgttgccagcaatctttcccagctctaaactctaaatgcaccttttccagagttgttactgttcagaagtctggctagaactggatttgtgttaacctaaaaggtaaggaaggtacgccagtgttgcaatattgcatatcatcacaaaggttgaggtgacccaaacatactgttagactaaaggtacaagttttgttgttcagcagcagagtagagtgactatagttaacaacaatgtattgtatattttaacgtagctagaaaagagggccttaattgttcccaacgcatagaaataaatacttgagatgatagataccctaaattccctgacttgattattacacattctacgcatgtaacaaaatatcacatgtaccccataaatgtctaaaatattatgtatcaattttaaaaaatattaaaggttgagatgaccaatttaaactaaaagggaaaagttccagttcattttcctctaaaaatattccagcaaattccctgggagaaaaaacataaagcatgaaaagcagttaactttaacttttctctgagtgtgccagtcagcaccaatggctctctttcttgttttaaaacaacaacaactttaggttcggggatctatgtgcaggcttgttatataggtatgcttttgtcacaggagtttgttgtacagattacttcatcacacaggtactaagcctagtacccaatagttattttttctgatcctctccctcctcccactgtccaccctcgagtaggtcccagcgtctgttgttctcctctttgtgtccttgagttcttatcatttacaatggccctctttcttgaggaagtaggaaagctcctcaaatgaacaaaggcaaatgaatcagtaaagcaaacaatagcagtattttcaaatcattcagcccatcttacatatgccataaggtttgacatctaaactagacctacacaaaatagctatgcaaagatactctgcctgacttttctctgtattatttggctatttaacaaatatttattcaatgtctactgtgtgccattaaccactaaatgccaggtaataatgaagtcgacaagacacttgcctgcatagcacaaactatctagtggaggagataaacattaaatgcaaataaatatataattgtaacatctttaaacttatagtttggcaacaacagaagagtctttttaccattttgtttctgaactccttagaatcataaatcttctaagtctacataaaggccataaattcatatggattttattataccatatatctgtagaggcataagtatctcattaaaaataaatttaaaacctagttattgtttatggaagacattggacataatattaggaatcrttgttatttagtatctagtattgaatgagtatttggactcaaccggttctcatagctagttaggcatatttatcctcctgtttccttcaacaagtgtttcttttaaaagtgatcatcratgtgtttttgcagtggtcctttctataatggagttgggtgaggttttctctgcatttggtgtattatattttactaggctgacaggtactacacctacatcaataacttcacacaaagtagggccttttgtaaccatgagatgctcacagagtacttcaaatattatcttgcattggccttagcctggtctgttagttcaggccctaaaaataaacacatattaatcagctaatggcagcacgcgcagaccagcacgcagggacctcagtctaacctcatgcaatagcttgtcttatgtcacccaggatgaggcagtttgcagccaggaacgcctctaaaagaaagaccgtcacaagcttaactaaatgtttaaaataaccttctaactcctcttcacattgacagattgctttcaactcagtgaaatcaaaccgcagccccagccctggtggctctatggggccatcttagagccatagagtttgtaaagtaaaactgcaggttgtcagagcatcgaagtgtagctctctcttgtcttgtttttaatcaaaaaacaatcagaagggaactcactcctggaagtccttatctccataaaattcagctaatgactcctgttaagttaaataaagtttctgtgtaactcactaaggaaactgttagccgttcacctcgtgcccgcagacttctcaaaaaatacaaatcgggggaaccctgtggagctgggctgtgaatgtttatatacacatactttgtcccaatgactccggaaagttgagccctcagtatagttttcaatttttttgaatgacagtcttttttctgtatgaagtggaaatgaggtggggctgggggggagggtggatttgttttaatgtacgcttttcttgaatctgtttatccccaaataagtgagctgcagtagatactttggtccagcacaaagtaaatatttagctcacagattccatgcagaaacatgacccagagtatttgggtttcaagaaagaggatcaccctcaggcgaaggcctcctttgtacttgataggattgggctttctaccagtgtagcatccyatcgggcccaccaagcaccttggtctgctataccgtgcccttccctccggtcctcatcagccccattcccactccacctttaagctgtgtcatgcatggccatgatctttctttctcctgaactttcctgcaccgtcctgaaagtccccctgatctttctctccactcgatctgcatgtggctcttccttgaagtatctcccccctcttacccactcagtgaactttgacttcaagactgaacccagagacacctcccctctgctcagagccttgccaggtaagagttaagtgcttccttctctgagctaccccagggccttctgcatagctctcttaacaacctttctgtttctttcatacactcatctttttacctgcttgtctcccttactactgagagtccctgaaagacaggagctgggttcatgttatctttgcctcaccaaaacatggcctccttttcagggaagcagaaggtattcctggccctattctgcagtgagggtgagggggagagagcattacaagctgacaagagcactatactagaagtaagtagagccaggtccatgctgtcagtccctcccgtgttatcttaagcaagtcacttgacctcagagagcctcaatttcttcagctatcctatcagaataatgcatttytgggggattagataaattactgtacactttgtggaagtattttaagaactgtgaagcattcctctcctcatcacttgaagaatagaaccagagttcactaaagcttatcctgccctttggatccagccctgcagttttctgtactcaggcatgatccttcaactgtttctttacaaggcaaagtttttgtttccttaacttggtatttatttcctgcaattgtctgataaaaagcggcttcattaatcgcgagaaaacaaagagtttgggcagctttagaaattgccgctggccactgggcttcctaaaaccccattgtgtgatccccactctgccttaaaggccagcatcagtgtcccaatgcttttccgtgttctttttgcaagtgccgtgcccaacagtaaccatcatctgtttcactagttatcagtttacattatcttcttcccagagactttattagttaaaaatgctcttctattttctgttgttgctttttcattattttcttactgtggtgaaaaaaaaaaaacccacataatattaaatatgccatcataactattttttttttttttttttgagatggagtcttgctctgtcacccaggctggagtgcagtgatgcgatctcggctcactgcaagctccgcctcccgggttcactccattctcctgcctcagcctcccgagtagctgggactacaggcgcccgccaccacgcctggctaatttttttgtatttttagtagagacgggtttcactgtgttagccaggatggtctcgatctcctgacttcgtgatctacccacctcagcctcccaaagtgctgggattacaggtgtgacatcataactatttttaagtgtacagtcttaagcatgtttacatttttgtgcaacagatctctagaacttttatctcgcaaaacaaacccatactcattaaacactaatttcttctttctcctacccttggcagctacctttctacttcctctttttatgattttgacccctttagatactttatttgagtgaaagcatacagtatttgtccgtttatgactggcttattccatttagcataatttatatccttggggttcaatcatgttgtagcatgtgacaggattttcctcttttttaagactgtgtaatattccattgtacatgtatattacatttctttatccattcatacatctatcagtggacatttgggttgctttgttctttctctttttaaaaagcaaatattaaaacaaagatgaactattaaacttggcaagatttcaaaatgctcctagtctaaaatcagcatatcaaaaagatatctgcacctctatgcagcactattcacaataacaaagatatagaatcaacctaagtgtccatcagtggatgaatgaatgaagaaaatgtgtatgtatacacaatggaatactatttggccataaaaaaagaataaagccatgtcatttgcaacaacatggatggaactggaggttattatgttaagtgaaataagccaggcacagaataacaaatatcacatgttttcgttcatatatcggggcttcaaaagttgatctcatgggggtaaagagtagagtgacagctatccaaggccgggaagagtgtgagtttaagagggtgggtggatgaaaagaggttggttaatggatacaaacatacagtcagatagaggagtaagttctaatgttcaatagcagagtagggtgactgtagttaacaaaagtgtactgtgtatttcaaaatagctagaagagaaaacctaaagtgttcctaacacatcaaaatgataattatttgaggtaatggataccctaaattatctggatcattacacattctatcacatgtaccctataaatacacaaaattttatataccaataaaagtaataaaaatgttttaagtttttggtctaataggaaatgtattcaagatggtacagtgaaacttcattgccctgaaattggtgtatgcagcccttctttgttgtgtaaactagacttaaatgttcaaacaggcacagcagtgtcatgttattaacaacagaaacttatatttaaataacatttaagtcactgacatcaccaggattttctgtctagtctcttttaaagtagagtttctcctggtctcatgaagctgatcagctcttgtttttatttatttttattattatttattatttttatttatatagtctcactctgttgcccaggctggaatgcagtggggcagtcatagctcactgcaacctcgaactcctgggcccaagcaatcttcccatctcagcctcctaaaatggtgggattacaggaatgaacctctgcacctgaactagctcttatttttcaaggcagaaatgaccatgtgaaatggttcttcctgctctctagctcaaagaaacatcttatctaattataaatttaggaaattttctgacctagtttactcacgtttcctacccctcagttctgcgttacaaattttcatcctgggtaaagtatgaccttgtattgcctttggttagtactttacagataacagttttctttttcctactgagttcatttccagatctctggacagagatctagtctactcatggaaagatctgtggtggggatttagtggagaagagttcagaaaatttctttattagattctactgttgggtggggtttttggcatcaggcaacaatgaacatatacagattcagttgttatgaagtttattctcaaatccaccttgaacttcagggcacaaatgctattctattcactttatagatagagaaatcttggggctatgccaggaaaataaatctggagtagtcagtcatggattagctgcaggggcattacatttactagaatgccttactctcgttgtgcttaggagggaaccaaatagaaaaaaattacaaagcccagaactgcagaatgattcacaaaacctcaagaatgacaggtaagatattttccaccacacagaccctcagcacaaccagaatcgagtgcaggatggcctcccagacctgtctagcactggcatccagtcccctaccaggcatctgtctgctcatgcagtcaagcctcttctgttcacctcagatgttcatacatcggggcttgaaatccccatgagatgttgccctgtcgggaaccatcctctggagctggaccagtgtgcctttttaactccctaaacagagcatccctcttcgtttggaaatgtctgtggctcagaacttcatcttgcagatccagcattaattaagctatgcctttaaaatataatcaggtaccatctttacagacttaaaatttctaactataaagttgacctttgaagttcacatatttgcatttcccttttgctgagcttaattttctattttgctatcatgactctttgaagaaaaggcagagtataaatacattaaaagccgcacaaccgacatacagaaactgtaagattctcattttcttaaaggagcactattgaaaatggtgcaaagatcattttgtagagtttktatgttatggaaaagtagagctgtgaagaacacagatgcctgctgaacctaggaatgacataggcattgtagagatggcagttgtggttcaatgagtgcaaatccatgtgtcatatacaaatacagttcactttaatagtttgctatctcttcactcatcttaaacaccttaaggtatttggaaagggaggaagaaataaaacagatgaacctgctgagatatggccaggaacagtagtacttcattttgattgatgtttttacaaccttatcttctagataaaagcgactgtaaacaaaagcctacctaaactgattgtatttaaaggaagcaagagccacctgtgtgcagcaattggctcccaagtgcagtctttcctcctagcagccaattcttgctgctcacagccttgcagccaccactttaaccatcagtagtgttacttacagggactagtactcttggtttctaccactctttaaaccacagcatcatctcccccttaatatcctagacagaatagattcctaccagcaatcccagcaatcttgcaattcgctcttcagaagtgtacaacttggacatatttttaaggctcattttcttacctttaaaaatgactttccgtggccaggcatggtggctcatgcctgtaatcccagcactttggggggccgaggcgggcagatcacctgaggtgaggcgttcaagacgagccttgccaacatggtgaaaccccgtctctactaaaaatacaaaaattagctgggcatggtggtgcatgcctgtagtcccagctcctcaggagactgaggcaggagaatcatttgaacctgggaggcggaggttgcagtgagccaagatcacaccactgcactccagcctgagtgacagagcaagactccatctcaaaaaaaaaaagactttccttcattatatagtagagagttattagcaaaaaaaaaaaaaaaaaaaaaattattttccaaatgagtagtaacactgacatcttcttcttctagggcaagggactgtagagtgatattcatttgtgtattcatatatccactcaacaaatatgtattggctgactcctatgtgccactgaaatacaagctgccctcatgaagcttacattttaaaagaagtgtttgtttgataactgcaaggccaggttatccataatttttgaagacccatttttaaaatcatttttccttatctgatcattttttctaatgatctagacatttctaacttctaatttatttttttcccctttctggcatttgccttcatgaatctgcaaaattgggatgttttgcttttggggactaggttggctagccaaagagattttccttatcattaaatatttcttgtgactaagagaaaaatttaactgcccatttagagtgagttgggatctgacataccaaagcattgtgtcacatttggttaatgatagatttatagggcaaacatgtatcagccctaatccttcagttatttgactttgccgaggatgaaattccaataattttttattttaagcagacttttatatatccaaaacccataaatctctttgttccttgagataaacatctgaccgaactctgggttaccctgtgatcctttgagaactatgccaaggaaaaagaaactccattccctccattagcgaataattaagggctacttgaaaaagacatattttgggtacgcaagatttatgtagtcttttccattttataatgtggttctaatttctaatattcagaaagttagttagaaatggaaagttcagaaatcacctcaaaattcatcagagcaagtctgatggttgattaactggcaaacaccaaaatggactgcaccactgtcagccaggccttgccaactccatgatcactatccattatggttgtcatatcaattataaattctctggcatcaaacactaaatcagctgaaatgatgggtttgcctttggcgtgtttccctggggaaataactgagaaaacatgtaataattcacacgaccaattttgttaaaacaaacacccccaacttttggaagaaggctggggtataaattccagatcgatggacatgatttgcacccagtgtccacatgaagtattctctcgttttagtacttdagtaagtgttttcaaagtaaacataacttcgggtactttgttacttttagggtttctatgtcttttgctatgtttgctgtctctctcttcccatttgagaaggtgttctgtcttctccatgcatcctgtttgaaacagaaccacagctattgtcctgaaactcatcctcccgtttcccagtgaaatcatctcaatatacttctgaccccatcatccctctaagtctctcgggacccctaacctcacctttccctcccctcaaaaatggatgtatcatggagaaagtttaaagggctgatgtgaataaatacaacatagttaaatagttgccttttccaggaagacttctagaatcattgtcattgctctaattagtctgttactgtgaaccctttggcattttgtttattcaagtgatatagtttactctgaaaatgtgaagagatattgattactatgttaagcaatttatggagaggagcttttcttctgtgacttgtgctctatgcaggatggatagacaagcttgtatgtagattcttataggtaaatgcagaggggctgacccaatccaggagtaaacatttcttctagaaaacagagagtaaagacaacagattaaagacaaaatcacttctgcctttgttttctattgtaatcttctgagaaaagatttacaacaggctagaaagattataaatatagcatctatctatatccaatatagaacaaagcaaagtagaaattaactactttttcaggtaatttaacatggatgtgaaaatatcaaggtatataatcaccatggagaatttcagagtgttgtggttgtatatttatatacatttaaatttttgttcaaaataacattttctttgtggcataaaggcccaaagtgaatcagtatttatcatatgcttttacttttttattttcaaaattatagaaagttgtttcaaagagataaagttgcacttttcatagccaacatgcatagaytgagtgagaatactcataactaggttctctttctttggtcatttcagtctgcaaatacagacctggcaaggtaagaaaaagtagatgaaacaaccaagttatcatattttaacttcatttctacraaaaaagaatatttgtattgtatattaaattgaccatagtgccagaactttatgatgttatattacatgatcactaatctattattattgtacacgtatttacacacaggcataagtatacacatactttgcatataaacatgtgcaagcatatttcacttggactgaaaggttatttacaactctgtctggatatacatacaacagtgattaacaagtgcataaccaatctacaacacgtagattaaaactaaataaacagtgtaagagtttattttaaaacaattacaagatgttttatgtttctccttcatcgtgaactatgtgtttgaaaacgcactcttcataaaaaccacatgcaagtctttttttgatggtgaaacaatcgacttccaacagccacatgtctgcacacatcctcagaagatagcacagaccccacacagcaactcataataagagaaaaagaaatatatatatgattatgattatacatatgtgtgtgtgtrtatatatgtgtgtgtgtgtgtgtgtgtgtgtgtgtgtatatatatatatatatatatatatatatatatatgattctctgctgttcttgttttagagaaggagtttatttccctatgattgaaataaaaaatttgggctaggaatgaaggtttctgtatgtttttattgtttgatgaagaccctcatgaacaagaaacttaaaattatcagatcattccgtagtctacttgtcattcttcaattgagaattgtttgtttcattgactagatgcagatttatattgtaggactctactgcactgagaatccttgtttatgcaattatggtaattcagctcattgggaagaaaagtattaggtcaatttcagcagtttccgtgattacaggtagagagacaaattatgtaatagtacataaatcccacacctttcaccgtcttattaccaaaagagatgtaaaagcatactagtttaaaaaatatatgtagtggttttctcatagagctgaaaacatgggtaagccaagttaatggcacaaacataagatgcatctgtatactagaggtattttaggagcaaaactggggcctttggggcatactgtatcaccctgtttaacaagttctgaaccttcttttctgggaaaacaaatctctacctcatacgttcacttagacccgttgcttccctcagttttcctcataacttattccagctgtttatttccatttatatgaacaagctgtggcagtgttctggatttactcctcttccctcatgtttagattctgccccataacttctgaaccccttcacagcgtgagacatttctcttctctgaactttatgtagtgattctgtaattctcattccctagcttacttccacctgtttgtcaaaggtttaaaatatgctccctcaaaagtaattattttcatttcttttgccagaattatgggttgcttttccatctacttcctaaatgtggtgatacttaaattgaartaagtagccagataaactttttagcgtgaaactattgacatcaaacttagagttattccctgtgtagataggtggatcccaactcatatactggggttttgatcagttgccttgcttctggacccctgcttgcctatcacctatccaggtgtagtaaatatttttcagagtcaaatgactgttatagaatgctatataaacacaaggtataatgagacagtaaagcatagtagttacaagggtaagccatagagccaggcggcttgggttcgaaacctggccctttttgggccccagtttcttcatctgtaaaatgaggatagtcatagtgccctcctcatagggtggcagtgagtaccaaattagtctgtacatgtaaaagttcttgaaacactgcctgctcagtaaatattagttacctctttgttgttgattattgagatcttatattattttatatgtacttagcatctttatagacataatgattggtcaagggctccctgaaatctgtggagatctagaagctcagctggcttcaggaaaccaacgaggggttattggggttaatttagcaagatgatatctaatagtatgattcgaaacctctaaattccttcatctgcctttcttttcaacagtctctgaagaggatgccttgaggaaaagtataacaataggaagttaataatcttctccattctccataagtaaagatgcctcatcctagtaattcctgaattataggatagtgttagaggcgtggcaaggaaaggggagtatttagttttatactttaaaaaaaaagagtaagcaagttcttcctgaatttggggagccaaattttctgtctgamccactgagtttctcagagagttacaggaaaccttgaacagaaagatacttatatcatattctgtccaacattcgcaatctggaatcctcagggcttatctgaggatagctagatttttctccaaaactaagaatttactcactgaagtaccatttttaaaacattcttggtgataatcttttaaaaatacattaacagctttcactgccttttttaaaactgaacaaaatgtaagcagcatttgtgtttcctgcactgtcctcaacacctgttgagatcgacaaagcctgctagccccaacaccaaacagccagggactctcacagttggggcatttttatgtctctcttcactgcttgccagcaggaattcaccttgactgacaaagtgttctccctgtaaccaactccttcaaatatgcagcttcaggaacccaataaccaagtttaccaaaacaatagaactggagaaaatatggagaattctttattttatgtaaccttagcatcctagatatgcagcaaggaggagtattgctgtatagtgcaagttaggagctaagaagctcagttggtatacctggcactgatcctcggcatcagaaagtgacagagaacagtggggactgtggcagtcccgcgaacctaggttatatctgaagggggcagctgttacttatcttcagttgcttgttgccagattgattagtttctcaaaaaaagctaaatatgcaggattttgtgtaaacattcccaatttgtatgcattggttcaattttttaaaattaatgaaagcccagccttgatttaacagatctactgatgtcactattttgcaaggccgctcactccatgtttttgaaagtttcagttatacaaaaaattttatttgtgtggaatcaaaatctaattcttggctactttcaagcattgtcctaagtctgcacttgagagctacagcacgaatcaaatccttcctccataagagcactctcaaaatcagaacatgatgagtgtgttagtgaaccttgactgttcatttctaaatcagacatactcttattctaaccattcctcaaatatcctaggattctcctttggttgactttcaaactggagacatkcccttaaaatatgacaccagaactctccaaaatgccctaggtgtggcttaaccattgcaaaggacattgactctctttttctggttaaagtctaacattctatcaccctgtttagtaaaccgatcactacctcatagtgagtgcatcacaaactgccttggttctaaaactggttcctccactttttagctgtgagaccttaggcaatctacttaattgttctatgccttggtttttttacttgtagaacagggataataattgtaccaacctcatggagttggcatacaaattaagtggttcgatatatataaagtgcttctatatatattaaagtgcttagaacagtgttgggcacatagtaagtggggtgaaagtgttaataatgaacattgttgtaactatattattttcactataacctgtaagtatgccactagtgtgctcactctggtcattaataaaattgccatgccgaggcaatggctgacccctgcctgcacccctgtctctagactcgcactgattcaataaccaatgcaaagctgtctgatcatcttagtgctaaccctgtattgcccatcttgtccttgagggtatctttcatgtaccaggcactgtgttaggcatggaggtcatgaatacaaataaaacctggtctttaccctcaacagggtcccaatataacagacaaatggtgaaacagagggatactcactaggaaacaggtatgcacagaagggccagctttagttccatcgtctctgattgaatttctctaaataccctaaaatgaaatgaaaccagagaatcactttttttttttttttttttttttttttcagagtcttgctctgtcacccaggctggagtgcagtagtgcagtctcagctcactgcaacctccgtctcctgggttcaagagattctcccaccacagcctctagagtagctaggactacaggcgagcaccaccacgcctggctaatttttttatatctttagtggagacggggtttcaccatgttggccaggctggtctcaaactcctgacctcaagtgattggcctgcctcagcctcccaaagtgctgggattacaggtgtgagtcactgtccccagccgagaaacacattttgaacatatttataaggggtcattacttatgaaaaacctcatctttcttgccttcatggtctgtgatggctcttggctttcacctcccattttttcaaggcgtatttgttgtttttgctaatttggtgatattttatttgcaagcaaaattacttattcaaacgtcattcacattctagtcgctgcttcccaggagtctttaaaatccattgggggtcttggatcttattacttgaccatgagtatagcaaccataaaattatagtcaactttaaaaagtgtttccagaatcaattcagatgtccgtggacacccattcctgagggtctcccagctggcagggagggctgcaatctcagtagcagaccaacctctgctgtgcatatctcctcagacccaaggactctcttttcttttcaatgttgttaacaaagtctctttgatttttattggtcacaaaggttgtatttgccttcccagtgatctcatttttgtctagtggtgccacagtaaataagaataggcatcaaaaaggggaaatggttcaacccaaaagtctgcatttgacctaaataaaaattttctagggtcctattttacacctcttctaccatttttgattgcttgatatttcaaattagcaaccaaaacttcccctcctgttacttcagataacccagaaattgattatataaagttgcttaatgtggtcagcctcttcataaacaggtaggttgctgaaagattatctcrtcagcatctgataatctctggatcctgagctgttgaagaaggctcagaaatgcactaaagtaggtgctgggaataaggccagatcttgttctgccattaaatttccaaacttgtcaccctctaragtccttactgcttttgtcacccaaagaccacataatttgaaagcstatcaatctctatttacaaagggacattgtgtttcctcattcttaattaattagagacatattgtcaatcagaggttttgagctacattgacagaggtaatgttacctaacctaaacatagttccataagaaacacaaaacttaggtagacagtagagtcttattaatgaatcctactcaaaatgttcatagatctgtgttggtatctttagggaatcctggttgtgaaccactgcatgaaatgttcaggttcacaatcttgcaaaacctttttgagttgcaggaatatctgttgcctcacaagtgaaacaagtccattttcttgagcactgaggtgttccccagcctggcttttctgcctakaaaatgccattttcgtaaagagctgtcatgcttcgtgtcctttggcttatgatttagctgttcaaagaaagtgcaggctgctctcacttgctcagtgctggtgatatgtgtttttgtttattaaatctttaaaatactgggcttgttttttatgacctccatatattcttttgttcttctctgtgacttgttagatcacagtttttttcttcctttgtgaaaatattagcacctttctgaagaacatcatggtctccagaatggctgtataataaaatggaagaatgtgttgagcttaatgttagatctgtcaaggccgtgactcaggggtgcttcactgatgggaaggtttgtggcttctcagacatggtccacagaatcacaaatctttctgttcttgccagacttgttttgacaaatctgagatcatttgacactaatcatagagctctttgtaaaataaaggtaccaatggtttatgttccaattacagacaagtgtttgtgattaaaagttactaagaaaccctcggttaaatggaagcaagttcttctgcaggtgtgagcttcgtcttgtatgcatttgagcctggggacccacacacctgtgcacaggtagcctaattctactgaccccaaaggaatctcttctttggggatgctgaggaagaagagaacatctgcagctgataaatctcagtgggcctggtgctccaaggcttctaattatacccagttcctacatcttctagaacaagatcaagtgatgagctgccatctcatggttctgtacctgcacagaggggaatcccaaagttttaaataatcttgaatacaacttggctaccccactaatgtggatccccaaataaaccaggccgtgacatccaattgaacttgtccctgtgcatacagtatctcgcagcccatcctgtattgttagttttggcaagtacactacagcatataataaatcatggaaggcaaaagctttttggcctagcatggttcagcctgctgtaatgttagaatacagaaagcagttctgtttttagacatgcttttactaacccaacattcataatttattatttcactgtaaaattcctgcaacactacaccaaaagtagtgctgccctttaattaagtgccctcggtaggaaaaacgtgaaactgatgtgcaaaacatctctctgtgtgcagtgattgatagtgattacatctttatgaacccagcctaaaggtctcaacttcctgatgggtgaagtagtccatagggccacttcctgagtctgcctggcggggatcagtcactgctaacaaaattgcagataattcagagggcacaacttagaaatgctgaggttttattaagcccgtagcgatctatactttgtcacaagcctatatgaccttattcctcatttccgtaagcaccaatgaccaaactttatgctgtgtccacacttaaagaagttgtaatgcagagagtaaagggacccagtgtgtcatatggatgacaggaggtacttccagcccaatgggtgcataagtagaacagtatagccagaagaggaccataagttgttgcatttttttaaattctgttttcaaacattcttttatttttcttagttgctattaggcaagtttaattttttaaatagtaccattaaatgttagacttaaatcccaaggctggcattccccagctcattcctgtttgcactgtgaatctgtcctccatcagctaggtagtcacatcagcccaagctcataacaccttactgaaaggtaagattcagagtttccatatctgaaatacttcaggtttctggaaagaaagggaacacatccatccgagaaggtagtatgtgtgttatgtgaactctttggtataagtttggctattttcagtcacaatggtagcaaccaaaacaaaaattttgtgcagtcctgtcatttaatcatcttatcagtgccccaaggtgacttttttcaagagctctgttgataccatgtgtgtgtgttattttctggtgtttttacagatttgggccaggcttagtcatctattggtatggatttatccaggagctggactgcaaccgggaaaggggcatcctgctcaaagcctgtttccccacgaacattgtcaccttatgccacagcatagcttgaccctgaagatcctggaagagaagctgggaggaaaaggtgaatccggaagcaattttactttcctgcactgtaagatcctggcaacatctgccctgaacttcagctgaactcttgctgcccgtagtcacaccactacctctttagacaaacatatcaagagtttctgttttccttcatcccttgctgatgtgaacagccaagaactacagacacaacccactcattatcagcatttctgtctctgtcaaacaattagtttatagatagtcataatctttctttcttccggatggtttatccttgtatgctgaacaaaagaaaaaatgtgaagactgaaaggtgtgatttttcaattctcctcccagttaccgaatcaccctcttatttttttttccctaagcctccgttcactgtctctccctctccctttctcttcatgtgcactcacagagacccagcattgcattaccatcgtggaataatctagcgcaaacctaggaaagctgaagccacaaagtccaaagccacctttgtactcacctgcagagctccagaagaccttgatggcagcctgcctatgctgtgtgtttgctatattcaatctttacggcttcctgacttctgtgacagtaagccaagtgcaaaaatacacttgatgagaatttcctcttttaataatgttatttgaacaccacatattttagatttatcttatttgaaagtattagttccattgtgcctggaaaccacactcctttagattgggggccgagaggcgacaacccaacattgaggagagtttatttttaaacatggctagttgtcagtatgtacgtgagctagtatttttatgagtcgagttttttaaaggcacattctgtatactgcttagtatatgcattttataccatgtaattataaaacactcgagtaagttcagcattagaaatgtttagctttgtatgaactgagtgtgccagaaataaacctggagcaatttttaaataagcaaaataaaggagatttttctatttgttcactttaatttattcacttttgtgtacttttatgtactgcaaatcagatttcagtctaaagcgaaacatcagtaagttaataataaacctatctttygggaagttgaatattaatctgtacccaaaacgtatttagtaaaatatttgcccccgccaccctgccatgctgacataacaacttttataatgttgaatagatgatatgggaaatactaataacaacaatgtaatttttgcagacagctttaacttatatacattgcttgatttttttcaaaagactaaatatgtcatttatactttgtttattttctaccaaagaaggtttgtaaaaatatgcctgctgcttttccttttgaaggacacaaacctggtcccaacatgtgtggattttaactctgagtggggtgcattaaatcaaaagagagaggcagaagatgaaatgctaaagaagggtcaggcaaacttctgtttcagtataaaattcatcatgcaggcttctgagtgaaatagaatgatttgaaaccactactgtattgcctggatacacacacacacacacacacacactttatacaaaaatgttaaaagcaggtttcctggcatgttctaaactgttttttctttaggaataaattacatttatctgcacagatgttgaaaatcctgttaaacccttgtcaaggatttgtttattttacattaaacaaatttattatgatgaacgtgaacaaataaattaaaaaataaaaaaggtacttgcgttttgtatttattcttttacctgctgccctgacataatgtgttgtgagaaggtattggtgttcctagcaaaggcactacctcctctttatgaatgaggctttaaaatctggcccttaaaagtgagaaagaacccaacagtaaactgtacacactacaataaggttacaaattagtcaaaagtaagtttttcacacataaaaactaatgtgataattatactacttttgaattggagctgtatgggagagaagagagtaatgttcccaactggaagcttaaagtctccttggtttgtttctttttctgttaaaaatacttgtctgtgttccatctctatgcattgtctgcttgctggtttttttagtttagacaatataaacatcagccccagaaaggagacacggaatgacaacttatttttattgctgtcatcattagaacattaacattaaagccaaatcttgttttatggtgcattctgcacactatgctaatgaattatgcaaagccagaaagcaggagcgtgtgtaaaacgtaaaactgaatgacgttctccctggcatatgcagacttgccaagcatctgccctcacaaacacataggcgaccatttgaagtctggaaacagatcaactcaaagcaaagctgatccggtactgatctgtaaggcgactgcatagactccttcccacctcacatctgtaccccctcaaaaaagaaacaaaccataaacagttgcatatcctctttttttcttttgccttctagtgaagcatacgtcagctctttacaacactcctaaaatctaaaataaaagggaagtctcaggggtctaaagtagaacgctggacctccaggggaaataattttcttgtaactgtaggtgtgtgtacctgttcattatctgcaaggcttgattccccctggaaaagatgataaattgttggtcttgagggggtgcattaactcactcaggccgccaggggactgcttagagccctgatgaggtaatctacctaaatggtccctggtgggccacactaattaatgctgaagtgaacagttaattcacttgcttctcactggggagctacacccattgctttcttttctctttggaaccaagatgccttagatgtctcctctttttaactgttcccatctagagacctggtatctcaattgcaataaatccttactgcttccatatgctttctcacttcacttttcactttttccatgtcatcttcccctgcgttggcctttgccagtttccctccacatggacatgtaccctgcattttctcattactcttgggctctttttctctctaaaagatcaggatcccaggaccaaaatatgtcctgatgcatacacctggttggggagtggggagcaattggcctaacctctttggggagaaacacaacttaagcaccctccacatgcccaaatactcaagtgcatatgtggcaccagaaggatcgtaaaacttttaactaagataataagattttacagggttaaatatggcttgaagttcatgccttcagtaaatgatttggcaaaaggagcaaaaagagaaaaaaaaagtaaggttatatagctactttcagcctgagtggtggtgttcagctgattaaaatagcaaaatgtctgtatgatttagcgaatcactcctagctcattcatcttgggggtagcttgccattttcatgtgatctgatgggagcaagttgtctcaaagtataactattttgtgacaagatgagaggagaaaatctcaataggcacattcttgattagggttaaggaacaaagcaagcttaacttgagaggaaactaaaaggcaaacaatagaagtttgcctgcaatgtcaccatttatgggaagcgtctatctgaacctgtctgtgtaaagtcactcgtgggttatggaagggtcatgtgtttggatcatttaatcttgttactctaaactaaccttcctacatttagtaaacatgatctgaacctgttttattaagaacatgcttggattccaaagattaaataaggaagatggaattatgaattaaataataacctgaacaacttgggttcgccttctgtttttcactttcctgctattgttttgaatatggctgtgagacaaagagctgcttaggtcaagcgctataaattacagttttcatacaatagtaatccactaaaatgatttcaaagcctgatcaaagtacttcaaaaagacttttaaaacatttccacagtacaggggaagggaaatgctcatttggtgccttaatttgtttcacttagtatagcaaagttcgatctgggtgtcatactcactttatataaaatccaactcattgtttaaataaatccaacttgttcttgttgtttaatgtataggtaaaggagatttaagttttcatctccttaacaagaacagctgaatatttggagtcacttgtaaggaaaagataatataggaacattttaaaataagcataccttgatagtatttaattgtgatactcgaggtattcattaaaactgtctaactccctgcaattaggataaagtggtgaggatctcagtggatttatttggcatcttaataataatcatggcaacagatatatttattttttcataccttttccctcatcacttggatttatcctaagctgtctcattttataggcaaggataatgggaagtacactagtgatagcaaagctaagcaaattctaggctcaaccatatataaagatactgtgggctgcagcaacaatgtcaggctcaactaaagactcatggtattatgtcagggtaatttttactttttaaaaggaaggtcatattgaaatgctgacatgaaatataaccaagtcaattaagtaataacaattgaagttcagagtttaattgagggctgaacatgaatccaatgaccattaacctaaagtggtcattaattcccctggaaactgccttggttaaaggtatttctacaataactagcactttttttttcaaaaaaaaaaaaaaaaaacccttgtcattttaacattaaacactaattcagaaataacattcaggaataacaattcagtggatctatagtaaaccttctgtattttacatttttaattgaatttcttctataggacaaatcaaaatttagataaaaagataaaaccacctctgcaggaaaccatagttttgttaagtaaacaaagttataagcaccctttatttgattgcttttgttttatctcagttgtgatttctgtacttgtttaatgcaagatttccgactagactgtaagctccatgaaagtagaaactacactaactttgttcactttagtccctaatgcctaacagaattctggtgcagacagagcaggtattcaataaatgttaaatgagtaaatgaatgacacggttttattaaatatgttatcactcgcattagcaaataattagaacctttatctttctcattttcttcatctgaaaaatgagtgtatttaccaaaaatcagagaaaatcatcatgtgttgatgttaaagaattaattaatttagaaactccccaaaatgtgaaataaatcaaattcatcaacaagagtgttttaggatgcacacttagttttaaggggggaatttacataactttttgttgcatttgccttaaagttaatcttaatacattattgtttatgcactgttgctaaatgagaatattaaaaatctttatttctcttttaaaagaaatggcttatctttatatttccattaaaaaaaaaaaactttctcctcaaatcacggcagggtcccaaatcaactgtgtttcacaagcagattttggaatattcaatggagttattagattaactgcaaatgatacttttaattgctcccttttataatgctgagttgatggcaaagtgcttcctggccatagaagtgttggctggctcaagagagaagggttatttggtcatttgccaataggatctgacctttggagagatactgcccatgaaccgctcagtgggtgtttccttgttactcattaattcagagtatattattatttgaaagccaaacgcatttggcatatttcctcataatttggaaacttgtagcacaaaaggaactggaacttccacatttcttctttttctgccagtttcccaggacttaatttgttggggctctttactttgttattccttccatgagcttctggacagaacagacccccagtacagatatcactaagaccaggtctttggttgcaggtgataattctgtcttatatttccagcattaaaactatttaagacacagatatttattgagtccctaatgtgtattagaagtatgtgaggtgctgtggggaatttttttaatgcaacaaaagatcctcttcttgaagaaaaataaatcattacctcttcaaaatgaaaacaacacaaaatatttggaaattttagaaaagcaaatcacatgaaggaaagagggaaatctatgaggtttttaataagatattttaaccctagactatggacagcaagtagctttctatttgcttatggtggctgcattcactgctattaagcaattccaaggccaagttcagcttagcagctaaggctttgatctagttcttagagtaggcagtgatcacagggatgccacatattttccattcctgctctgggccattcatgttcagtgcaagtataaataaattctaagcatttgaaacagaattcatacctgttcatcggcctaagtaataaaacaagcaataacttgttctgatagttctataacatcaagcaaagtgtctgtccatggctaaggtctgtctagtaatacagataagctaaatatgtcattgaaatcatagaaatatgattttaagcctcaagataaacactagatgggcgcagataattattattttcagtaaatgtctacaagttcaattatattattaatgaaaaacgttaggcctgtatattttggccctgcacaaagaccttgaaattcgcagattatattagtaaattttacacatttctagctttggagattttttttcttttttttttttttcttttttttgcggggttggggtggtttttttttttctcccactcaaaccaggctaggaattcaaggtgagttaaacactctgcctcctttatctttcatggcctttatatcatctgggtatcaattttctgcttagtacagtgcatttttataaggtagtgattgtatataatagtggtttgaaaatatgttcccaaaaagaagtgtaaaatattttcaaggacagagaagattgtatgctttacatggtaagacaattttgttaatatatttaccattaagctataaatacttttgccagaaccttttaattgtatcagttcattaattctggcagctaaaataatgacaatcattgcacatggaaaattaggtaaaaatctaaaagtattatattttgtactaatttgaatagaagaatccatcttggtttcagagttacaatttttaaaaaataaaattttcaataaatgaaaaaatagcagtgcaacctaacagaggataatagaaaagcagaacaatgaaagatggcaaagtggccatgagcacattgcataatgatgtaaaactcagtcttttggtaaattactttcgtctttcttacttccccattatccttgaaaatatttcccaatgacaaatgagttaaaaatggcaaaatgggtgcatagaatgagccaagaaactcatgtgaaaatcgaattacattttcagtttatttcttgacaattccctgaaagatactaattgcacctttgagccattagcgaaggtgagtttgactcacagactcaattttatcaaaaaattgggagattttatttaatagggagtcagcaaggcatttttttttgtttaaaaaaaact

SEQ ID NO: 96605 - DNA, 33219 bp, Homo sapiens
gcaggagaatcggttgaacctggtaggcagaggttgcagtgagctgagatcgtgccactgcactccagcctggcaacagagtgagactgtgtcaaaaaaaaaaaaaaaaaaaaaaaaaaaaggaaggagggagggagggagggaggaaggaaggaaggaaaggaaaggagggctgtttgccaggggacctgagcctctctcatcacagagagcagagaagctcaggccaggctgccccttgcctggctgaccctcagccccagtgctgcctgggcccccacagggtgagcttctgatgggggaggcctcctttgtcatattccagaagcagagctgaggctgtgggtggggagctctctggaggccacattgttgctgggttcagggcagcagcttctcacccaccatccctccccaggagtgacccacctgcggttccagcggccccagggctttgagtacaagtcagggcagtgggtgcggatcgcttgcctggctctggggaccaccgagtaccaccccttcacactgacctctgcgccccatgaggacacgcttagcctgcacatccgggcagcagggccctggaccactcgcctcagggagatctactcagccccgacgggtgacagatgtgccagatacccaaaggtaccagaccctggccagacatgccacatgcgcccatatcccctttgaaggctttggcccggcagcactagactccccgctctgtgcctcccctctctgcatctagagactggttgttccagataatgccacaaatcctcctcttcccctcactccatatacgtatctacctttccttttctctcatttctggcttccgatctatggtggtggccaagcttaactgaaacccacgcccctccctacagctgtaccttgatggaccatttggagagggccaccaggagtggcataagtttgaggtgtcagtgttagtgggagggggcattggggtcaccccttttgcctccatcctcaaagacctggtcttcaagtcatccgtcagctgccaagtgttctgtaagaaggtgagtactgcccccacttcccaccaacccatggccccttcttccttgtcatggtacccatctgtgcctttctcctctgcctttgttcttggcttccctgaactgggcaggggcaagttggtttgaaacctggggttgggtggtgagtggggtggtatcaggatatccctagaccctttaggacagaactggtttgcggatgcctccagaatcctgcctggtttacaaagactctttccctcagttaggggtgctccacataggatttgcttctgggagttcctccaggcaaggttggagggggtaaagaaacccattccttcttacaaaggagcccagcacttggagccttattgggctgggagagggaagggcatgttgggtggagcacaagtgaaactggctcagctctcaagaggaacaggaggagtggtggcaaggcagggctggtgggccaggttggccccaggaacacagctcaaaccctcaggccctcacacgggtcctttcacaccagcctggacctggtggcaggcccctgctcgtttctctgggcctggcaggtgagtcaggggtgctggaatgcagtgggcagaggcccagcccatgtgctgtcagcattcagagggtgacagctcccctcctgtcctctgccctctgcttcttaactatacagccccactttcctccctcggaagctgcagagggctccccgcagggcagcttccacccgctggtatctctttgagcccattcccatctgctcaggcagctgctgggtctccctgaggctgctctgtgaaatgccctttagccactaggtgcctggcagcctgaccagggaccactggagggagctgtaggacaggctgagcatgaaagctgcttcccaccccacagaccatcagctcccaatcaccaagggatctttcccatggccctggggtctctcacttccacctctctatgccctgggccaactccatctctggcctcagagcctggccccgtggcccatacactccatctccccaggctgtctagggaagggcacaagctagctgtggtcagaagagttctatcagtatggacacccctggggtttagggagactgagctgagatgggtcctgaactccagccctgtgtccccagatctacttcatctgggtgacgcggacccagcgtcagtttgagtggctggctgacatcatccgagaggtggaggagaatgaccaccaggacctggtgtctgtgcacatctacatcacccagctggctgagaagttcgacctcaggaccactatgctggtatgtcagggcccaccaggagggtatgcgggccactgtctgagctaggaattgaccctagctgtgcctggctgaactttgttccacccttccctaccatagtacatctgtgagcggcacttccagaaggttctgaaccggagtctattcacaggcctgcgctccatcacccactttggccgtcccccctttgagcccttcttcaactccctgcaggaggtccacccccaggtcagtccaacccataaccaggttctcttcctctttatcatttggggtctgagcaaagctcccaaaccttccccatcaaggaagaaatcgactgctgatgagaacccatcccctgggagattggtggggtaatggaatggaaaggataggtgggtgtcacccttaggtgctaaaggaggaggcaggcaatagggacttgccatctctgaagccaagatgtattgtccagaaggaagagctcaatcattgagctagtcctcgccaaaaactcggggctaccctcaccactaccctcaccaatactgagtcagtcctcaccctggacactgagggaacctttaccatgagcactgggctagtcactactcacaaatactggtctagccctccatgagaccctgagctgttcttcaacttgaacactgattaacccaacctctattagaaatgttgatctagcacttagcaaaattccactagacctataaacactgagccagccctcaccatgcatagtacaaagcaaaccatcaggagcactgctggctttttttttttttttaatttaaagaaagggtattgctctgttgcccaggctgtaatgcagtgatgcaataccagtttactgtaacctccaactcctgggcacaagcaatcctcctgcctcagcctcccaagtagctgggactacaggagtgcaccactatgcctggctaattaaaaataaaaaaattagagtcagggatgttgctatgttgcccaggctggtcttgaactagggagctaccccttcctctgaacactgcgttatccctgcctctgagcaaagagttagcctccacttattcctcctgcaacaggtccggaagatcggggtgtttagctgtggcccccctggcatgaccaagaatgtggaaaaggcctgtcagctcatcaacaggcaggaccggactcacttctcccaccattatgagaacttctaggccccttcccgggggttctgcccactgtccagttgagcagaggtttgagcccacacctcacctctgttcttcctatttctggctgcctcagccttctctgatttcccacctcccaaccttgttccaggtggccatagtcagtcaccatgtgtgggctcagggacccccaggaccaggatgtgtctcagcctggagaaatggtgggggggcagtgtctagggactagagtgagaagtaggggagctactggtttggggcaaagtgaaacctctgcttccagacttcagaaacaaatctcagaagacaagctgacctgacaagtactatgtgtgtgcatgtctgtatgtgtgttggggcgttgagtgtaaggatgcagtgggagcatggatgctggcatcttagaaccctccctactcccatacctcctcctcttctgggctccccactgtcagacgggctggcaaatgccttgcaggaggtagaggctggacccatggcaagccatttacagaaacccactcggcaccccagtctaacaccacaactaatttcacccaaggttttaagcacgttctttcatcagaccctggcccaatacctatgtatgcaatgctcctcagccctcttctccctgctccagtagtctcccttccaaataaatcacttttctgccttcagggtttctttattctgccctaggaccggaaggggcatggggagaggaagccactaacccagccagctcaccaggctggcccagacatctctcaagctgcccagtgtcctgagtaaaggagctggcccaaggcaaagtgccccagctagcaatcccttccccggcccaggggtgcccttcctgacagagggcctgtcagccactagtgtgaggcctggtgagcctgctcaggaggggcagaaacagagggtgtggaagcttctggaggaggttggctggggaagagaacggggtcgggggcagactcagctggagtctatagggagccagagccgcctggcttgttaccaggacctcagtcactcccagcccttctctgagcaaagggagagttgggcacctgtgcctacatggctcttccaggcagtgagatgatagcaggagacaaatgaacacatcacccaacctctctgggcctgttttctcatctgcaaaatggctggatgctctccaagtcgacttaaagacaggacaaccctctgagggaatttctctgagtgcgccccttttttttttgagacagagtttcgctcttgttgcctacgctggagtgcaatggcacgatcttggctcaccgcaacctgtctcccgggttcaagcgatttctcctgcctcagcctcccgagtagctgggattacaggcacgcaccaccacgcccggctaattttgtatttttagtagagacggtatttctccatgttggttaggctggtctcgaactcccgacctgaggtgatctgcccgcctcggcctcccaaagtgctgggattacaggcgtgagccaccgcgcccggcaagagagtgcccaattttaagtgatccttcctattgcttccacaaaacgcctgcataccacatatcctcaatttcgagaaaatagccactggtttagaaactctcaagtactgtgattcacagcacactttggaggttgcacgtttaggttctggaagaggccctcagacggccctttggctcagcggtcccccgaaggtgcctgtccagcatgtcgaggggtcctgaccagcctgcccgcggggtggggcgggcctggggcagcctgagagccgctccgcctggcgacccagtgggcctccgcgggcccgcccagaggcccgggcgggttccagcggtgggcgccggtcggggtgcggcctaggccgcgggccggtggttaggggctcgcaggccggccacgcccgagggtctgcccgggacaaacccttccgttagggcgcgagggaggcgctgcaggccctcagttcctcggccaaggagacaagcgcggcccccgcggcccgtcccgccagccttcccgcctccgccggcgcgcggcttccgcgtagcaggccgccccgctccccggcctggcgcgctgcctctttgtctctccgcgcctcccctcctcccagacaaatggctgttggcaggaaattggacgcgctcgggggaagccgcgcgccgcggggagggggcgccgcgcggccagcgggcctcgggtgcccccagccggggcgggggcggcggggatgttttgacatctcgtcaaagaaaggaacttgatgcttcgaaagtgcttttcacagccgggctgtgtctgctccagagctgatttatacgcagaatctgcgctcgcttctccgctccctcccccgtcagcccggggacggcgccggaggcgcgggcgcggctgtgcccggcaggatcgggtttatttattgcctctrgcccggagccggggcggcctggggactgcacagttccctctgcccgagcccctccccttctctccccaccccccaaagccggctgcttcccaggggcctgtcttccccaaacctcttaccagactctgggcggagccctccgacggtctggggtggaagtcggggacggaggcagagaggtggtaaggcgccccaaggggccgaattctgcactacctcgcacggacccagtggggagagggtggtggtggtggaggtcaccacctctgccctaaggtcggaaaggagccggagctgccagtctgaaactccctaccatcccagtagctctggaacccccttcctccaggggctatcctttctctccagggattcctctttccccagctccagacaaccccttactccaaggccccaggagccctttccctttagaataaattaaggaatctccagcttctactggatcccaggagaagaaaggtttgaaagatcacgtccctggcaagagccacagccctcagccaggtgatgggcacagggctgggtacaggtctatcacagtgccctggcttcacatctaaagagtccggatggccacagggtagagcagggacatgtgttcggctcccttaatgggtagcttgcggctggcatagtggtgcacaatttcagggacgctgctgaagggcgggctgttctggcccagcacatatttgtgttccttggttcgggacagcttcatgtgcatgaatccctggctgctcctgggaagaggagaggagactttggtgagtgggggctctcctcagccccctcatccatccacccagtaaccctccccaaccctacagcaartgtggtggttccgaagccagctgagaatgacaggtgattaggggaggtggaggtcagtccagaaagcaggggtggtggtggtgtaagtaggtagcactgggcattggctttgtggtaaggccactggttgtgccaagaatgtgtgtatagggagcatacagggtgtgtgcaggtggaaactgagcgaccagcacctcccccgacccctgctggccaaccctggggtccaggcaccccggccctccagcctctgtggccagggccagtttaacctcacctttcttgagctctttggtaggacacccgtgaggggctcctggtgactcatgtggaaccacatatgcccttggcaggagggtggacagatgtgacaaccaagctagtcttcattggggctctcccttctaatgactagggggaagggggaagctgatctggaagaccccccaaaatctgggagtgctcagctgcctcctcctggggatatcccttcactctcttgctttctgggtcttggaccaagcccctagctcatttatccggcccttcagcctacaatgacttcactcccttgctcagaggagacatgctcctgcctctgccatctccctgccacagccaggaaatcagcattagtgcctggccccgccctcaagacaaggaccccactgctcagagctctggctagctcctaaatgtccagggaccctcggcccatgagagggcatgggagtgagacctccaagaacctttgtctaaaccaccacaggcttggtctgtcaggcctcaggtctgaaactcaagcacaggcaaggggtgaggaatgttttggggagccctgaagcctaagtgttatatactgctggccagagcctacttggggacaaggacggggcttagaggttagtgtggaaagcagaaccagtgagggagctgcctccatcctgaggtccaccccccggagaagtgaggctggcartccttatcacttgcctcccctgactgggtacaaggctctgcccggacccatttcaccaggcccacaagcgagaaatcagagtggggaggctgaagggaggtgacagatgggaggaaaaacggaggccccaaactctatccctctgcctccccaggcatggagtcctcaggagcctagcagactgctaggaaaaggcctgaggccccagggctgggagtcagggtgcagggtggccggggccatctgtaggtctgagataactagggctgacagcacaggcccttggggaaaggagccaagggcctgaggcaaacagcccctgtgggtggtggagaggggaggcagtgtcccctgtcaggctcaaggctgtgggcagcagcatgggccctgctttccttcacctcttctcagtttggggctgaccccttctcccttagtccacctggggaattgtctctcctaaaagctgcacattgtatcttctcaaaagacagatctggctaagaaggacaagtggccagagagctcagccgccatctggataaccaacctcctgcagaggggatggctgtgctttcccacctcctgggacaaagtcccaagggtccattaggacacagcaaagcccttgccagaccctcagggtactggggttaggaccagctgggctgcaggaccaggctggcaagcctttttgaggaagttgtttaattaccagtgaaagctcttccattagtgagagaagagaaaccataattctatttcagagaagccatttatatgcaaacgaggctctggcagacagatgcggagccaggtcagccagggtgggagcaggtctccaggcctgccttgccattttacctcccaggctaaggcaggctggcagggctccactttgggagccagacccctggcatctccccttaccttggcctgtaccaaacaataatatggcactggtggagccctggaataccatagtttgtggagtcagacagagctgggttcaaatcctggtttggggactttattaccgggtggccttgggcaagtaacaaacctctttgaatttattttctgtctataaaaaagagatctatcttgcaggggagtagttggtttagaaatggtatacaggctgcttggtatgctccatgaactttataatttttaaagcaatacacatttctgaggttatgtaaatcaaatttttgacaaaaacttttctgggaaatgcttctttgattttacaattcagactcctagagtatgacagctggaaaaaaagcgataatctatcaactcatttggcaaaggtagaaaccgaggctcggagatattaagtgatttccctaggatcacatagctagtgtatcaaatccaagaatagaactcaggttacctgactatagtccggcactttttctattatctttttctttcttttttttttttttttctgagacagagtcttgctgttgttggcctgggctggagtgcaatggcgcaatatcggctcactgcaacctccgcctcctgggttcaagcgattttcctgcctcagcctcccgagtagctggcattaccagtgctcaccatcacacccaactaatttttgtatttttagtagagacggggtttcaccatgttggtcaggttggtctcgaactcctgacttcaggtgatccacctgccacggcctttgaaagtgctgggattacagatgtgagccaacacacccaccactttttctattatctttgagggaagttgaataattatcccccaaatatgtcttgtttagcagccccaagttcccatagattggatttgtctgaatgggagggtatatctgtactctgatggtcccagagaatgtggtagaaagtggtgcaggtgtcctactagtgatggtggggggcaaatgaacataccaccccactggcttcctaacggggtgcagggtctaccaggcagaactcctggttgcccagggcagggctggccatgctaccagggagtctgggaggctgatctgctgctcctgggaggaaagcctgatggggagggagggccttgcctcctctacgtcttccaggacccaaaagctcagacaccccccatccccgaacacacacacagacacacacactcttcctcagagtaaacagaaatactttgtgtccactgccctgccctccttccaggaaccagcccccsccaacaccctacagactccctcacgcaaagctcctatctccttgcctatgcttctagaacatcttgggcttccattaataatgacagtgataatttattgagcccttagcactatgctaagcacttcccatgcattatttcacctaatccttccctatattatcccccatccatttcattagtaaggaaactgaggcctagagaggttaagggggccaggccacacaactagaacagaacccttctgagctggatgctgcggatcaactatttctcccaatggactctgagctccttgagagcaggggctgagtctcagacatctcaggacccccagtgcctggggattgttcatgggggatggggacctccccagcttggttgggcataaggggaatactggagtccccttccaccctgcttgctgtycctgaaaccacaactgtccccactcacttgagggagagggagaagtcattcttgctggtctcactgttgcgcaccaggtagctggcctctttgcacagccggagcaggttctcggcgtcggttcggctgatggccccgtgataccagctaaggatgagagagaggaaggggggcatctctgctgggtccctcgctgtccaggcccacccattgtgggtgtcccctgtagggaagccagtgccaggaggggaggagtggggagggagtccccagctggacacagacactcacacctggttttccagaggcagtgctggatctgtccactcccccagggggctgctgggctccatgcttaggggtttggctgacttggggttccctgcagagagtcggggaggtagccgccccttctcctcccggccaggtgacaggcagctcttctccggtccttcaaactgggctgtggggaacatatcaatcatggactctaaggaccctagaggtcctcagaggtccctattgaatagccagtgcccaacccctacttcttccagccccagaaaggatcaaaggaatgctctaggagggcagcccatgctgaagggcctgactggctctggggacgtaatcctggatctatcccctggtgggggtgggcccagccttctgtgccacacagggtgttgcagtccccacattgtgggaggagagrgcagaggagcaacctgagaaaccatgcacgcttctccctccaaagcagctgactgccttcccccagtccatcctctcagggtggcttcagcactgataatattgtttctttctcctcctcagagttcattaccgttctccaaatcaccctgccaagccattctgtagaaatgacttatcgatctgagaacaattatctggttccccttggtgccatcctgacaggctaatcccgcccaaagccaccagccagcctgtccctccccsacccccaacgttgctgcccactggctcccctccccaacccacagaggcccagaggcagcacctctgccctcccagaccaggggagcctgatggctgagcccataagggaaggctgagcccccgtgggtccccaggcacacatgcgcacgtgcacgtacggacagacaccctccttcatcccatattttaaaatacaacattcaggcacaaatgtacraacagatgctcatgcctctgcacacacacccttgggtgcccattctgggcagaactgaacatagaggaagaattaagtgcgttctttctcctcatttgggctctttttctctccttgtagcactttgaagcccttactctctttcagtcaccagatgcaaggtcagatctgctcctctgcgccaaggagttccacacttgctgtgtctgtcccacccccagctcaggagtatttgcattgctgaaggagcttgtcaagcaaagctctccccaaagtgaatttaaaatggtggatttttgtagcatggtgaggaacacattagaaaggggcctccctgtagaagacaccatcccacagctgtggggaagggaggaacgtgcattttgtctcttccttcttcccaaatgagattcttcctggggtctccaaatcctgccccacctctcagctcctccaacccaacccacagggcctggaggggtgaggacatgtcaccctggccagaagccccccaggacccaccgctgctgtcctccaggctgggctcagggaggggcgaggctggaccggagatgtccctgtccccatcaggcagggaggggctgctgtccagctgtcccacaggtggaggccaaggtaggtctttgatgaccttaatgtcaactggagccagcagcagaagtgagaagagagacagacagtgacagagacagaaagaggtagaggttgagacaccaaaacccagagccaggacacaggacagcctagaaatgaggaggggcagaggcagaggcagaggcaggtcagcttttggggaggcactcaagggctgggcagagccaacgttgaccacaccaggttggcctggtcagagggagggaggcttgggtggcaagcagcaggatgcaggggcttgcactgtcagcccgtgggtccccttcatttgacctctcacaagcctccagggcccaaaggtaccaggaacaaaggaaatgaaggactaagagtgaccagcacctcccaacaccacatctgggttcccatagcctcctggcacccacagccttgcctccctttctccttttccccacagcctgggaactcgcaggcagcaagaaagagccagcctcgcctcaggttgtcaggattactcagacytgagggcagatgttttattgaartttaatccccaccccccatcctgagaagagtgatgccactggcggctgctggactgctaacgaggtttcctaatgacgagcatagattttcccattaagcaatccaaacagtattgattctccaaggagacttctggagataaacggcccatcctcaatggtgtgtgctttacaggaagaatattagaatcctgtggttttccagtctggctgtcagggtggggagggcagaggagggctgggtccagctccaggatgagccccttgcccaagcaggggagaggggcatatgcaggcaggagtgaagtcgaatggcatttgagccctttatgttctccctgaatcaaggacccaggagcaaaagccctctccctactccaggctcttgctccacccacctcagaccactaacatgaacttttccatggtggacttggacttgggatggacagaagaaacctgatcttcatttggcaatcaagagatttctcacagcctcactctgctcctcagaaatctccttggggccagacacccctggtccgccagggcctaccactgggaggcagagccctagaattcaggttacacccatagctgtctttattgtttgaagtaagtgccttcttttgttaaatgtaagtattttaacatatgtcrcgagtttcataagtttgttttggaatttatttttaaatatacccagtccccaaaagagagaagtagtctaagcctcttagcttccaagaggtggtgatgcaggggaatgccttcatccttctcctgtacccattccttgaccctgcacacagcgctgtgtccacactgccaaccccaccccctatggtacagaactcaactacatttccctggagtcctgatcctgggcctctctgggttcctggggtccactccttccattctcttgagcctggaaagctgctcagaggccccagctgacctgccctctccaccaggactcacctgcaaaggctttggaaatccgctccttcttccactcccagggctggtcatactcctcagggggcctctcatcatcctctggcaggcgggactcccggggccagggggccccctcaccttccgsggtggccccatcctcctctggctcatagggtgtgtcatacagaggcaagggctgagttgctgtctccttggagccccggatctctgccggagcagggcaggamgggaaaggtgagggttcagccttggctttctggctcccctcctccaatgcttctcagcaacaagccaggcctccttcagaggagatgccctggctctggggggagctcagcaaccacacatcctgggttcctcaccctcaaaacacttctgggtctctaaaagcaagggagccaatgaaggcaagggcaggtgggcactagagtaaaagacaggaaaaggatcctgcaacagccagcgagggctgggtagctaaaatttatgagtttaggaaactgaggcacaaccctcccgttgtccacttcctccctgatgccaagctccatttgtttccttctgtcccaaatgatatcattccttttttctttttcttttcttttyttttttttttgagacggaatcttgctctctcacccaggctggagtgcaatggcacgatctcggctcactacaacctccgcctccccggttcaagcgattctcccacctcagcctcctgagtagctgggattacagacatccgccatcatgcccggctaatttttgtatttttgtagagatggggggtttcaccatgttggccaggctggtctcaaactcctgacctcaggtgatctgcctgcctcggccttccaaagtgctgggattacaggcattagccaccacacccagcccgcaagtgatatcatttgacaatcacagaattattctttgctgcccagacactgtggaccacccgctccttgaaactttcccttcgacaagttacgttcatcatcataaagacctttcactttgacattccatggtttcaaactcatcaccttctctaaagctaattggttctctttttgggatcactgacccagccctcaccattattttgtccttcctgactatctcgaatgctaatatctgaccttcagttgtgtggcctcctgtaccacttcaggtcacacaagtcacatctgcttctccaaaaygactattggaaaggcagtgaccatcctccccacggacccggcaaagactttctttctgatcacccccatttggcctctccctagatcctctcttggcctctctttcccaagactaggtcttatgcatttttccctatcctaattccttgaactgtatgcccagcctcatggcacttgctgcatctgtatttccagtcatttgggtccattgccataaagacctttcgctttgacataccattgtttcaaactgaccaccttctccaaagctagtagttcttttattgggatcactgaccccagtgaaaatatgataaaagctatggagctactcccccaaaaaatgtgctcccatattttcacatataatttcagggcattcatgggggcttcctgggttccacaccctctgacctaaatggggtagtcagcttctcactttctccatttctgtctactacactgttctccttggacctggccctccttcattcttcaaatcccatctgttctttgccaatacccagtgaccttcaccctcatctttccgtatatagattactgctagggtgaacctccattctgcaggcttgtgtttccaagagctccatggaataatagtcctgggatattcttgaccactctctgcctcccttaccacctctcccaagtaggaagagcagtttattgtattggtcagtgaatgcacactctcttttcctgaagagaaagaacattctggttcatgcagtcagtggcctgctcctgtgctgtctttgacccagagccccaggtacccaagggcaggctctgagcttggatggggacaagctctggctcttcttttgcagggttcccccactaggcctactgagttgcccaagcctgattgggcaagtttaattctgtggtgaagtattaagaagcccattgtgatgacacataagcccattgcagtgaacataagtaatgttctctaatcaactttatcagtaataaagctgacattttcatcctgttcctctcttgctcaagaattcatcatggctccactccccattttgaagsaagtccagatacctcattccagcctatgaagcactgctccgcccctctcggactctctcatctaggttcccatgcacacccagcactaacatcatttgctcctgaacaaacttcctctcaccctgcctcagggccgtggcttggacagacccaccctgtcctctctgatctcccctatttgatctctttcccctggactgtctctcagcctctgttcccaagaccagatcttactcttttctctctagcctcactctttggactacttgcccaggctcatggcacccactgtaactgtatttctagtcatctttctccaactgccatgaagatgtttcatttcaaactcatcccccctcccaaggctagtggttctctttttgggatcactgatcctcccagccctcaccactcttttccttcctatcttgaatacttctatctgaacttcagttgtgtggcctcctataccacttcaggtctcacaggtcacagctgcttctccaaaatgactctgaaaggcaatgaccatcctccctaaggacctggaaaagactttctccatattttccagggaccaaagaatcagtccttagacttgtgagtcgcaaagcctgttctgcagagcccaggcctcagggagcacctcccctgcccctgtcactcaccggccatcatcttttgagcctcatagggctccatgtagccatcattttcagggaccttctctggggctcctgaagctcctgctgagccttcgccagtctcctgaacatcaaacgggtccgcatagtcttctaggatagctagctgtgggargagagtgaagagagtgggcttcagggagcagagaggcaactctgcttctcccaaggtactctgtccatgggagcaagagtcccaagtaggctgccttcgacccagacccccaggtactcaaaggaaggctctgagcttggatggggacaagctctggctcttcctttgcagggctcccctactaggctgccaaccaagtggtacctctttccttctttcttttttttttttttttttgagacagagtctcactctgtcacccaggctggagtgcagtggcgtgatctcggctcactgcaacttccatctaccgggttcacaccattctcctgcctcagcctcccgagtagctgggactacaggcacgcrccaccaagcccagctaatttttgtgtttttagtagagatggggtttcaccatgttggctaggatggtctcaatctcttgaccttgtgatctgcccgccttggcctcccaaagtgctgggattacaggcrtgagccaccgcgcccggccccaagtggtacatcttttccactaattttgtgcctctaggccatctcctaggctaaatggccaggaggaggctactgggccatagggcctgcctcaagtcagggtccaagcaggaccatagcttacaccaggtggttcaacaaagggaattacttcagagaaacagttacaaaggtgttggaagagttcaaagagcaagcaaagaatagtgagacaactcagagattagcatggtccatgcctacaagggcgcttccagatggtgaacaaataaacagctgctgagcatcaaggaagggaagactgagtagtcactttttcagttctgctgacggatcctcacaacatccctgtcatgtgggtattactgtccccattttaagaagtcagaggctcaaggaagttagggaacatgtccaggaccattctacgtaagtggaggaaccaggtgattggaayccatgccctttgtgcaaaaggctgccaacctgccaccagggggcatcttggctgtcctgggagagagaatgctggagccggctttgggacagacctgaagttgtgctgaagtccctgtggctcctggagggcagggacaggaaaggcttcactttggcccttcacttcctacgctgcccctttctcccacacaagtgggctcacggccactcctctatgcctgctgccattcatcgcacagtgaactgcaaaccacacactccgaagaggcactcaaggtgctcagggcggggcgcagctgaggacaatagaacctttctccaagctgggcttgggcttctcctgatggggcgctggctgaggcagagactgagcccggttcacccagggctgccagcaccccaggagcactgcaccactgggttgacaggcgatgacaggaggtggctccagggcctgcagcatggggagaggccactcttgcctttccctaaatctcagtctaggctttgattctgagccagaccagggctgtaggagccagctgggctgggaggccgtggggtgactggcctgctctgggttagagcaactgggaatggtgacccctagcaaggcagagatgaagaaaggaacctcttcacctcggagaccccttctgcatgttccttccaccttgctattccctctgaggtacctcccaatggctcctactgtctcatctggggtcttcagctcccaccttgttctattcatgccctcagctcctttacaacctcctttgcgtctctgcctgcttgtgggataaccaccatctcagatcatccaattaccaccactggactattcatatctggagctctttgttgtttttgtctttccagctccagtaagcacctggcatacagtaggcactagacaaatgtttctccttgatcatcgcctatctccccttggagcccttcacccctagtcctccttctgccaggaagtagagaaaataaatccactcacccctacccgcccaagctgcttcctcccaggccaactggcacccacagccccaccccttgaccaaggcggctctgtggtcagcccaccttcggtgattctgtcagtcggcagccagcatcacactcttgtggcagctgcttaacagtgtctgactcaaccaacacgttatccataaaccttgcgatggctctccagtgcttcaggaaraagtctgcagttgaagagatttgaaagcttccactttcctctttagtttctctctactcaccttggatcactttgttaccagaaagctgcatgttctttctacttcaaaggctttccctctgcctggatcactttccccttcctcctcaagagctaactcttatagattatttcttcagaaagcctttccatacacctcccaggcctgttaggtgtctctgtgctgggctattatcacactgcatggtaaatgtttgttttgttccatgtcttcctgcagactgtgagcttcctgagggcaggaaccatgtttactttcaaattcctgacagtgttaactccattcacataaaacaggaagaatggacaaaggaagtacttttccttgttcattcaggagaggaagcacaaatctggattgggtgggatcatatgaggggacagtctttccaagtgaagctgtgtcaccagaagctgcttggtcagcagaggtgcctgatccaacccccgatagtctccccacccctaatcctccactccatagagccccttcggcctctccctcaccaagcctgcaggcagcacccttcttacccaagtcctgggcccatgcccagagctgcgacccctccsaggctggcgtgggcctcctcagctctagcctgcagtgcccatgggcacccaggtggcaactctgtgggcagctcaatggctcctctgttccattcctggctccacacccagctccaggaagccccggccccacgccctgggctgggatgcccaaaggagccgyccacagggctgggagttgggagcagcagcagagatgccagttgggaaggatggcaggacaggcacccaccctgggcatagaagttcctgggcagaacccaggcytgctttcctgtggcttctaggtccccargatagactgcttagtggaggaagctgctcctataggcttccgacccctttgacctaccctaatttgttattttgtttatggtccctttgccccactctgatgtgctcactactgtatcctgcatcaatctcagggctggcacacagtaggtactcaatgtatactaagggacgctcaacaggcgtcctctccagactccatcctctggagtgacatcacctttcagatccccattcaccttgacctctaatggctgcaggatcaggctctcagcagatctacatctgaatagaaatcaaagactctggcgcaaaggccaaagggaggaattgtccgcaaaggacctttggggaagacacctaaaaccacggcggaggggtgaaattaaagactttcaaaacttaaaaataaataaataaataaaaaataaaaccmcggctggtatttaggcacattctctgatatagccasaatgctgctgaaatgctgaaagatttccaaactagtaaagtagctactacccagaggatcccatccctctccttcctgccacccagcagggtgcctccaggactctgctatattgtgtctgttccaattgggcattacccctcccagagcagctgtcatactttgaatctccttcctgctcaagcctctcctgtggtagctagcaggcctgccatctggttcctcttccactctgcaattgggccatgcaacacatccctgmcccccaccacggggctccagagggtgtggatccaggaggagcaagaggggcacacgttacaatgtgtgccttgctctggaaggtccccaaagtctcccactgcccctttcctctgtttctttagtttacattgagtgtctggaaacctctttttatgtgtagacctctgtctttttatctgtagaaaaaggatggtaatagtacccatatcatagggttgggaagaggaaaatgaatttgtaaaagttcttagcccagaggctggcatggagtcagtgctgaataaatgttagctctgaggataatcttttctattcaggtattaaggcctcagagtttagatgcttgtccagggtatgcagcttgtcagcagcagagacaagatagggaccctggcctcctgacttgtagtatgttatcatagatttttcaaacatttggaaaatgcagcatcttctctcctctatttgtagatttaaaatacactttaaatctaaggagtcctgcagcaaagaaatcagtctacttttgtttaattctgtaatttcccaaaaatatttaaccatggaagccctttgtcactgaaaacctattaacctgtcacagtttgggaaatggtacattacttaccttcctcgagatcaaactttttatacccattgttcctgcttattggaatgtccttctcctattttatctgagaaatcccttgacataaaacaaatgtctttcccttttctaattacaagaacaatgccatgttcataaaacagttaaacattacagacatgcagtagatcctagcaaccctcataagacccttgggtgtgtctggtgtcaccttgggattgggtagcaagtggtggtccccagcattcaggaagtagtaaactcagtacagaacacacccctcattccttccctaagagtctgcttcctcttgttcattagcaaatgcttagtgaatacctcttctctgccaggcacctgctggtaggtgctgagggtccaggcattgggctcactctaccacctgctggctgagaaaccgtgcaagtgtgactcagcattcctgtgctctggtttccccatttataatctggggatagtagtagaatcttcctcacaggaytgttttaaggatcagttggtctaacacatgtcagctgcttcaaaatggtatcaggcacaaggtaggtgcctagtaaatgttagccactatattattaaagacaaaaagaccaaatttctgagtccttctggaggaggcccacagtgatagacctaaaataagctccaagttgtgaagccctaaggctaggcaccaggctctgggggcacccacaggcccaccgtatgcagggtttgggccccacttttgctctcacataatatgttgactctgtggtgagggctaatggagtgggcagcaggtatcctccaagtcctgggccccagccagggcttgttcagcctagccagtagctcccacccatggtcctcagggtcccagctgttcctggctcccaagaggcaaagtgccagagctgagttgtcattgagtcactcactggccaaggtaagaagcacagatgtcttccagacagagttggtgccacaatgtggggtgacagcactgggtagagtggacaggcctgccatccaatcccccagtagctgcaggcctcagccatcctcaaagcagcaacggcagcacagatggccagcctgggccacagaggcttaagaggtttaactagtctacaaaagttccttcacctggactcctaccttctcctccctcccttccccagactctcctcctccctctatctccatctgcaacataagcagactggatctacagactctgtggaagtcttaagaagaaacattaaagcaaacaaacaaaccccaaaaaggcaagtatgaggtcttccaggtgctgtgtccctttcagcgcctaatgacatacacttaatgaacactggctaagagatggtcttacattgactggcagcccctaccaatcctcctaacctcagggcaggaatatwttgttcaactttagatgccctgactgtatccctcactttactcttcctatctctgtctgtttactcctttccaaatctgtgcctggaggayccaagtcctgtggatatcatctatgaagtacatctattttttaaagttcttaatattttggggcctgtgaaaccctacgagaatctaagagctatamctttccccagaaaaataggaaatatctgcacacaatttctggcggttcatgaagcccaggaacctctccatgagctaagaagagccctggttgtaatccagggtgcctgactgtctcattgtccrtgttacctctccacccaaccccaaacacgtatcttggcatgagggaggcaaaggacacactgcacagatggtcacaggcagctgagagctttgtccaatcagagccctgttcccatatccatccccttccctaattacaccaggtttttcctgctaaaggtctgagaaaagggagcaaagcaaggggcccagctctctagcccccactgccagagcatggcctgggggccagacgagggcccagcaccgtgaagctcttcctctggccagrtggcaaggccctgcctgcccgttgcagggcgcggctcctgctgctcccacacctgccctgccaggcctgcccagatggccacccctgcacccctgccaactacggcagtgggtcccagggtgggctggcagccagaaccccacatggggagaaggctaatggtcctgaaccccctgggcctctcggtactgtcgaggacctggttctctcctgcccccatactaactgggtttctgctcaatccctctggcttgtcatagaaacacctccacccatttcatcaaatctcatgacccatcccttctcagagggttctgactcccccagccccagccactgggctccagaggagagaataggccagcacaaagcacatccctgttcccaggcctcatcacatgtcaggaggagacctcaaagcaagccagaaggcctgagagaaggaggaacagaaaacagggagaaagcggccacatagtacataaacaccagctccactgggccacaggggcatgcgccagctcacatccaggagcagcatctcttaggtttagggtaagggactcaggtaccttgtttgagcttttcctaggggaagactcagaccccaaactctgctcctaaaggggtggggagctgctctctctaaatggtgggaggccccaggtcagggcccagagagatagcatccctgccccgggccaactcagatggcatcctgggtctttctcatcacacccattaaagaaaccacagattgtatggctcctgggagagcctgctggatttcattcctgtccctgtagctgacaaaggagtcagacatctcttggcccctaagtctgaacagcacacagatcacagagctgacccaagctgaggcatggaggcccttggcaagaagaggctgtgagtctctgcatagaactgtgtgggtgcaccccttccttgggggtgtctgggaaaatgtgcaagggaagctgtggctaggggagtctccgaccctcacgccaccctgataatggacagtcaccattcaggacatatttatgtacccttttttatgtcaagcattgtgtcaggcacttgggagacacaagaagacatggtctgtgtcctggaggagcccatggcttggtgggcagcctgttagggcatccaagccactgtagagaggagaagggccaaagacagctcaggcccatgttgcctgtgccaaacaggcagtggttagagaggaggagactgactggtcagtgggaagaacagggcctatccctctcctctgtctcactgtcactacctccatcacatcacacaatagcaggggacaagaagcagacgagcacagccttggagaagtgcccttgaaccttcctctgcagaataagtatcctggcccaggatgggcagccatgccccatggcaaaaactaggggaaaaataatttgcattcctgaggcttctgctctgaccctgacagatctctctcatccaggaaatctggcggaacggcgctctctcagctaaaaagcctcaatcctggagccaacggattcggaaagcaactytgcactccaatcaaataaaaatgttcttctctgctgaggagaagggggcaggccccagaactgagctctcggggtgagtgaagaaggacagcagagccaaggcagcccacagagtcatcatcacagaatttaggggcctgggatggctttcagctctcactctgccagggagggataaggccaacccgaatcagggcagggccctgaggcatggtggatttcctgttctcctccctatcctggtgcctgcagacccaggaaaagctccagcctccctcagaatggaccagggggagagggaggccaggaggagaggaggaatgggctcagctgcttagccccatgtgggcaacaggtcctgagcactgactatcctcatacctgagaggacgagggaaggagggaggagtgggcctggaccccacgaagcccccttggcaagagctgtaagctgcctgtcttcgcctcctgagaacaacagcctatagggcaaaggccagctcgtgctgtgtccgcaaggagaaacccgtcttcacctcctttctggggcttcagcacctgcaaggatgcttaggctggagaaacaggaggaggaagaggaggaggaagcaaagaggcaacaggagggaagagctttgtgctggctatgcccagggggaagggtcagagatcaaagggcactgagccgctgcttccagaggggcagaaaggccatcaaccagtgggggttgggaggtgcgcctcaattcccgttagcaaaaggctcayggatcaggctagagggggctacgaagtggagagccagcccgggagggggagggtcaccagttctggggccattacaaaggatagggcagaggggcagagtttggggcttccgtctcagattagtcggttgagaatctgaacaaaggtgggtgaaggctcggaaccccggggtcaggggctcgcgtctgccagaagctgagacaccgaggggcccgggccaggccacctttgtccctctcgcagcctccagacccctgaccgccttccctcctggccatcccggcccggcgcggcactcaccctatcgctgctggcggggggtccggagatccgctcatcagcaggcggcgccgggggccccggggtctcgacccgaataaggcggtgtgggggagagccgtggcgcgggggcggcgtgggtccgggggcgacaggggtggcgagggcggcggagccggacgaccccccggagtaggggtcttcgaagtcgcgctcccgctgcagcctgtaggcggccaggatgtccgggggcggcgcggggggcgcggccggagagggcgcaggggggcggtagtcgggctcggggggcgccggcttgctgccccctccgccgccgccccccccgcggaagcccaggtgctcccggagccacttggctactccgccgctgccgccccctcctgggccggctcccgcacccccggcgccccggcgggacccccccgggccgcccccagcgctcccctgcgttcgcggccccgggcgggagccagccggaggagctccgctcagtaacatggggccagccagactgagcgaggggagcgcagcggcgggtggggggcgggggcgggggtggggaggggggcggggctccgccgggcggggagggggcggggcgcttcagtaacaagggagaggcggggctccgctccctaacagggtcttcctcctcccgtagctcggaagagtgtacgcgggcttccagccggtatgcacaggcaagaagtgaagtgggcagccctggggcagaggatgcgactactggactgaggttgaatcctttacgtgtcgccacgcggtcccctgtggggagcgcatccatccccatctgttcttttccccagctcccagctcgtgcgagacgcaaagaggggagcccccagactcctgactctagggagccttacgcctctcctcttccctctcccaggatctcgcaactgggaaactataatctaggaggaaaatctaggcgggcaagaaaaggggctaggttctgtaagatgtgtctgtaagcctcctcctcccgtgctaccttgggagccccacaacctcctcccatccaaccgtacgcactgcacatacccgaacctacgttacttcccgatccaggcaaacacatctcacatcacatacaaacaactccctagagacgcccacttctcccgtgtcgttttcacacacgcccttctcacacgcaaacagccctcgctcaaacatcccccacccacgggagcacctgctccaaacgggcccacatggccctgacgatagcatgcgcacgcacgcagaaatcccttccagccacatcccgggcttcattgtcaatcagattagtaacagaatggaaacagacaagtcaataaatcaagtctagaaacagtcccagtgttgtctatcacaaactccttatcctcttgaggctcagatgctcaagtgctaggcatttttgtcttagaaataaagccagttccggctgggcgcggtggctcacgcctgtaatcccagcactttgggaggccgaaacgggaggatcacgaggtcaggagatcgagaccatcctggctaacacggtgaaaccccgtctctaccaaaaatacaaaaaaattagtcgggtgtggtggcgggcacctgtagtcccagctactcgggaggctgaggcaggagaatcgcttgaacccaggaggcagaggttgcattgagctgagattgcgcgactgcactccagccagggcgacagagtgagactccgtctcaaaaaaaaaaaaaaaagaaaaagaaaaaagaaaaggaaagaaataaagccagttcctcaccataaatgtaggcctgaagccaacaccaacacatttgctcttggctctgctgggaaagcagctgtctcacctcactttaccccaccccctttcccccactgcctcagtgtctccgcactcctaggttcatgtctgcctttttttttttttttttttttttgagacggagtctcactccgtcgctggagtacagtggcacgatttcagcttacagcaacctccacctcccgggttcaagcaatgctcccagctcagcctccctagtagctgggattacaagcgtgcgccaccacacctggttaattttttgtatttttagtagagatggagtttcaccgtgttggctaggctggtctcgaactcctgacctcaagtgattccccacctcggccttccaaaatgctgggattacaggtgtgagccaacggcacctggccatatctgccttttgagggcgcaaaaagccaagaggccccaaaggaaaggagttcaaagcgggggggtgtaaagaaggatgtaatggcaaaactgtgaatctcctgggattcccagggccccgagtctcaaaatatttgttgagttcctgctttgtgcaaattctagttgggcgaggtggctcatgcttgtagtcccaggtacctgggaggttgaggtgggagaattgcttgagcccagaagttcaaggctgcagcgagctatgattgtgccactggtcagacagtgctgcttgtatttaggacagtgcttctgatcaagccagtgctgcttgtatttaggacagtgcttctcaaactttaatgtggacactaatctcctggggatcttggtaagttacagattctgactctctaggtctagctggggtggggtcccaggtgatacagatactgctggtcccagaccacatgttgagtagctggactgtaggagatactggagaatctgatgttgaacttggttttatgaagtataatagagaaaataacgtgcatatttttaaaatgtgcagttaaattgactaatggtgcaaaacgaagctggacatagagatgataaatagagaagaatggtccagttaatgtatatcagagagtctccacagtcaccaggtgtgagggcatggataggtaactaataagaaatccaatagttgtgggctgtagccaggtatttggggaaggtactcaatgctactgatacttgctttcatgatctctggaaagggcgtgataatcattgtgtgaggattaagggaggtgatgaatatgaaaaaggtttgaaaactgtaaaatgcttacagtggaaggtgtgacatgagttaaactgcttgacagctcagaggaatgaaatcaatcaagtctgcaggcttcatgcaggacaggaggtagacctgagctgggtaggatttggacagatgaagcaaaggagtgaaaggtcattccaagacaggaggtcggcattagctggacaaaggcatagaggtgggaacccgcacaccataaaaaaggggagtattcatgatgggaagagtaggaataaaataagatgggaaggagggaagatgtcataaaggcagggtttaaacaataattttaaaattataaaaacttgtgtgcaccatacacttactcttgttttaaaagatctgctaatgtactttcctccattaccagagtatgagctcctaaaagcaggcagtttgagcacctcatggagtcaggcagcttgataggaaccaaggatacagaggtgaggccatcacagcaagggtcctctgagaattgggtggaattttctagatccaaattctgtttaccttttctttcctttagagatggggtctcactctcttacccaggctggaatgcagtggcacaatcatagctcactgcagccttgaacttctgggctcaaacgattctcctacctcaacctcccgcgtgtgatccgcctcacccaactaatttttaattttttgtaaagatggggcctcagtacgttgctcagactggtcttgaactcctggcctcaagcaatcctcccacctcggcctcccaaagcactggtactacaggtgcacattaccatacctggctaatttattgtattttattttctagagacgaagttcttgctatgttgctttgactggtctcaaactcctggcttcaagtgatcctcccgcttgggcctcccaaagtgctgggattacaggtgtgagccattgcacccagcctagattcaaattcttgcatgttaagcagttcgccatagtatcaggattctgtaaggaagcatgggtgctcccatcaccaagtgcagagcctgtcacatggcatcggtttaacaaacgttgaaatggataaagacaatttgtctttcttattcttagttttatatagctataattgtggtatacacataattttatatcttttttaacttaacattgtatgataatttccccatttttgtcatgtaagtttattttcttccaaattttttttggggaaaactatcaaccctacagaaaaatccaaagaaagtatactggaggctgggcacagtggttgaagcctgtaattccagcactttgggtggccgaggtgggcggatcacttgaactcagatgttcaaaaccaggctgggcaacacggtggaaaccctgtctctatttaaaaaaaaaaaaaaaaaagtaagtgtggtgtaaacctatttacccttcagctagattcacctctttttaaattttgccatatttgccttattcctctcctttttctttcattttcttaaccatttggtacaagttgcaaatatcatgacactttggttttacacactttagcaggcattgccaaagaataaggaattctatcaggctacaagatcattatcacatttaggaaatttaatatttatttaataatattgtctgtcatacaatccttattaaattttttgatttttcctgaaagtgtcttttatagtttttttctttttttattttgtttttgaaaaatctttaaattttccttcaggcagcctcctgagccagagtaggctcaaagaaactccctacagttttttttttttctgattccagatttttttttttttttttttttttttttgagacagagtctcgctctgtcatccaggctggagtgcagtggtgcaatctgggctcactgcaagctctgcctcccgggttcacgccgttctcccacctcagcctgctgaatagctgggactacaggcacccgccaccatgcccggctgattttaattttgtattttcagtagagatggggtttcaccgtgttagctgggatggtctcgaactcctgacctcgtgatccaccttcctcggcctcccaaagtgctgggattacaagtgtgagccaccgcgcctggccctgattccagatttaattaagtttccccatttcatctgtttgttatgttcctttagtctattttaattttgaacagtcccctattcttttgttgctagtttgtttttcatcacatttatctttttgaaatgtccaggccaattgtcatgtaggatgtcccacattctggacttttccatagtttcttcatgattagattcaggttacacatttctgaaaggagcactacataggggatgttgtggactttctagtgcgttacaccagaaggcccataatgcccatttgtccctttattggtgatgttaggcttgatcacttggttaagctggagtccaccggatctctccactttacaatttaaagaaagctgtggaatgatattctgagaacttttagctattttcttcaagcaacatattaccccattgttttatcccccacattgatgatctatacttaaatttgctattacactggggattgcaaaatagtgactctctaattctgtaattctatgaactcaaaatatctgagacaggtctcaagtaatttagaaagtttattttgccaaggctaaggatgcacacatgacagcctcaggaggtcctgaggacaggtgcccaaggtggtcacggcccaatcaatatgtgtaaaatgtacattggtctggtctggaaaggtgggacaactggaggccagggagggggcttccagttcataggtagatgagagacaaatggttgtattcttttaagtctctcattggcctttcactgaatacacaatatacatgtgagaggagaggagaggaatagtcacttatgccttagtctggtttagtgaagcaatagggcagaggaaacaatagggcagaggaaacaatcagatatgcatttgtctcaaatgcatataatattcagtcatgagcctcagagggatgattgagttccacaaggaaattccttgtgggcaaattggaggaaagtatgtcgctttttaaaatctttgtagctatcttatttaggaataaaatggagccaggtgcagtggctcacgcctataatcccagcactttgggaggccgaggcgagtggccttatgcaggcttcatgcaggacaggaggtagccctgagctggtaggatttggacagatgaagcaaatgagtgaaaggtcattccaagtcaagaggtcaggagttcaagagcttgtgctcaggaattagagaccagcctaggtaacatggcgaaaccccttctgtaccaaaaaaaaaaaaaaaattagccaggtgtggtggtgtgagcctgtagtcacagccactcaggaggctgaggtgggaggattgcttgagcctgggaggtagaggttgctatgagccaagatcgtgccactgtactccagcctgggcagcatagtgagagtttgtctcaaaaaaaaaaaaaaaaaaaaaggtaggcagcattgcctgacatagttcccagcttgactgttcctagctggcattcttctgtaaaggagagctttcttacctctcccccaacctccatcatggagtgaatttttttttaattcaacatgatataatccattattatcatattattattctttttgatgcccaaattacccaaaatttgactattgggagccttttcaagaggctcctgtgtccttcttctgttttgttttgtttttttgagatggagtcttgctctgtcgcccaggctggagtgcagtggcgcgatcttggctcactgcaacctacacctcccgagttccagcgattctcctgcctcagcctccttagtagctgaggttacaggtccctgccaccacacccagctaatttttgtatttttagtagagac

SEQ ID NO: 96606 - DNA, 51117 bp, Homo sapiens
cccacggatttaactattaatagcaattgtaatttccttgattttggattttagcaattttgataggtgtgtggtggtatctcattgttgatttaatttgaatttcccaaaaaaaagatatttagcaaatttttatatactgatttgtcgtctgtatatcttttttttttttttttttttttggtgagacggagtctcgctctgtggcccaggctggagtgcagtggggcggtctcggctcactccaagctccacctcccgggttcacaccattctcctgcctcagcctctggagtagctgggactacaggcgcctgccgccacgcccggctaaattttttttgtatttttggtagagacggggtttcaccgtcttagccaggatggtctctatctcctgacctcgtgatccgcccgcctcagcctcccaaagtgctgggattacaggcgttagccaccgcgcccagcctgtatatcttttttgatgaagtgtctcttcagatattttgcccactttaaaaatcaaatttttatttttgagataaaattttgtagattcacatgaagttgtaggaaatggtacagtgagatcctctgtagcctttattgggtttcccccagtggtaacacttgtaaaactatggtacaatatcacaacttgatatttaatttgatgcagtcaaggtacagaacattttatctttgtagggaattgccaaactcatcaataatgtatgggtgatccagtttctccacatccttgccagcattttattgttactattttttattgtgataggtaatgatacttcattgtcactttaatgcatttacctaaaggctaatgatgtggagcatcttttcacatggttacctgccatctgaatatcctcttcagtgaaatatctctttatgtctttttcccattttctgattggattatttgtttatctgctgaggttttagagtttgttatatgttctatacatgagttcttttgtgaatattggcttgcaaatatttttagtggtctgtaattatgtttattcctgttcatggtcttgcacagagcaaacacttttaattttgatagagtccaacttgccattttcccttcagtggttaatgcttttggtctaaaataagagagctattaaccctagatgcaaagattttctcctatgttttctgaagtttggtagtttcagttttgcatttaagtatataatccattttttagttaatttttgtaaaaatgtgaggttcaggctgaggttcaattttttggcctatggatgtccagttgcaccatcaccatttactgaaaaggctatccttcctctattgagctgcttttgcaactttgtcaaagatcaactggtttttgctcattttataattgcgttgcttaatttcttattgttgaattttaagagtcatttgtatattttgaacacaagtcttttgtgatttgaaaatatattctcagtctatgacttgccatttcagaatggtaatgatgtatttttctattcctaattaatagtttaaaaaatctttttatttcagtcgggtaaaagttccagaaatgtgaagtacaaagatttttttgatccagttgaaagtgatgaagacatagcaagtgatcatgatgatgatctgggttcaaacaagtggatgaaattgctgaagaagcagcagaagaactaagcatttctgaaatgtgagtatttgaaccatcctttacattgtgagctggaattgtccaatcatgtattggtacttgtggttttcacatatgtttgttttaagaagttagattctctcctatcagatattctcaagatagccagaggaaagtctgtggatttaaagggacattagagatcatttaatgaagaaaaatattactggcagtagcaatcaaacatttcttgccaggaaccttgatttggttttgtaccccaaaaatcctgttatttttgtgagattgatggtttgtattatcaattgatgaataatttattttctatatattggacacttttgttctgtttcttacatagcatgtcacttaaatgataccttctcttccgtaatacctgaatgattttggaacttctgagtatttggttgcattaggcatataaaagaagaactttattaagggaaaatatgtttccttttgtttttctaatggaaagcagtatatttctttttataagagttttggtagtgtagggaggaagatgatgacctggaagaaagtgaagacagtaaacaatgtaaagaaagcttgaaaagagtgaccttcactttgctggatgatgaggcaactgaagatgcaggtgttttaaatgtaaagaaaaattctgatgaagttaaatcctcttgaaaaaagacaggaaaaggtaattaggaatttaaggaatttttaatgtgcttgacataactgtggaactcacagactactaacaaatcttccctatctttcttttttttttgagaaggagtcttactctgtcacccaggctggagtgcaatggtgtgatctcagctcactgcagcctccacctcctgggttcaaatgattctgcctcagcctcctgagtagctgagattagaggtgcatgccaccatgcctgactaatttttgtacttttagaagacatggggtttcaccgtgttggccaggctggtctcgaactcctgacctcaggtgatcctcctacctcagcctcccaaagtgctgcgattacgggcgtgagccaccgcgcccggcgattttacaggtatcattacctagaatgaggtgaaaggacacggttaggatttttttttaagtgtaaggtaagttaaaatagtaagaaacagtagtagcgtaatacctggccatggctggaaggtgggtgctgatgatgggcattggaacagacctggatacatctctggcatcagggtcaggaggcagtgagcctgtcgcttcctagttctggtgttttttttttttttccatgtcttaataaacaaacaaacaaaaagccctcttagccatttagaataagcatttggggccaaggggagcagagagaagtatgaagtttactttttctcttcagtagaataaaaattgctgtccattttttcaatgtgatttgtcagaataaatctttaacgtattacatgtaaataaaagaaaaaaaagtccctacaatccaaatggatatttggataattttacgaagtctatattaacactttagttctatcagcccacaataaagtcccatatccatgaagcagttgctaccctttactcactagccccagccccaacaatccccagtctgtgtcctatctttgtggatttgcctattttgcatatttgatataaatggagccttacaatacgcagcctttcatttctgacttcttgcatttagcatcatgttttcaagactgtagcatttgcttgtgcttcatttctttcttatggttgtatggtattccattgcgggaatgtaccatgctttatctgttcatccattgatggccattcaggctgtttccaccttttgactgttaatcgtgctgtgcacatgtatttgtttgagtacctgcttttaattctcttggttttacacctcggagtggttgctgggtcagatggtaattctctgtgtagctttttttttttttgagacggagtctcgctctgtcacccaggctagagtgcagtggtgcgatctcggctcactgcaacctccgcctcctgggttcacaccattctcctgcctcagcctcccgagaagctgggactacaggcacccgccaccacgcctggctaatttttatacttttagtagagacggggtttcaccatgttggccagaatggttttgatctcttgaacttgtgatccacccgcctcggcctcccagagtgctggtattacaggcgtgagccaccacgaccagccccaagctctattctgaatgcaacagggaaaggggtccttttagagcttatgctcaaaatctttgtctcccctcctcccatctcactcaaagtcaatgctcaaatccatacaatgacctgcagggtcatacatcaggtgctggcaaacagtagctggatggcaagttagccagctatttttgtaaataaagttttattggaacaaaaccacactcatatgttacatattgtctatagctgctttcacactaaaatagctgtgttgcctagttatgatggaggccacatggtcccaaaagcctcaaacatttactccctggccctttacggaacaaatttgctaacacttgccctccatggtctggctctctgctgcctccctggctttgttttcttctgcctccttggggttcttagagcctgctagataatcttctgcctgacggcttttacatgtgctgttgctgtttcctggcctaccatggccttctctcagtccacactgttacctccttcaggccaatgtcaatcttcaaatgtcatcttttcagtgaggacttcccttaccactctttcaaattgtaacctcaaccctaagatgtttctggctttacttgtcttcaatttcaccacatagtttactttttatatttctctatctccttccaccagaatgtatccttcatgaggagttcccctccctcccatgaagaatttcctcccattcctcattgttcactgccacatattttcagcatctaaaatgttacctggaatgaggtaggcagtcaatacattcttgttaatgaactccctatttatgtccttattctctttagtttgctcatttatgcactcattcagtgtatatttatcaataattacacaacgctagccactgctgcaggcagcagcgattttatagtaaaggcaacaagcacaaccgcctgatgttaagaagcttgcattctaggtcattcatggtgggctggaacacgctggtgtcagtgcttcagggctgattgttaaactttcaggtgttaggctgggcatggtggctcacgcctataatcccagcactttgggaggctgaggcgggcggatcacgaggtcaggagatcgagatcatcctggctaacacggcgaaaacccatctctacgaaaaatacaaaaaattagctgggtgtggtggcgggtgcctgtagtcccagctactcaggaggctgaggcaggagaatggagtgaaccctggaggtggagcttggagtaagctgagatcgcgcccctgcactccagcctgggtgacagagcgagactccatctcaaaaaaaaaaaaaaaaaaaaaaaaaattcagctgttaaacacagccattattgaaagttaaataaatcatatagctttacaaataaattacattaaaaacagaagtcataaatactcaagacgcatcacttcctagtcgccacattttatttcttggttcttgatgttattatttcaagggtatcagataaccggtgattagtactatcttttggaaaacccagctcagtggttttccaactgaaactccctctcgcttattcgcaggagtcagcttaagtagagctccgcgtgttggttgcagaagtcgcctgtcttccccgcaggaggctgtttgctcgctttgacactgaatgctcccccaacaaacacgtttagcttgcttgcccttctcaccgactgcggagaggagtctcagagtgcacagtcgcagagaaggcgtgcgggggcgtgcaggggcgcacaggcgcctgcctctgcgggtgggaaaggaaggaggtgcccgggtttccgctcccagggctcagcctgccttgggcacctacggtatgggagcctttaacgtggaaaggaaaggagatcgatcactcgagcctccacttgccaagcctgtggaagcgagacgcggggatcggctgggaatgcctggaagcgccggcgcgcggagccaggtgggaggtgcgaggtggccgcgcggggatcttgggtgacagggcaccgagggaaggaggacgcgagggcagccaggccctagggagcagggagagtggctcgggctcagtcgcgtggccccaggtgcgcgtcccaggtgcgcggccttgacccagcagcgtccgccgtgctggccggggcctcggctccgcagcagaagccgcggtggtggcagccggcgcgggcgcagctgcccgcggctggggcgtttcatctgcgccggcctatggtgcgggcatcgccctgggccacgcgctgatcgtctccatctcactcagaaaaagttactcatacagtggtcttgtaaagggtctgaagtggtcaaattgtccctttttagaaacggatagttttaggtcttaaagatgtcctagaaattacccttacaagcccagctctgtcattttatagtaagggacactaagatcgcgtacagagcttgtcggaggggcttggtcttctgtctcacgctcagggttgtctcctcgttacaggagaccttgctcttaaacgtttcagagttcgcttttccccttgctgaattcataaaaatgtttttaatttatatgtgtttcttcttgtaggaagaagaaattgtcgagacgaataacatgaggtcatatagaatcccacttttggtgatttcaagtcaagaaagtaaaagtaaaccattgctatctttcaccttaaatatcctgtgttttattgctcagaacatccagtttttctaatactcatgatgtcagaagggaaacctcctgacaaaaaaaggcctcgtagaagcttatcaatcagcaagaataagaaaaaagcatctaattctattatttcgtgttttaacaatgcaccacctgctaaacttgcctgccccgtttgcagtaaaatggtgcctagatatgacttaaaccggcaccttgatgaaatgtgtgctaacaatgacttcgttcaagtggatccagggcaggttggcttaataaattcaaatgtgtctatggtagatttaaccagtgttaccttagaagatgtaacacctaagaagtcaccaccaccaaagacaaatttaacccctggccaaagtgattcagcaaaaagggaagtaaagcagaagatcagtccctactttaaaagtaatgatgtggtgtgcaaaaatcaagatgagctgagaaatcgtagtgtgaaagtcatttgtttgggaagcctagcatctaaattgtccagaaaatacgtaaaggctaaaaaatcaatagataaggatgaagaatttgccggttctagtccacagagttccaaatccacagttgttaagagcctgattgataactcttcagaaattgaggacgaggatcaaattttggagaacagttctcaaaaagaaaacgtgtttaaatgtgattctctaaaggaagagtgcattcctgaacatatggtaagagraagtaaaataatggaagccgaaagccaaaaggctacccgggaatgtgagaaatcagccctcacccctggattctcagataatgcgatcatgttattctcaccagatttcactcttaggaatacattaaagtctacttcagaagacagtcttgtaaagcaagagtgtatcaaagaagtggttgaaaaacgtgaggcatgtcattgtgaagaagtaaaaatgactgttgcttcagaagctaaaatacagctgtcagattcagaggcaaaatctcatagttctgcagatgatgcttctgcatggagtaacatccaagaggctcctctgcaggatgacagttgcttaaacaatgatatccctcacagcattcctttggagcaggggtcaagctgcaatggtcctggtcaaacaaccggtcatccttactaccttcggagtttccttgtggtgctgaaaaccgtacttgagaatgaagatgatatgttgctctttgatgagcaggagaagggaattgtaactaaattttatcagttatcaggtatcttacgcacgtgtttgttttcaagttttcattccccttttgctgctctgattggggcatgatgtgatgggcagtaatctagtgaccgcaaggagtcactgtggtgttgtgagcaccctgtgggagtgttcatgggagttggagcatagtcgaaggttttattgagagggatgcatggaaaagagacaagattttgtcccgggtgatgtttactcctgctgaactttggttacattggaagcagctgtttttcttttataggtacatttgatagttatgaaacaaccttttccagattaaaaaacaatataatgtgacttagaaaagcatactttgcattttgagcgtgtaatcaggctttccattaggttgttttgttgttcctcaaagatgaaagtagaataaaatacaatacaggaagaaaacaaaccaacctgaggcatattttctttctcccaacaacattttagatttatggactgtgccttttaaagacagggtgtggaggaaatggaaactttcaagctgaaattggtacattaaaaatactagtctatgcctgaagtccttggcagccaggggtggctccaagccagcagtgcaggtttgtagtaaaagccacccttgtgtctttacggtgttattcagagggccatgatgactctgtggaaccatgtccctgagggcaggaaaaaacatggtagtcacactgtcgtttagtaaaatgcggccatgtgtgactcctcagtagataaaaaagagaaaaatcctgaacattactattgatgttcaagggaaggatttctattttaaattcgcacagtgraattatggtattccttgggttactttttaacatgtgagcgatacttctctgggcacagctgtgtgtagtatccacttccatctctacttttgctgttctcaccagaagatggacataatagcacattggcttttctatccaaactagtcacagatctttggttgggtgctgattgcattcctggagtatttcagagattggtggctctgtaattccatgtaattgagaaataggaacagttttcctagtgcaagttctgcatatgcatgtgtcttgcactccatggagaatcatgtacaatctgttggtgtgtagaaataattactgctaattgtttttgcctttttttttttttaattttaagttcttttagagacaaggtttctgtctgttgcccaggctggagtgcagtggtgtaatcatagctcactgtgaccttgaactcttggtcccaagcgatcctcctgcctcagcctcccaaagcactgggattacaagcataagccataggctgggcatggtggctcaggcctgtaatcccagcactttgggaggccgaggtgggcagatggcctgaggtcaggagttcgagactagcctgaccaacatggtgaaaccccgtctctactaaaaatacaaaaattagccgggcatggtggtgggcgcctgtaatcccagctgctctggaggctgaggcaggagaatggcatgaacccaggaggcagagctttcagtgagccgagactgcaccattgcactccagcctgggcaacaagagcaaaactccatctcaaaaaaaacaaaacaaaaacaaaacaaaaaaacaaccaaaaaaaacaacacyagcatgaaccatcatgacaggtcaattttgcctttttaaagaagaaaggaaaataaatgttggaaattttcaaaatacaattaagccattttagagttggccgaaatttaaagataatctgggtaatagggagattgagaccaaacaggttaattaagaagcttggtcaagattgctgggttagagatgactgccctactgaagctagacattttttttggaaaattatttcagattattttcgatcaaatcagaataatgcatattaagctaagagcagagaacaaaataagaattctgggtagggcttttctgagggagtagaaatgttgatgtctagaaaatggggaacttgatcttagaagttttaaaatgaccaataattgttaccaaatttttaaatgtactttcaaaatggtttattccataaaatgaaggccttatacatacagtaagcatatgtgtatttctaaatcgtacatttattcaccttaggtttaaaaggtaaatgcagtgattttcaacatttttcttaactttattgcagctactggtcagaagttatatgtaaggctctttcaacgtaaattaagctggattaagatgaccaaattagagtatgaagagattgccttagacttaacacctgtgattgaagaattgacgaatgcaggctttctacagacaggtatgactagtagaaggagatgtgaaatgaaaatatgatctgaagaackgagcttctgcagaatgatggcagtattattatggtgccctccccggggtggtgcctggtaacttactgttttttaattgaatttttaatcttaggacaacaaattactcatgtgatgctaaagccattcttagcctgagttaagaatactagaataatgagagatggtctgcwgctgttttcttgactgtggcaggtttagaatgaaagtcacctgggcatagacatgggtgtgtgccacagaagaaatacatcccggccgggcacggtggctcatgcctgtaatcccagcactttgggaggccgaggcaggtggatcacctgaggttgggggttcgagaccagcctgaccaacatggagaaaccccatctctactaaaaatacaaaattaggtgtggtggcgcatgcctgtaatcccagctatttgggaggctgaggcaggagaatcacttgaacccgggaggctgaggttgcggtgagctgagattgcaccattgcatttcagcctgggcaaccagagtgaaactctgtctcaaaaaaaatggatacatcccttcttggcgctctccttccagcaagagcttgactcatcttactcagagtcctcttctttatgatagaataaagctggttgtttgaaacccatattgcctctaaaaacttcatctgccccccttgcacacacatacagttcttcgattatgttgattgccttaagcattgttgaattgctttaagcctatgtgaacactaaggagagtctatcttctgcagtgatacccttcgttgtcttgtcagtagcattcgttaagtacctacctatgtattgggtacaaaattgtactgtattaggaaagggaaatgtgagccttgggttcaagttgctgacattttagaccaaaataagcgaatcagccagctggtttctttggggcagagtttattgtggggagcagtaagtggggatgaagcgaagtgagcaggaagtgtgttagggtggggctggatggcgtgggatggggaaagttgcgggagaggcataaaagctcagtgaaggcgcttggttgtgaatggttagtggtgggacacaggaccctctgcagagcagcgcttcccacacatcagtgccagcagggtcacctgggaacttgatactcagtccccacctgacttggaaaatgtggtgcagcttccgtaaattcatatgtctgacaggcatgccaggtgactgctgcaggtgagccttgacttaccttcaaatgagcaacaaaaccaggatcctagtggctcaccgtggcactcagtcaagtgcaagtcccatccatgctccagccccatggggcctggctctggctgtccctctcgctttctgccacggccacccagccctcagtgttcttcaccaggatgagtgcattcctgtctcagagccttggactgactttcccctccacccaggtcagtttccaccacgtggccacacggcatagttctcctttccttccccgctgcgtggtgttaccttgtcaaaggtttgcctgactactgtgtgaaatacagccagcctcctgccagcttcagtttgcctcctgagttgtgtttttctttagagcggttattaccacctgataaatttgcctattcatttaattgttacgctgggaggctagctcctatggatgggatttctttcactgtagcatgcccggggccttagaacattaccaggccgacagtgtacacccaataaatatttgctgaatggaggaagaaggcactgccctaaacttgtgaagccttgaaggcaaagaccagcgaggtctgactgagccgaattcctaggccaaggttggtgtcggggcccacagtagccgaacaggctcacgaatgccgagtgagcaggagaggcttgtgggaagaagagggctgatgatcagttctctctgacctggtttgagaggtcccattttgtaggggttttgtgacgagaaaggcagggagtatatattccaagcaggtgttgagatgcccaaaccataatggctatccatgtgtgtctttattttagttatgttttcctttagattttagtgagaaattctattatttgataacttttaagagatataataatagtgttattaatacgttaataataccatgttaataattccacatttaatgattggtttggccaactaattaaaattttcttagtagcatttcattttattttcatctaactaaggtaaataaagctagaaaatagtaaaatttaaaaaaacttttttttttaaccatttcagaatctgagttgcaagaactctctgaagtgcttgaactcctttctgctcctgaactaaaatccctagccaagaccttccacttggtgaatcccaatggacagaaacagcagctggtggacgcctttctcaaattggccaaacagcgttcagtctgcacttggggcaagaataagcctggaattggtgcagtgattttaaaaaggttttgttggctattgttacagtaaaaacatttaaaatgttgatagcacatattaacttacagtagattgtatayttgattgaactgtaattgtttatttcagttgtagttagattgagaaggctggaaaagccttaattgcaatagcctggattctttcttgggttattattcaaaatttttgtcgtaataccgtactaatttccaggaccaagaaaaatcggaaggcaataggcctttggtaaattrtagtattttattttccgagaaaaatacagttttaagtgattcttatgggattttaaggtaaactatttagtcaaatttttattttagtttttgtttactaaacaaagtataatcaggcagtcttaatgtgcaagttttcctgagtttaaacgtaacaatttaccaaaaactgtgagtggcttcttttgtccttgagaagcccttgacctgtttcagttgaaaattacaaaaacttttagaattgatttcttttgcccatgttatttatataatcaaactatatcaactctagcctgggaattcactactgtggagtcgaggatgaaatgagaggatgcttttgaaaacactttaacatgatgttgttatttattttatatatttgttttgtatatttcagttgttatgagcccatccttgttggggaggtgctataaatactaatctttaatgaaacataggtgtaataaggcagacattaagaaaaatataaataccaacacttgaaaaaagctcgtrttatagatttttaaaaagtacttcaataaattacatacttgtaattaattgacttgagaagtatagaatcctcatctgtgtggtatgttaaatgtcttctaagtcctttctttatctaattgtatttcttaagtatttgatgttaaccttatatgtaacattttataagcaagtaaacattaaatttagccaccctctggctgggcacagtggctcacacctgtaatcccagcactttgggaggctgaggcaggtggatcacaagatcaggagttcgagaccagcctggccaatatggtaaaaccctgtctctactaaaaatacaaaaattagcctggtgtggtggcaggtgcctgtaatcccagctacttgggaggctgagtcaggagaattgcctgaacctgggaggtagaggttgcagtgagctgagatcgcgccactgcacaccagcctgggtgacagagtgagactccatctcaaaaaaaaaaaaaaatagcagccctttsttggtatatgcacttagcatagaacagataaagtaaataagatgaacatattttatctctaactttggacttgtaggaaaatagaatcctcaaggctgttttagttctagtgaaaaccactgtcctttaagsttgtcctttatttcttcattctgatggtaaagcccagcagtggaatttcagagtccctgccagccccacgctagggcagcgcctggtgcttttactctgctgttatgataaagaaacagaaacagccacattattacagaaaaaggcacattatttatgctttcttaatccttgcaggagtcactgcttagttttctgtgtttaatgcttccttttgcagactggaggctgtgtccactggggcatccccgggactctgcgtggaggtggatgaaatgggtactttggggcagtctgtagatgagtggctctcagttcagtggtggtgtgataggaatcccaccccttccccttcaactccatgatggtggcactcatctctcccacaccctctgggatgcagtgctgcttttggtttaatagcttctgcaccagaagggtgtgacatctttcactagccaagtggttctcaactgggggcatctggcatcatctggagacatttttggttgtcagtactggaggtggtgaagctaatggcatctagtgactagaggccagggacagggcactgctgagcatcctataatttacaggacagcccctgacaacaamgaattacctagcctaaatgtcaatagtgctgaagctgaaaaaccctgctattgatggtgtctaagctgctagagtcagagggcccacatggtcctggatttaatttagacctccaagcccaccttgcagacatccagagttgaactgaattcactccaatgttatcctagaatagagatgctgctggaccattctgtacactagagaaggggtctgcaacccccaggccatagaccgataactgtccattgcctgttaggaactgggccacacagcagaaggtgagcagtgtgccagagagcatgaccgcctgagctttgcctcctgtcagatcagcagtggcattagattctcatagragtgtgaaccctattgtgaactgcgcatgcgagggatctaggttgcgtattccttatgagaatctattgcctgatgatatgaagtggaacagtttcatcccgaaacacctccctcaaccccagtccatggaaaaattctcttccatgaaaccactccttggtgccaaaagcgttgactgctgcgctagagaacagcaccaaactttggcatatacatttgcaccacgtcttggtacacaaaatctgatgttttacctggagcctttgataatgacattttaaagaaataccattatttaatctaaatcatcactagaataaaaaattgagaattgcttcatgttgactaggcaatacttttctgaaagttttcctggtatttgaagcactcatgaccagggtaaaccccaacctactgtgcagccgaggaaggaagcacttgtatggagccaaaccatgtgtggaaccatttggagatgtacattcatttactcctgtgtatccctgggtgagctctcagccccagagcagttaagtaatgctccagtgtttaaaatagtgaatgtcatttctctttattttagatgaaaataatttgtaaaatctgacatccaaatgcttaaaaagctaaaagttatttctacattgtacatttttcagagccaaagccttggctggacagtcagtacgaatctgtaaaggccccagggctgtgttttcccgcatcttgctactgttttcgttgaccgactcaatggaagatgaagacgccgcttgtggaggtcagggacagctttcaacagtcctgttggtcaacctcggccgaatggagtttcctagttacaccatcaatcggaaaacccacatcttccaagacagagatgatcttatcaggtaagatgatgttagctcactataatgtctatatgtgtatttcacaatttagtaaaaggttttgttatttttttccagccaaagtagaaacattaagtccacagccaaaacagtttttaatctttttttgccccacttgtatacatttctatgactatagggaaaatgtagaagtgtgctgagattatggttgccaaaatccaaggaattttgagttagaactacaaaaactttctctggtttatgtttccaagtacctttggaagggagtattttttgtttgtttgtttgtcttaatttgagacaggatttcgcccaggctggagtgcggtggcatgatcaccgctcactgtagcctcaacctcctgggcccaagtgatcctcccacctcagcctcccaagtagctgggaccacaggcacatgccaccacactcagctaatttttgtatttttttggtagagatggggtttcaccatgttgcccaggctggtctcaactcccggactcaagcaatccgcccaccttggcctcccaaagtgctgggattataggcgtgaaccaccgccctcggcctgtattttttttgacacagacatattaacaaacttgacttaggaatatgttgttggcatgaacaagactgaatgtgaatattttcttattagtaacactttaggtaaagctattaataacttgtatattgtatatcatacatatgataattagatatacagatgataaattagaaattttcactaatttatattggcacacggatttagtgaaaatttggtttgtccaataaaagtagattttgaactaaaagtagaactaccatgtgatccagcaatcccactactgggtaatatccaaaggaaaagaaataggtatattgaagagatatttgtactcccatgtctattgcagtctattcacaatagccaagatagggagtcaacctaagtgtccatcagtggatgaatggataaagaaaatgtggtacatatacacaatggagtactgttcagccataaaaaagaatgaaattctccatggtggcaacatggctgagctcagaggacattatgttatgtgaaataagccaggcacagaaagacaaatactgcatgttctcactcatatgtgggaggtaaaaaagtggatctcacagaagtagagagtagaatagtggttaccagaggctgggaggggaagggggatagggaaaggttggttaacagatacaaaagtgcagctaggtagaaggaataagttctgttgttctgtagcagtgtaggatgactataattaacaacagtttattatatatttttaaatagaagaatggatttagaatattccccacacaaagaaatgataaatgtttgaggtgatgcctggtatggcaacacatgyctatatttctaactactcgggaggctggggcaggagggtcacttgagtccagaaattcgggactagcctgggcaacataatgagaccccatctctaaaacattttcaaaaaagtttgaggtgctggatatgctaattaccctaatttgatcattatacattgtatacatgcattgaaatatcacactgtgccacataaatatgtgcaattttatgttaattaaaaataataatagatgccaaacaaataatgggattacagtattaaaaagcaggttttgataagaaagaatagtgtaggtcttaggaaaaaaaatttggatttccttaaaaaaaacacctttggtaagaaaaattaatttggatttcctaaaatgtcacttttgattcttgatttggatttctgactcaaatttaaccaaaattgattgtgatatttgcttttaggaaagtcctgtgtttctaggaaagccaggtgctttaagaagtaagttattgaaatttttgaatcacagcagtgtcagtataatctgattttggcccattttaccttagctgtcaggaagctcagtatcttatttgtgttcaatgggaataacttttttagttaaaatctctaataagactgtttattcttaccctgttttcagttgtctcatatcttttttaccttttttgtttttactggctttacgcttttctggcttgtgagaatgtatactctgaagccaagttccagtttctataccaatgaactgtgaacccaccctgtgcctcagtttcctcatctgtcaaatggggagaataatagtatattcttacagacatgtgtggggtgcatgggaagtgcttaaagcctgggctatggggaatgcctactacatgttcattattattttaattgtcattcttactgttatacccaagttctatgacaaaaccatggttgacaagttcaaaaggcatctcatattctttctagaaagtaagtgtgctgtaaataataaaaataatgaraactcccttggttaagcagagrgccttaagatgtaaatgaaactggatttaattgacttctggaaaggtaatagtattcaatatctggtaatgtgatacctggccaggaaacccttgttgtctacctctgtacttgagataatttatccttttaaaatgtttcttattcattcagtacaaatgagtgttgagtaccttttatgtgacttggttaggggttgtagcagtgaacaagagagggcctcagccatcatggggctatgtttcctggggagatagaaattaaccactatttaaagtgtgtgagaagtgctgtgataattgagggacaggctggataagttctttatagacagagtggccctggagaggtgacatttgaagtgggacttgaggatgagaatgaggtagctgtgtcagggtctgggtgcctgcgtcccggccgcgagatagcatgtgcacaggccctgaggcaggaaagagcttgctgagttggaggaactcaggagacccctggctaagatgtgggggtggacaggactgggttgttggtagcggcagtggagagaagtgaatgtgtatgaggcagtttggaagcagtaaagacaagacttgattctgatgtgggcgagaaggtgaggagtggatcaaggatggctctggtgttttgccttggggtggggcgccatccagtgaaggggattgggagaggtgttggtgctggaggcgtcagtgtgtggggtgctcttcagccgtttggttgaagctgttgtgtgtggcattggacttgyggtcaggagctcagggaatgggtctggcctggaaaaagtcaacattttgagagtcactggcatatggacaatgtttgaagccatggaactgaatgagcagcatattataaaagaatgagatctaagaatttgtgagcaaacttttacatttggaggcaatttctttactcttactttacagtgtttgtacataatgatattatgtacttcatgcttttcttttagatgtgagaccaaaatacaatgaacatgtactcaaagtgttaacagaatttgttggtcaaatgtctttgttttttggtagctaaaggagcgatgaaaaattgtctttcttaagctaagttgtgttgtaacatttcagcgttgccatctcccaaagagcatcccttagttattttgaaatattccaggtaatcttcttagcttgggcagcatccctctggctagctctgattgtaaatgattaaattatcagatctacatctgactataattctgatgtcacttacatgtttgctgtcatattgttgaatgagtgaatggatgaatgaatggatgagtgccaaaatcaggaatgatgagctgatccatatcacatttatagaatggaacatgttatgtgataatacagcataaatgtttttatctttctagttgggctttcttatcagttctgggccactccagtgatttggttaagataaattattattagaataaaatttaagtggccctcatattttaaaaaacacacttttacctttcagagtgagatctagtggctaggatgtggtcattctatgggaatgctcattcttatttggaacttggatggcattttcctccagatatgcagcagccacgcacatgctgagtgacatttcttccgcaatggccaatgggaactgggaagaagctaaggagctcgctcagtgtgcaaaaagggattggaacagactgaaaaaccacccttctctgaggtgagagtttttctaggtacctgccaaaatttatacattgaccaagttgttcccaacacttacagtaattttcttcatgaagaatatactcctttttctctgtggttaaaccagctgtggaattgaattttgtgcgtgctttgcctagaatgraagtgctgtgtgaaatagaaggaaatgtctgaaggtttaaagtgaatttgatataactcagatccctgggcaacacacatgccaaccccatacttgacttgtcgcatgccaactgtaggagtgttggcctccctgagtactggtgagctgaactgaaacgtgagggaagccagcagcaggacggatgtgggaagcatggtaggtgggttcytctgagggaaattcaagtaggtgttaaaaactctgcaaaagacagctcaagcgaactttccaggtacacagcacatgatcttttattttgttgaaaatggtaaacatcttcaatatttrttaagacattttttcctttgttgttacatagtgatgagaaaaattagtattttcagatgccactttgaaaaaatcatttaggatatacagttgacccttgaatgatgcaggggttggggtaccgacccctcagacagtcaagaatctgtgtgtaacatctgacttccccactacttaattaatagcttactgttgactggaagccctaccgattacatagtcaattaacacacattggatatgttatatgcattatatgctgtattcttacaataaagtaagctagggaaaagaatatgttattaaggaaaatcataagggggctggtacggtggctcacgcctgtaatcccggcactttgggaggccgaggctggcagatcacctgaggtcgggagtctgagaccagcctgaccaacatggagaaacctcgtctctactaaaaatacaaaattagccaggcctggtggtgcctgcctgtaatcccagctactcgggaggctgaggcaggagaatcacttgaacccaggaggtggaggttgtggtgagctgagatcacgccattgcactccagcctgggccacgagcaaaactccgtctcaaaaaaaaaaaaaaaaaaaaaatcataaggggctgggcgtggtggctcatgcctgtaatcccagcactttgggaggcagaggtgagtggatcacttgaggtcaggagttcgagactagcctggccaacatggtgaaacctcgtctctactaaaaatacaaaaattaggtgggtgttgtgacgagtgtctgtaatcccagcctcggaaggctgaggcaggagaatcacatgaacctgggagacagaggttgtaatgagctgagatcgcaccactgtactccagcctgggtgacagagcgagactcygtctcggggaaaaaaaaaaaaaaaaagaaaatcataaggaagagaaaacatatttactgttcgttaagtggaagtggatcatcatgaaggtcttcatccttgttgtctttacagcaaataggctgaggacgaggagagagaggagggcttggtcttgctgtctcaggggtggcagaagcagaagaaaatccacatataagtggacgtgtgcagtttaaacccatgttgtccaggggtcagctgtatatttatagagaaataatattgacttaaaaatcacaagaagttagattactataaacagaggttgataaacttctgtaaaaggtcacatagtgaatattttaggctttgcaggccatatggtttctgtggcaccaactttactctgctgttttagtgcaaaagcagccacaagaagtacgtatgcaaatgaatgagcctggctgtgttccagttaacttcatttgtggacattgaaatttcagtttcatacaattttcgcataccaaagtgtattattctctttatttattaacaatttaaaaacataaaaaccattcttagtttgcaggrcatagaaaatcaggtggcagaccctgggtttggctgtgggccggagtttgctgaccttggtttagaatgatgagttctcatcttactccactgtctgagtgacctaggacgtggtagctggctgtgagaatgtaggtttgtggtgtagaaaattgtacacaactgaaagtatttagaatatacctttttaaaagataggaattcagtctgctttgtcacttsttattattgtcttataataaattaaccaaattattaaactactggtatatgtcttcattttagatgccacgaagatttaccactcttcctgcggtgtttcactgttgggtggatttatacaaggattttgtctcggtttgtggaaatactgcagagacttcacatgtatgaggttagagcacaggtccctgccccccaccattactgatgtgatggcgttaaacatgtgaagggacagctgtcgggctctcagcatttcctgcttatttggttagcacacagtaatataatggaggcatatttgttttgttttgtctttttgagacagggtctcactccatcacctaggctggggtgcagtggcagggttcagcttactgcagcctctgcctcccgggctcaagtcatcctctcacctcagcctcctgagtagctgggactacaggcgtgcgccaccatgcctagctaatttttgtatttttagtagaggtgagatttcaccatgttgctcaggctgatctcgaactcctgggctcaagtgatttgcccaccttggcctctgatgctttgacagtgggggcctaaagtgttgggattacaggtgtgagccactgtgcctggccaacgagggcatagttaatgtaggcagcccgctgtctcttggattagtagagagaagataggtgaagatggacagctgttctgtttgcctgtgtgttgatgaatctgtgtcccaggatggcctgggggtggcggccaccatcctggagggtgccccacaggtctgcagcctgagcctgagtctctttcagaactccttgtgagacttggcaggtccccagaaatctctgagggaccttttgcttccttttgcttccctgtcagctgtcatggattgtctggagacaatttataatcacaaatcagaaatttgtcgtatcctaaactttgtgaaattgctagatttcacttttgttgtgtttgatatttctatattgaaaatgttatctccagaccaggcatggtcaaaaatatatatatacaaaacaagaagaaaagaaaatgggatcttacaaagaggatgtgctaagctggtttcttggcctggggtctgtgaatcccaggggagtgatgggtgggctttggggaaatctgtgaatctcaaacttgcatgtgtatggggatttatgcatttttctggggtaaatcattccatattacaaagacatccatgagccacagaagattaacaaacagaatgaccgaacagtctgtacataatctagaccagagaatgttcctgttgaggtagggtgtttgtatgaggacacccctcattactttcctgcccaccccaaatccctcttgcagttggtcctgtgacctgctgtgttcccagaagtatgtgggtttgccaactgtgaccagtgctcagctgcctggaacttgaccctgtgcgactctgcactggttgactggtttgcagataacactctgcagcactcacagatgtctgtaccccagtgccagctggcagggaccrggtgaagagtgaggatgccttagggaactcatgcccactccagaaggcacctcaaagtccctgtcctgtcagttcggggtccttggcctcattgtagaatggaaagatacgcattataaataggctttaccaatcctatgggcttgtaaatatcattgcagctggattttttgtgaatctaatgaggtttctttgttattgttgcaataggaagccgtcagagaacttgaaagccttttgtctcagagaatttattgtcctgacagcagaggccgatggtgggatcgactggcccttaatttacaccagcacttgaagcgcctggaaccggtactcagtaacaaaacatatctgaaacaccttttcattttagaatcaacttttaaaatatggcaaacttaatgccttaaaatttacatgtrattagaacatgtatttcttttgttaacattcttcttttgtctgtgttcttccaaccccaaaagaataccagggatgccagcacagcatgagcatagagactggaagcttttgtcttctctttgctgattggcgagatgggcttactgtggactctgtgctggcatttaggaatcaggatctaggaattaagggaaagggagagtcagatgactcagcygtcagcaagtcagcaagtgccttcaaggaaggtgtttgttttggaaatggtgactttgttgatttgtagcacagggtctctaggtagaaagattggcgagaaagcgttcctttccctatcttaytgcaggtcctttatgcgtgactctgtacttctgtgaggtgttttgctctgccatttggaagcgttgtttgaccttgagcaggcaccagtgctccctgtggtggcgatctaggggcacttggaagcacagggattctgtggccaccacagccaggcgggtgaggccgcagagcctgtgcctgtgggctaggcagcaacagtggttctttgtgtggccgccagcaggcccctccctgtctctattccagccctgcatttgagttgaatggaggggactgtgcctctgggagcttttgattttttcagtggcccattaagtgaatcagggtgatgtaggggtggaaaaaaacgaccactggttaggaaatatgacatcttgtttttattgccgtaaactgaaaaagtgccttgttacctcacgtatcagggaaagagccagtaaagctatttcctctcatggaggagggtgtggggcttccttaccactcggtgtttactgaggctgaaatagcaagagaaagcatctggtagcctagaaccaaatacagaaggagaaagcttgtgtttctgtcgcctttctttcaatgaaataaaagttcaagagagtacagatttcccctctgttcacagttctgctagggggtagacaagccactgagcttatttttgagatttgagctaagcctagttcctcctaacctctgtttccagaggtcttactggccatagctcttgttatttcattagtgttctttgatctttacctcagtctccagggaagggatcgcctagctgagtgctaattcctgcaaagtgctctgcagccagccccggcctggccagggcagaggtggagccagctgggccctccctctccgaggccaggctgccgctgcccggcaccgtcttctgccagcgaacagggtgcccttcagagtctcattytcccatcttcatttccttcagccactcaactctggatggcstgagccttcactgattttcaatttcttggtttttattttttctttcactttttatgtttctattgtggtaaaataaatttaacatccctaaaatacagcattttagccatttttaggtgtacagttcagtggcattcatggtactcatagtgttgtgtgaccattgcctctccacttaccactccaaacagaaacactgcagccattaggcaactacgccccgctttcccttccccaagccctggcgaygacgtctcatctactttttgtgtctgtaaatgtgcctgttcatttcattcatttcattgaagtggaatcctacgatatttgtggttttatgtctggtgtattttgctcagcatcatgtttctgagcttcacccgcatcgtggcacatgtcaggactccgttccttctccaggctgaacacacttccactgtagcatctgataccacatttttctagccactcattggttgatggacactgggttccttccaccttttcggccattttgaagaatgctgcatgaacctctgtttcagtccctggtttcaattcttttgggaatacctgagagtggaactgctgggtcctgtggtgattctgtgttgagctttttgaggagtggctgaactgtttttcacagtgtttacaccagtgtcacattcccaccagcaatgcrtgaggtttctggtttctctacctccttgtcaatgcttattttccatgtttctgattatagccatcctagtgtgaagtggtatctccttgtggctttctgtgtttgtttatttgtctgactctgaatcgccttgggaaatacttgtaattcctccaaacctttggctcctgtccctgtaaataaggaatctgaagcagctccatggttcttgactgcatatgagattgacctggcgctttgatgtggcccccatgcgtgggctcctgctctggaggttctcattgtgtggatccggggtgggacacatgttttcctacaaagctgcctaggtgatgtcctgagaaccactgagctaagttttcctgtaaagtcaggtacccctgaggttcacaccctttgtgaggggcagctgctgggatccactgtccacctggattacagcccggtcaygctccagcacgttgactgtgaaggctctggttgccagatgcattgaaatcctcagaataagatctaaggaaacagcctaaatctctagaagtgctgtttgctcatttgctaatcagcaaaattcaataataaacagtgggcttttctgtcaaactaaatgcatggaagccgccatgggtttttttaggagcctgatgtgtgaccatgctctctgccagactatcaagtgcatcacagaggggctggcggatccggaagtcagaacgggacaccgcctttcactgtatcagcgagccgtgcgcctgcgagagtctccgagctgtaaaaagttcaagcacctcttccagcagctcccagaaatggctgtgcaagatgtgaaacacgtgaggaaagagcctgtgggtgctttggacttaggcgcgtgtacctggtttttttggaccagaagcatcctaagagctgttttgagtgtgtgttttcttttagactcggaataatctaaaactcgttttggacggctgtgtggccattgctcccagtctccccctaacgccctcctccctgaggagactgggttgcttggtgtggtcacaccctgggttgagtgacagatctcctgaatggggcctctcagcatctgccccggtttcatttactcactggggacctgtagagcagttctggtggttgaggctctcccagggccggaccagcgaactgtcacatccccgcagttctgcgtgtgtgagccccacgctgtgtgctctactaagtgactgactttgtggtaagggaggtcaatcctcacgatgctacaggcaggttttcagggacttttgctgacctgaggctaatagatgttattctgctgctgtttcaggtgaccatcacaggcaggctgtgcccacagcgtgggatgtgcaagtctgtgtttgtgatggaggccggggaggccgctgaccccaccacggtcctgtgctctgtggaggagctggcactggcccattacagacgcagcggttttgaccagggtaactgagcaggctttctctygtggcacccagccccgggtggacgagcagcagcactggatgggctgtcagcagtgggctgctgtcctctctctgtcctctgctcacagtggaagatgctgtgggctgggggatgtcttcctattcttccccttatcaatgataaggagtaggtcaggggtagttgtcccacagggcctggctctgatcttttttcttttataaaaacttataaaagttatggaaggtactgcacaagcctttgtacagaagtcagggggacagtgtgctcaaccccacggacacccacttccattcagtgttccttctgttctctcctgccccttccctgggattttagaagctggccccagatatcctctcaggggccctgcggcccatgctagtcgctttcgggaacagccactgagccttccgcccttgggcctggcaggactctccctgtgcccgggctgcagggttaccagtgttaaaaacactgatattttcagatgtgtgaaaatcaggacatgatttcagtattccccgagtgttcggaagattaacaagtactatagaaagacaaccacaagataggagtttacaaagcccaggttctttctgatgagtgttgagattcatctacataatatctttattacttacagggaagggtgatgttattggggaagacgtgcaaatgccagtgaagacagagagatacagtaggcctgaaatggttagaaatagaagaatagaatgcacattcaaggccccgagagacgtggaaactggacactcgctggaggaggaagcaggctgggacgtgggagcgctgaaatgctttcagttgagccatgagcctgaaaaacacacgattcctttcccagagtagaaactatttttccctgattaaaatcgatgccgtgaaactgggctgaactctggctgccaggctttatgccacagggaattttgtgtcagagcgatctcaacctcttctgggaggtgatttctgaagtactgcaccaaaaatgatttcacttataacacaaatgcacagcatggaccacttaggagttaaggaacgaaccaggcacggtagcttacacttgtaatcccagcacttggggaggctgagacaggaggatcacttgaactctgaagacggaggtgggaggatctcttgaccccaggaggtcaaggctgcagtgagccaagattgtgccactgcactccagtctgggtgacagagtgagaccctgtctcaaaacaaaacaaacaaaggagttcagaaatgatctggcctttatattcctgcctgatcgtcagtgtattcaccaggacggaacactgactggaaatcaggtcctagctccactcctggctgggaaagagcatgaagtgttctaggaagaaaagtcctcctggaagacttggcaacagccaggagtcctgagtgaaccgctgtccttttgaatccctgagacgggctgcagggatgaggggctagaactgacaggaagacaggacagagagcagcacagcctcagaagtgcaggacagaggtgacccaggcaggcatgacgggctgtggctkcctgccctctgctctcacagcrcccctgatcccactcactgtggtmccacgcagatgggttggggcctgtaaatgtcaggtgggaccagccagaggagctttgctgccagtactggcatgtcaggatgggggtctggtggtcagcacctcctctggccagtggtcttgtggggagaggcatccatgtggcctcctcctctgtcgggagggctgatgtgcagagaagtacggacttggagggcagctggatgagctggggcttgctcagggacacaggtctgtgtgttgtgccaaggctgaccccctcatcccacaccagaccctgcctctgactctgtgacctcagcacctgacttctgtctctcaggtcatctcccagtcagtaaaacatttgtgtgacgtgaggaggggcactgaagtgggtgatctttaaggccagatgtctctgtaaaagccttgactatcggaagcactgggctagggcagtgtagtacccagggggatgaggtgcatcagagcagcacctgctgaggccaagaacggaggtggctgctgccggcctccgggaggtccccttagggaagcatttcttcaggggtggcccagggacctccggcatcagggcctgcatggggattctgtgccagcccagccctgctaagtcccagccttgggaacctgaggagggtatctgcctatttttcttttaaacatgtttcttaggttattcactaaagtttgagaaccactgctttgtggctttgaaatgttcatttgaatttttctatgattactaagatttttgcccttaaggctctgtatataaacaacatactgtataaaataaactgggaatggcgtgaaaacagcatttgcttctgaatctaaaatatttctattattttcttgaaattgagtgtgcagtaggttatggtggtgttttggaagaaacagataaaacagattttgtgtgtgtgtgtgtgtgtgtgtgtgtgtgtgtgtgtgtgtgtgtgaccttgtcttagggattcatggcgaagggtccaccttcagcaccctgtatggcctcctcctgtgggacatcatcttcatggatgggattccggatgtcttcagaaacgcctgtcaggtactccagtgcccctgccccacgagtaggtccttctgcacacatccgtggctcacgcccacctgggcaccgtgtgtccacagccagcagaaaccatctctgttacggtcctttgggtcatccacaggtcaagatgataacttattttaaaaatctgagtaatagaatttaagatgtaagtatgtgaagttttaaactttaatttagcctccaccttacatttagacctttcgtataaagtaccatcagcatcagccctcccgagcacctgccgtgtcgcaggcactgtgccaaggagctcacagacatgggcacatctgcctgttcagaggtccacccagctaagcgaaaagctgtttttgcaaattattactctaaaaaacaagtttaataaattgcttttatatcaattaacttttacttatcttttgagagaaagaatgtatcggttggccggtttccaagttttgtatgtactgactagtcctctggtgaacayggctctctgcaggcacagtatgacagcttgctttccctgtgacacaggcattccccctggacttgtgcacagacagcttcttcacaagcagacgcccagcccttgaggccaggctgcagctgattcatgatgcccccgaggagagcctgcgggcctgggtggcagccacgtggcatgagcaggaaggcagagtggcttcccttgtcagctgggatcgcttcacgtctcttcagcaagctcaggtaatggttcacctgcatggcaggatttgctcagaaagttaacaccgccccagtgctgtcttttcagcaactttatcaaaatacacatgtgtgtatatgtaaatacatgtatgtgtgtgcatatatatgatatatagtatatataatatataaaatatatattatatctttattatatttattatattatatattatatattacatattacatatataatatatattatatattatacaatatacaatatataatataatatatgaaatatataatatatcatataatatatataaaatatatattatatcatatataatatatataaaatatataatatattatatcatatataatataatatataaaatatatatcatatataatatatataaaatatataatatatatcatatataatatataaaatatatatatcatataatatataaaatatataatataatatatatcatataatatataaaatatataatatataagatatcatatataatataatgtataaaatatataataatatatatattaatattatataaattatatatatgagaataccctatccccctggccccaatgccactgttagtgatggaaacatactagggtgttagaaaagccccagctgtgcctttgccacccctgagttgacagctttcttttgcttgccctgtggctgaggcagggaggataccttctgtgttccttcaactgctgccctctatgaggccatgctgtcgcgttcctgagtgcatcctccacatccctcttcctcagcgctccccagcatggccacgctggcagaagcctggaaactgaccacaggaggaccagtctcccaccacttgccagtgggattccagccatggctctscagctctggtacaagcagcagaacagcgcatggtgggcctggggtccatgtgcactgaattacatatacactgagcttttctccgtctcrtgatccctggagcctatttccattctctgtcacgagggaagtggctaactgtcctgtgttttgtgttcaggatcttgtctcctgcctggggggccctgtgctcagtggtgtgtgcaggcacctggctgctgactttcgacactgtcgagggggcctccccgacctggtggtgtggaactcccagagccgtcactttaaggtcagttgaggcagaatggaaagtcctgttggtaaccttattagcaactgaatcagaggccacaagtaggcatttcttgagtggctgttggcaagattgaattccttgagagcttttgggccgagggcctgggttcctgtgggcctgtcccstgcgactggcttcatcagagcaggcgggtgagaggagccccagagtgtgagcaagacagagctccatctcttatgacttgatgtggacatgatgttccatcactcctgctgtattctgtggttaggaacgagtctctagtccagctgacactcaaagggagggggtcacaacgggtgtggacaccaggagctattttagaagcttaccgataattgtacattttaaaatgacttaaagagtataatggtttgtaactcaaaggataaatgcttgaggggacagataccccattccccttgatgtgcttagttcacattgcatgcctgtatcaaaacatctcatgtaccccataaatatatacatctactatgtacccacaaaaaattttttaaaaagctcagagagtgaacacttccttgaacgctgtccactagcccagccctgctgcccatcactggtgatttgttttctcattattgagttttgagattaaaaaattatatatcctggatacaagtcctttatcagtgacatttcatcccagtctatggcttgtcttttcattttcttaatagtgtcttttgaagagcagaggtttcaaagtttgacaaaatccaacttatttgttctctagtggatcatgcttttggtgtcacatgtcagaaatacttgcctaatccaaggtcacaaagagtttctcctttgttttcttctagaagtgttatagttttaggttttacattcagttttatgatcatttgagacgccatttgtatacagtgtggggcatgcactggaattcatttgtggtgtgtggatatccacttgttccagctccatgtgtcaagaagaccatgcttcctccactgaattccctctgtatctttgtcaaaaatcagtaacccatatatatgtgggtctgtttctrtatactcttcggttccattgatctgtttgtctgtatttcttgattattgtagctttagatacatcttggagtcaggtagtgtaagtcctataatgacttgtttttcaaagttgttytggctcttttgcatttttatttgaattataacatcaaattttaagtttccaagaaaaaaaaaagccagctgaggccgggtacrgtggctcacacctgtaatcccagcactttgggagacagaggtgggcggatcacgaggtcaggagattgagaccatmctggctaacatggtgaaaccccgtctctactaaaaatacaaaaaattagccgggtgtggtggcgggcgcctgtagtcccagctacttgggaggctgaggcaggagaatcgcttgaactcaggaggtggagcttgcagtgagccgagattgcgccactgcactccagcctgggcaacagagcgagactccatctcaaaaaaaaaaaaaaaaaaaaagccagctgagattttaattggaattcctttgaatctgtagaccaatctgagaggaattggtatcttaacagcattattttgatcagcaaaaatgggagttgattttgtaaaatattaagaatttttgcatatatgttcatgaaggatattgagctgtacttttcttttcttattatctctttgttgggttttggtttcagagtcataccagcatcagagtgggatggaatagttggtgtagaattagtattattccctaaacatttgatagaattccccagtgaagcagtatgggcctggagattttggggggaggaaaatttaaagctataaattaaatttatttttaaacaacataaggctgttcatattatctgtttcttcttgattgcgctttgctagtttgtgtctttcaaggaatttgtccatttcatttaagtattgtcttaaagttgtttatatttgwttcttttctttttttttttttttttgagatggagtctcgctctgtcgcccagactggagtgtagtagcgtgagttagctcactgcaacttccgcctcctgggttcaagtgattctcgtgcctcagcctccctagtagctgggattacagctgtgcaccaccatgcctggataatttttttttttttttgtatttttagtagagatgaggttttgccatgttggccaggctggtcttgaactcctggcttcagatctgcccaccttggcctcccaaagtgctgggattacaggtgtgagccaccgyacacggccatgtatttcttactgtattttaatatctgtagaatctttatctctgtcatgctcttattcttgatattggtaatttgtgtcttttctcttttttccctaatgagtctggcaggaggtttatcaatttactgattttctcgaagaatcagcttttggtttcatttgtttttttatttcctagtttctcaaggtggaagctatggtgattgctttgagaacttcttttctaatagagttaggtagtgctccaaatttccttctcagtgctgctttatctgaacctcacaaatttagtagttgttttcattttcattcagttcacaatactttctgatttcccttttgactcttctttgatccttggcttatttagaagtgagtcatttacatttccaaacacttgagagattttcaggtatctttctgctattgatttgtaatttaactccattgtattcagaggacatattttgtatgatttgaatcccactaaatttgttgagacttgttttatggtccagaatatggtattccctggtgaatattctgtttgtacttgaaaagaatgtgtgtttagcatttgttgtgggcagtatttttaaatgtcaattaggtcaagttggttgatagtgttgtttaagttgtctgtgtccttactgatttcttatttacttgttctataaattattgagagaatattgatatctctgattataattgtggtatttcttttctttttttttttgtttttgttttttgagacagactctcactatcacctaggctggagtgtagtggcagtgcgatcctggatcgctgcagccttgatctcccaggctcaagcaattcttctgcctcagcctgttgagtagcccgaactataggcatgcaccatcatgcccagctgattttttttattttttgtagagatggggttccaccatgttgcccaggctggtctcaaactcctgggctccacgttggcctcccaaaatgctgagagtataccgtgcccagccaatttgtgtatttcttcttgcgtttctatcactatttgcttcatgtattttgaaggtctgttataagacgcatagacttttaggactgtcatgtcctcttcatgagtctacccttttatcattatgcagtgaccccccctttacacctggtaatctttgctctgaaatcaactttgtccgatattgtcaacatgtagccacttcagccttcttttttttaatgttaacatgatacatttttccattcttttacttttgacctgttttatcttatttttaatgtggatttcctgtaggcatcatatagttgggtcttacttttgaatccaacttaacctctgtcttttaatggggtgtttggaacatttacatttaatttgattattgatatccttagctttaaatcctgatacttattttctctttgtctcagaactcttttgtcccttgtctttttcctgagtagctggaaccacaggtgcacgccaccatgcctggctaatttttgtggtttttgtattttttagagatggggttccaccatgttgcccaggctgatctcaaatccccaggctcaagcagttcacctgccgtggtctcttagtgttgggattgcaggcatgagccacagtgcctggccctgtcttatttttaaagattgcatttgatagctttgctggcttgttagctgtaactgttcattgtgttgaagtggttgcgttagtatattatatatcttaaacttatccaccttcaggtgatacacactttagagtaaaaagaacctttcaataatatatatcttcccttccagcctttgtggtgttttcatatattttacttctacgtgttatatgttctataacatattatttttgctttctacagttgattaatgagtctgtatttactcatgtacatagcatttccagtgcttgctattcttttgtgtagatccaggtttctgtgtagtctcattctcctgcttgaagaatttcctttcacgcctgtaattccagcactttgggaggctgaggtgggcggattgcttgggctcaggagttggagaccagcttgggcaaacacagtgagacctcatctctacaaaacgataaacaaattagctgggtgtggtggtgtgcacttgtagtcccagctgcttgggaggctgaggtgagagaactgcttgaggctgggaggtcaaggctgcagtgtgctgagatcataccactgtataccagcctgggcaacagagtgagaccttgtctcaaaaaaaaagaaaaaaagaaaaagaaaaaatttccatgtctagaagttctgctagtaatgaattacagtagttagccctctgtatccatggtttctgcttctgtagatgcaaccatggactgaaagtatttggaaaaaagaaaaacaataaaaagtaactacaacaataaacaaatcaaataaaaatacagcataacaactattttcatagcatttatattaggtattataagtagagatgatttaaagtatatgagaagatgtgctagaatatgcagatgcgatgccattttatatcagggacttgagcatccatggattttggtaacagagggggtccttgaatcagtcccccatggatactgagggatggctgtatttaggttttgtatgtcttagcctttatttcacctttgtttttgaaagatattttctccgtgcaatgaattttatgttgacagttatttttcaatactttaaaaatattagtctactgtcttctaactagcatggtttccaatcagagaatctttttttttcctctggctttaaaaattctggctgctttgactatatcccctgattatacagttgtgatatttcctagggtgccgttacatttgtgtgcctgggattcattgattttcttcaatctttgggtttactgttttcatcaaatttggaaaatttttggccattttttctttaagtatttttttttctcgttcctttggggactctaattaaatgtcccttaggctgctaaatgctgtatttaaacaatttttttctatattttacctatagtttttattgctgtgtcttcaagtctagtgatgtgtagtgaacaaaacacacaattcttgccttcatgaagatgacatgtagtatatatttttatcttatgaatgccatgaaagaagtgcatagggaggatatacttagagctgtgacctctccagatcagtttaagctgagcattgaaaggtaagaagtcaggcatgtcaagaacagggagaaatgtcccaggcagcgggaacagcaagtagcaagtggaagtgagggccttggggtagggaagagactggtcatggcaagaaggttagatttaattgaaaatgtaacagagtaatcggagggttttaagcaaggaagtaaaatccagtgcatgctttaaaacaatttttcatttgctatactaagaatcagtttactcatcctctgtgaagaactgtctagtttctacagaatagaagaatttctgaataaatttcttagctacatacagacgcttctcaacttatgatggccttatgtcctgataaatcctacacatcaactgaaaatattgtaagttgaaaatgcatttaacatatttatcccaccaaacctcatagcttagcttagcctaccttaaatgtgctcagaatgtgtgcattagcctacagttgggcagatcatgtagttcactgcaaaccgtagagtactggttatcctcatgatcatgtggctgactgggagctgtggctcactgctgctgcccagcatggagtatcatactgggaaaagatcaacactcagagtatggtttctgttgaatgtatatcacttttgcaccatttttaagtcaaaaaatcctaaggtgaaccattgtaagtgaaggaccatccgtatatttgtgttacacttacaaatacagtgagagagcagaagagccatttaaatagttgtcagtgacaactacaacttacttgaatggcttttcattcagtaagatactaataacaacttttaaaaatttcttttccagctggtggaagttaaaggccccaatgatcgtctttcacataagcagatgatctggctggctgaactgcagaagctgggggctgaagtagaagtctgccaygtggttgcagttggagctaagagccaaagccttagctaaaaggtatggaattggggatatttggtcatacattaatgtaagattttcaagagtataaaacatgttttatttaattttgttatcgtgcattataaacctgatagtttgacttgtcattttacagtgtctgcatatcacaaaacagtgtttgcttgaatacactcattgattccacacagtgggtaataaacttttttttttttttttttttttgagacagagtctcgctctgtcacccaggctggagtgcagtggtgtgatctcggctcactgcaacctccgcctgctaggttcaagtgattctcctgcctcagggtccccagtagctgggactacaggtgtgcgccaccacgcctggctaaattttgtatttttagtagagacggggtttcaccatgttggttggccaggttggtctggaacttctgacctcaactgacctactcaccttggcctcccaaagtgctggggattacaggcattgagccactgtacccagctcataatgaacttttttaaaagagaaaaattttgttgaccattattggagctggatgcatctatatgattagatgtgcaaaaagctggaaaactcaaaaacaagtgatgattcatcttyaggttttttttataaaaaagtagtggctgggcacagtggctcatgcctgtaatcccagcactttgggaggctgagcgaggcaggcgcatcatgaggtcaagagatcgagaccatcctggccaacatggtgaaacccatctctactaaaaatacaaaaaattgggtgggcttggtggcacacgcctgtggtcccagctactcaggaggctgaggcaggaggatggcgtgaacccgggaggtggagcttgcagtgagccgagattgcaccactgcactccagcctgggagacagagcgagactctgtctcaaaaaaaaaaaaatttaaaaactagcataaccagtgtttccttcaagtaattaattatatgggaaaccgagattcttgaattaagtttttctttactgccctatacacatttagctgttaaacttttatgattatctaagaagggctgaaacagttgaaattccaatttctttaggaatcaaaacattctcatgaagttgtgttgatttataacatgtaaatgcytgttctactgattgggcccggatcatgaaaggaatgaagtctttatcagaggcagttgtccttcattgtccatctccctgggaccatccctaataactagataggggtattttctctgttgacagtacagtcaaatcggctgctcatcaccattgtgggagggtctcaggctgggcaagggggtgtggtagaaaggtgatttatccatgcgccaggcccgggagtcagggactggaaccccagtctgtctcttgacttctttgaagccttcttgggggaatattactccccagtttttatatttatttattgaatggaaggaccagttagggcatgatctatcaatatccacatggctttaactttagccacttccgaattgctgttaaaaaaagttactgatcactacctggctttagagggcaagcagaaacatcccatggatgacacagaagtatgggtaggagaagatgccttcacctcttctatcaatcactgtgttccagtagatgatttcatactgacaacaacaaacagtcgctgtggaattttattaagccatcaaaatttccttcacaytcaatactgttgaacaacaagataacacatcttcttgctcatcccacttgaactcaagtcatcarttttaggcacaaaggttttagttttctcgggaaatcaagttttaaccacttgaggttactactgcagcaagcagattttgttgacaaatgtgaacagctttcaccctctgttagtacaaattaatatcctttccttaaataaagttagttagctatttttggtttcaaaatcagtttccatcataaaataacagcaagacactgtacacctttacgttcaatactagaaatttcacccagtgcatcagcatctgtgcggcattccctcagcacgggctctgctggcgggcagcaggggtgctgagctctctctagtgcgccctgtgcagccacaccactgctgtcaccacatgtccctctgacggcagaggtggtataagcagcttcaccctggcccgactgaaggctgtcatagttgtttttcatattatgcacaataaactgtagcacaataatcatgatataacaactgtccagcaaaaataaaagtattttacatttgattatcatacaaaaatatgcatttttctatttttaaccattattaatagtacctaatatttttaaacttgtaaattaacaacaataaaatactacaagagttwaaataaacgtgaaggaagaaaattacagagggaaaaatgctcaatccaaaacatttagtaataataaaaaagcagctaaatgaaaaagggagaattgtgattacactgtcaatggcaggatacgctgtggtgttataaggagattgggtctggtttctaatcaaggactgtaaaatgtttaataattctatttgtataaactgaaactagcccttattttctaggcaacaagttggcaaaaaccttgggtttacccataaagtgaatttcttaagatattttttaagaactcctgtcctgttatatccagagacattatcaaattttaaaaggcaaataattcaaaaagaaacagctattcagtacatataaaggtaaaatacagttatcttgaaaacacttgttttagaaaaggaaataagctaactagacactttactataaaaattttccatatcttaggatggcagtttaagaaacagtcaaatttgaaagtatccatgttttaagcggggaatgaggagtgtgggggaggtggtgccccgtttcactgctgtaagaagcttcagctttgaccgctacagtgrtaggtaggctcttgtcacacagtttggaaatactttactttagagagattcagatcaagcaaacaactgtgtctgctcattctcctcaactttgctgtccaaagttgggggctgggggagcacttctgtcgctmttcaaatggcagtgttttgagagaatccatttttttatttctcctctattcctaagcattaggaactatgagagaaggacatctgtgcaggtgcccaactcgtaacctcattagttatttccagggggaagtgccagcaatagtttaccacactggaaatactgatggccaagcccagcacgcctcccagcaagccttgtttgtttttgagggcgagttttggcatagatggcactctcctgtctacagcatacacctctgtggaatcagcaccccagaggccactccccagtggctttcagaggaacaagactctggggactcctggctatgaagcttagtatgaaaagcctatttcaaatatgcaatgggattttcccaccccaattttaaaaagtgaaattatattttcttctgtaatatttgtatcctaaagtcaaaggcacttctaagtttaattatctgcagcaaatgctttaaaattaacagtgcatatcattttaaagttgaccctatgaagttaaaagcaaactcatgatttcaaaacacagtgatctaaggttccaaagaaggtgatctaaaatcataaattctggccccagaacactgaaccttcatcaggtgagttcaattagagaygacagaaagtaaccagaaaaatacatgaatacttcctaaaacctgctggaggttttatcagatgctcctaaaaatgacacgaaacacaaatttcctaactttcctgttgtctgctgcctggggctgctaatgtgactgactatcagatagccttcaggaggtggtaggaaaaatggatggagacaaaaatgtagcagacaacatgaacagtttgatcacggttacaagagccagacctgtaatgacagaaagaggacaggaacaaaatttacatctctcttaaaataagtgtgaaagaagcatgattcaacatgtttttaaatattagtgcaaattccaactattattcttacatataaagttattagagattcaaacgcctaggttagcaatgttaattcagaggaaaaaagttgacagcttccctcaaaatgttcagaaaacaccctattttagtcttcatttgctaatgtctcagtagacaaccatattttggccccacttaaaaatttgcttaatggtgttcctaaaatgcttcgtctgcacagattccctacaggagaaaatggaaatgaggaggagagaaactccggtgtccccgaggtgtcggygtggtgagggccgctggcgttgaagtacatcctgctctggcccagctccccatagcaggcctccagggggccactgcgctgttgccgcagcatcctgctcagtacgtcgacttcatcagccaggagggagagcttgtgaaaggctgtgatggagccacccaggctgatctgggcctcgggaacccagcggaagtagcacagtttccacagttttatgtgtgttccagagacaygtggcagaataacaccgtgcaggttggcgggtttggaaaaccattctctaaaatactgctccgtatcactgttctggctgtcggtttgctgagctggatctggctttggttttaatatcaatgaatttctccttggaagtaattcttggtcactgatgattccattctttaaggcagacggcattcctcttagtgtggagctgtagcttttctatacagaagagattttattatgttccggggattccctttttagaaagattgaaggatgcaatggcaaatataaactcaatactatgaaaaattaatggaatttcagcctcaaagaacattttcctcccttcctttgtgtccttattctaatcctcctcccctggaattacacttttttatgtgttgactctacctaggctgttactatcagcctgaatgggggcgggatgagagtacctcctatccactaatttgcttaaggataagttctaagacgggctagaaaaaacactagacctggycgattctatcaagaacaatggcaaactgaacagaggcagtcaggaggccaaatgtctgattctttgttctgtacctttcagtagtctgcaaattttctaccaaaaaaaatcccaagaatttatttgggaattattaaaaaggcaaacaatgaatgttattaggacaagaatatagcagtcaggaggccatgactacatcacagccaggcggcattccctgccacagtggcggcttgaatcatcaagaaatggataaatggggctttagtaaatcaggcttgcaggctcaaagctgcaatctgcccactctcaggtmctgagactttgtgggcctcagacaccaggaagaaagytgggatacagtcatttgagttaaaaagggaatgacccctcagaaacccrcattagcagtgttactcttggaastgcctttacttttaacgctctctgttctgaaaaagaggtgtttggttacgtgtgagccaacatcacgttttgttagctgtgatttacctttgtccgtttaaaagacttcacggagccattctgtatacaaggtgtgctctttccaatgtagaaggggttatggaaaagggtgcgatcctttgctgtaaactggagagaccagtcccaaacagaggggaattttaagcccttctcatcacccaattggatgtttttgcttatagcaaattcctgcaaaataaataaataaatatttgcaaaactaaagattctctcatgaatgccttttttcagatgagccactcatcattacacaggttaaatgttctgtactgcagccctcaaaacccaccagagtggcactttcacttcaagagaggagacgctcctggcctttgagctcagagggccccacagtccccatgaacaaggagtgtgcttttcaggtgccctctgccttaggaccccaaggaagccgtgccctttgggcaataagaatgttattaagagaagtttcactaacatgatactagaaagtcttaaacatgttgaatttatttctataattacagtattttacttttatgagcacacggtcagtacatttaagtagttacctgttggtaagtggattaacaaaatctttggatggaaatcactgccaccaattttataacttacttcgtaagtggggagctacacttcactgagccagtgatctcaaatcacagaccacagactcagggtaggaaggaagggatcaactccctgtggtcctagcatgtggctaaaaccatggagaccatgtacacaggagacccctccttcacaggagtccacctctagcccggactctgggcgggtgcagcctagttatctggcttcccaccacagtaaactgaggcaacacaaggctacagggtgacagccaaccaccgcattgtgaggaagacatggagctcctctggaaggcagcccagaccatttctatgaagcacagtcacatttagcaatgtggagaaaggactctcatctcagctgattgatggcagcaggctaccacagcagtgtatacacaacagttcgctggaggaaataactccagacacaaagtcgctggatgatgggaaatgtctgattctttgttctgtacctttcagtactctccaaattttctaccaaaaaaaaacccccaagaatttatttggaaattattaaaaaggcaaacaatgaatgttattaggacaagaatatagcagtcaggaggccatgactacatcacagccaggtggcattccctggcacagtggcggcttgaatcatcaagaaatggctaagctgtgtaacagcacagggcattttgtaaagttttacaaaattttctatttcaaataagtaaaaattcattaagcaccaaatacacatactcttaacagttttggccaggcgcagtggtgactcatgcctgtaatcccagcactttgggaggccgaaggcaggcggatcacgaggtcaggagttcaagaccagcctggccaatatggtgaaaccccgtctctactaaaaatacaaaaattagccaggcgtggtggcgtgcacctgtagtcccagctactcgggaggctgtggcaggagaatcacctgaacctggaaggcagaggttgcagtgagccgagatcatgccactgcgctccagcctgggtgatagagcaagactctgtctcaaaaaaaaaaaaaaaaaaattttagttacttgacatttcatcatgtacatggattaaaaacaatccatttgcttcaaacactgttaagagctgaaatctagtaaaacatgaacccaaacgtgttttaatggcccttcagtaagtatatagaaaatgtcctcttggccaagcacggtggctcacgcctgtaatcccagtactttgggaagctgaggtgggcggattgcttgagtccaggagttcaagaccagactgggcaacatggcgaaaccctgactctacaaaaaaatacaaaaattagctaggcgtggtggcatgcgcctgcagtcctagctactcaggtggttgaggcgagagcagtgcttggacccaggaggcagaggttgcagtgagctgatattgtaccactgtactccagcctgggtgacagagccaaactgtcttaaaaaaaaaaaaaaagatgttctcttttttaaaaggtaaaaattaaaaatatttatcccaagagagaccagattttctataaacactacctggccactagcacctaaggtggcctcagaatggaaaaaaaaggaagaaatgctttgggcttttgcctgtgtggaaggggctgagaacggttaagaatcacgacccttagacaatgaccagttcctgctagggaggaagggagagggggattcatgttagtatttgtcagaaaaggcttttgaaagagccaaattaaaaagagcactagaacatgaacagggaaagcagaggaaatacttgtagaaagtattttttacagctccctcaatacaattcagtaatgttcattcctggtgagaagtctgtccgcacacacagcatcagccaagcagcagaggcagtggtgtctgggggctgggagtcctccacgcagatacccacccatgcactgcccagtccccagaccccaaagtctttgtcctcgcctcacgcaccttttgcaggctcacactgtgtgcgcacggggtagtgacgggagacaatggggaagagctgaaggaggcaaacaaggccagggggaaagcctagctcgaggcagagaggggccccaagaatgattatggtgacgaaaaataaaaacaagcaactgggagagcatgtattttaggaacaaatgagcgttccatgcctcaggagcctctaagcctgtatcactggttctcagcacagtatctggaaaggtcaaactttcctggtggggtgggcaggggacagactctggctctatcacccaggctggagtgcagtggcacagtctcagctcactgcaatctctgcctcctgggcttaagccatcctcccacctcagcctccccagtagctgggaccacaggtgcgcaccaccatgtctggctaatttttgtattttttgtagagacaggctgacggtgttgagtttctttgagccctgggttccccaaaagtggcaatgctggacaatctctcctgccttttgtgtcctgagaactggctcctgtggactgagactgccctccctcctgattcccctgtcttctgactataaaatcccaggccttgtccttttctttgggatgcccattaattaagttctccctcctgcaatagcctaaataaaatcagctccttaactgaccagtgtgttttgtcttttataccaacaaatccagaataattcatatgtctttaggaaaatttgcataatgattcacagtttacaaaatgtttcacctcatacaatgagactaaaggcataagtgttagtttgacagatccattttacaggttagcaacctggactctcaggctgaagcctgagtggaacatgggcctagcacttttcccagaccagggccagaactcaggtttcccgctccctaggtcacactgcctagcccagggccttacggctgaggctgaagaccccggagctcactatgagggcaatcctcttcctagaaaggcttcctgaaggtccacaagagctgcccctttctgtttctctcaatggtctccacggcatttgtcagcttctgttgttggttcgaggtgggtgaaatggcactttggttcagaatggtttcaagtttggcttgagaccctgcttagtcataaatcctctacatcaatgaattgtgaccagaaacttcaaactcgtgaaggaaaataatcttgttttgtacaactttttatcctactgacctaggaaataaatgtcgtgtaacagggcttttgttttttactacccaatagcccaaatgtgaaatataaatacaaaagcatgacatttaaggtggttaaagtaatttacatctttaaaggggtttactacaaaacatttacattagagtaaaacaaaaaatgttcattcataaaaataatttcctagatttttgtgtcttcaaaataatccattcagaaatttcagctgaaaatggcagtaagaattttaaatcataagattttaaataggcagtgaattatacttcaattatgcctcgataaagttgtaaaaacagggaaaacgtagccacagccacagggttgcttaccgtgctttgcttcactcgctggtgaggggagttgaacaggaaggtgccaaacagtgagatccgggtgctgtcatacaacactgccaggtaggtttcggagaactcaaaagctgcaggatattgttctaacagctgccaggtggcatccaagaatagcaaaaataaaggagactggcaaatacaaagagacaatgggatcatttaatgttatccttcagccgttcacatttacttcaaaatgtactgctgatgttaaagaagagatgaatgagaaaacatcgaagcctaaaacacttgccttctaagctgagctatacacatctatcaaacccaagaagtaacattcaaccgtgataaacatcacaacccttatttgcccagtacatgtaacaagttgaaacagcaaagcacacagttgagcgggttgccactatatgaagggggaagagcaaaatatgtgtttaagcatgtcttagaaacaattctttagattatataacaaaacaaaaccatcaaccaaacttctctaatgtttggttgatcctgtaggctcagcatccagaaaacatccccatatttcagaaaacactttgggatgagcctaggtcacgtggtgtgtccccaagtgcagtagcgggtgaccactattttttatgagacaccacaagtcaaatggcgctctctgaaacaaccttctaaaaactgatctgactgacctgcctggccggtaagatatttgtaaggccttccgcagcctaactagagatccgaggcagccactaactccacagctgttgcaaaggtggccctctcaaacttttcatcttaacctatgtatcccattttaagaaaatatgatattccaaaagtgatttttcaaaatagccaatgtgcttgttatctgtttttcagtattttattcagaattttttcagtagttttccacttagacaaattcaatagacaacttttaaaaatttcaccttcatagttacgataatctttataataagtacatcaatttgaactctaatccattagttagctttggactaaggaaattaagttgtactaaatacagtattttttaaaagccccttcatcttttaatgacacaaattttattttgtgtatccttaaagactgataaaaaggcatcaagattttgttacctctttctctgatctctttagatggttgcatctgtctagaaactgatatcctgccatgacccactccttctgtatcagactctgaaatccagtaattgtcctaaaatagggatccagcatcacttgaacaagagaagctacacaacagctcaagtctcttccttcctcctctgttaataaaatggaaagaaaatgattacaacatagaaaaatgctgagagagaaagggaaggaaaggtaaactagataatttagtattctgcacacctaggctgccttccaaatctgtataaggaaattttactggattccagcaactctaaaatattacagacttgtagataaactaaattagcatttaataggagatggtcttttatacatggatatttgccagataatagaagctcatcactcatactttttacattcgaatggtttgtggtagaaaatccgtctagactccattctactgctcttttgtcaaggtattaagtataaggtaatctttctactgacaggccacatggcaatactgagaagtgaatggggagagtgggactgttcactaccaactgaagctgtggcaaacgattccctcctgtcttttatagttgttgtcctttccaataaggccagaattgccacgctatcaaagtcagccagggaaatcagaagacaactattgaccaatatcccttatgattacagatgtaaaaatcaataaaaatatgagtaaaccaaattatccaggaatgcaaagttggtttaacatctgtcaattgtagtaacgtaccacagtaat

SEQ ID NO: 96607 - DNA, 13817 bp, Homo sapiens
agttctagtaagtggaatacacagtttatccattggctcaaaatagatgttaacagatttgaaagaaaaagtcaaagcaaggcaggcatcggtgttaacttgttacttgacctactggaggcccttaagcacagataagattagaactcagagttgaaagcaagactgaatctcttggtgaagttctaatgtatacatagaatagatgagggttaactaagaggaatgcctttatgaaaatataaggaggcctcaaatacataacccattgtgtttcttttgagctggcatcaaaagagcttaatgatagttttttttgtgtgtgtgcaattacaataagcctctcaactgctttgtctcagtgttttctgacctttcttgtcttcgttttaatagtatttacattattcctttggactatctctaattcattttgagtgtgacagatagtataaatatcaatgtatgatactttagcctatgaaccagtgcctttagaattgtatatcatctcaccaacaatgtatgcaatatttcaagaataatgggggataccatgaaggttgctacttgccttttatgcaaatggctaataacactgatttttataaaattctattcactatgctgaaatactcaggcaatcttaaaaactttgggggaaaaatgcctttgccaaatgatccagggtcacaaatttaaatcattgcagttgttccgggtaactcttattcaatactgtgattaatttcagatgagagagactgaaagttttctgtcaggctttatgaaacaacactccttttaacagctgaaagatatctaaagtcaaaggaataaaaagtagtttattttggttatgtcttaaaacccaatgttttaaataaaaagagaagcaatgagcatagcattaaaatttgttttacttggaaagtccttaaatttggaaaaccaattttggatcccatgcttatgagctatgtcatttgctatcaatgatgatacaagttcacaatgtgatcttaaaatacttttatttatgatacatattaaccaaattatattatgcataaacccaacaatataagaaatattaacactgttaatctttttcaaaatccttttcaaacttttctaaacattttgtggacataaacagtaacgtaagagttctaacttcattgcaatcttaaagaattgcatttgaaaattctgggactactattatcagaaaattaaactagaacagatcaaaagcctgatatttacattcaaacaacaacaaaatattgtatttacctacaaattgagagaaaccacatttaaggatagaactcacttagatgcatattagggtcattgaagtacttttaaaaatcactgtacctgggccttatccccagagattctgatttaattgatcaagggtaaaacaggatatcgctatattttttcaaagctctcccaagtgattttaatgtccagcctggcttgaaaatcattgatcttttaaatcaacgtggtatgaccgcggtaaaaatacataaaatcttgggcttcatttctagaatacaatgacgagatcaaaggaggctatcagaaccactattatagccaggttgttcgatctgctatccaggtgacacattgtgaaaggtgatgttgacaaaggagagaaacaggtgtcaccgaggacaggatgatgatatggttttcaaaacttgaaatcttttcttgaagagcagatttaggaaaattacaatccatctgcattgctaacacagggaaaagacaatcaacatagtctgtgttcctccaggaggcagagccagaaccaatggatagaagttaggatggcaactttatcagctcaataaaagtaagagcattttgataagagcttttcagccacagatgaacaatctgtaaaatactgaagcacaggccaggtgatctgtcatgaatatgggaaagaggttgaactatagatattttcttccccattgtacaaataacctgaaagaacaccttgaggcttcatgaaatttctcaaatcacgtcctagtggtttagaggctaaaacagagtgactgaggggactcagactattgggtagaaccaagcatgagctgcttgttctttgtgtgacctcgggaagtctaccatgccctccttagcactagccaagtctctgggtatagcataccctcaaagagaagttggtttttctttttgtctttccagatagaaattttagttatagatttcacttagattgctatttaatgattgatcagacattttccacttaagatagctccattaatatactacagtaaactcaatatagaagtgttatgtagtggtagcactataacctttaagtgctaagctagatcagattctcccaacctgtgctgcacattagaagcacttggagaacttttaaaataactgatggcctggcttcaccccagagaatggaatttaataggtctaggtagggtcacaacattaaatgcttttaatagttcccagatgattttaataggaggctaaggctgacaaccactaaaaatctctaaggtcattctctaaaacttcagaattcaatgctttattttcatttaattgcaaataagtatattgtttgttgaaaaacagaacaagttaaaaaaaaaaaaaaacctgtagccatgatcagactttcgattataaatttatacagaacacagcaagccattcaaattttggttcgtctttctgaacagttttgtaaattaccaagactcagttgtcgaaagctagctcatcattttgggtggcacgagcccaagaggagaataacttaattatgttgagtgatagaattagctttcacaaagattgaaacaggctaaaattataatttaaaaccaataaaatttaatttaatagcattctatacttggctcaagaaaaatgtgaaagtaaactgaatcatggcttaacagtgttgttatgagaaggaaaacaaaatttttcctgactgcaaattatcagcagtacaatacagttgcccatccctcaccaaaagtaatttgatacttaattttattagcaaaaaatacaaaatatgaatgagtcttctctttgcttctataccacttatacctagtactacctagcatattaagttcagatctggccaccacccttccacagctatgttgataaaccattccaaatgtagaggagagtgatactgatactaggactttgtaaaatcagcaagccagtcagctgggaggagcagtgagggtggtcagacaaagactagtgaagaatctggtatttttaaatgtggaaaaggtaataaggtgaggcatagaggggtggtaggtgggaggcaactgttgtgattacggctgttaaatattttataaacccatattaaaaggtattaggtttttcatataatttccaagtgtacccacataaactttacaaagaagttacaaaagacagtcttcattacagttatgagaaaagctttgctgtttctgtgttagaatgcagtaaattgcctgtcaccagattgtaatgcagggttgatatctaaatcatgtttgtaatttcaggtacatgggcttgtaacagatactcatgaacattcactaaatgaagttttcaagtaaacctgggtgatcaacaaccaggaaagcctgaaagatgatttgtttagggtagaggtaggacagactttggactatatagcttttaacactacttccagtcctcagattctattgttcgatgacacaaattaaatcacaaaatcctaagataactctagatttttattatttgtaaatcaacataaacctaaattcatcttctcctaataaagtgtatatctttttctcacacatgtgattgttgttttagtcaggttaaaataagcggtcttgcaagccttgaaacttcagtggcttaacatagaaaacttcatttctctctcgtataaatctgttgtggtcctagcagctattaaggacaacttacttccaaatagtgattcagagatccaggcatctcaatacatatgcttcaaggtctctaaaacgggctcataaatgtgtggctttgcaagtaatccacataacttccattcattggccactggccaaaagcagttccataatcccacctaactattggtaggtaggaaatctgggaagcccacgtatattcagctagctatacatgtaactgtcaacaaaagtaaaccctcaatgaagattaagattcagggctacaagcatctgagagaggacactaattaattatgtaatacagacaagtacatgttctgtaattcttgttctgtcttcattttagaacttaaaaaaataatgtaacattggattaaaaatttgcaagaaaatctattggaggatgaaactgtctagaatacagtgtagatgatattctgtccaaaaataatagattagaaaatttaatgtcaaaacaaatgtcccaaattagatgaaacccctctaatcaatggcaagttagatggcaagttagatgtgtttatgttcattctccacatacctacttgaaatataattaatcataactcctgaatctcattgctccctcttaattcttattactttatgcacttaaatttgctctttggtaccttttaaatatctcagattgggcaattcacttaccaattttaaaaatagctcctctatattgattaaaaaataggacttcacaagaacctcaagagaggttctaagttctattttttctgacatcatcacagttataactttcctaaataattcatattttgaacagagtcctacaggtccataattctgaaattataaagttttcattccattatttatcacatttttaagaccagactgaatagatgttaaaatgacatttggtcaaaaccaagaaaggccacacccaatgggcaatcgaatctgtaactggggtaacaacactagttccagagtcagtacatatcaaagctacactttccttggcatttgaaaatccactgtcttcacatatttctattttagaactattttctagtttaaacttagaggataagatatagaatttgtagtcactatataaaataacactttttaaagcaccttttagaaaactgctttaagatgtataaaagtaaattcaatttgaaacacttattgaatgtttaatacaaatacacacagtaagcatacactaagcaaattactcataaactgaaccctccctctctcagtcctttggcccagaatgctgaggataacagtgatagcagtttccttttatactgtcttagtgcatcactgtatccaacttgaggccacctacatattcctttattcagggacaaactgtacaatatttcacacatctttacttcacacaactacagtacacataggtttattttttggctacctcttaaattcaaaacacctattccccctcagggatcattttgattcaaatacaataaaatttcagatataaaaccaacttccagttaacacacaaatacctactatatgccagactatatgctaaaactgaaaaggtggaataagacccagtccttgccctcaaggagcccacggccttattgaggagaatgaaaggtaagtaacaatccagtatgcaaagtgctctgagaaggaaagcctattagagatacattataggcaattaatcctgtttcagttatccatttctgtgtaacaaaccatgtggaaacttagtgactcaataaattatcatcttttatagttctgtatgggtttgcttagctcagctgggtgtttcttggctgaggggtctcacatgtggttgcaggcagatgttgacaggagctatattcatctgaactgggatttgtctgggactgatgtccaaataattcactcatgtggtagaagttgatgcaggagcttggtttcagctgttggccacagtgcttgcacatggccttgccatgtggcatgggcacagcatggtacctggattctacagagaatgccctaacagtaaatgttccaagagctcaaaaccacaaagcttctcataactcaatgtggaaattaggcagtcacttctactgcattctattggttacaaaggacccacctgggttcacaatggtatgagtactgggaggcatggttcattgaggaccatctttgtcgacttgctatcacaggcacaaaatcgtttcaaaaacacatatttttaaaattccctctcctcttggctcataggtcaatgggaaagctgtctgagacaatatgaaaatcaatgatgccactctagcattagctgaagatccccttgatttcatccagcagccaagacactaagtgacccaaaggaagaaaagggtgatcagcgtggctgtgyggtcagtaagtaaatgtgcaacagctggagtaaattagaactaatttagtgcataacttcagcaggaataaattttgttaatcttcaaaaagtcaaaacaaggattgtaactttcacagtatctgaatcacccaaattttactacaagactcttgtcctcattgttgcacttaccagttccgtactgataataaagaaaaattactattgaccttttcctaacaaagaacaatttttaaaattttgtttttacaataggaccctatggagctgttgttttaatattatgtaaattaagtaattttatctactctaaacaaattgctttatcagttgtagtcgaatctgactactcttatgcttattttattattaatccaagtaaatattctctattgaacatagattagcagtttacaaattagataaaaacagaaaacaaatcacttcaacagtattaactagaaatatgctagctactccttatttcagaataaggtgtcacaattcttccttttaaaatgttgtattgtatcatacttaaaaatatataaataattcctgaataaaagcatccaatatttatcattttaytagtattagcctttgggaaaaaatttgatagcaygattttataaagctcttgcatttgctttaaatttagctaactattttgaccacaaggtggagctgtgatgtcacaatttggcaagatttgtaagatacaaaaactatgtaaatacagacgaaaataatttaataaaataggataatctcatcttgcaaatatgcactatttaaaattaatcaattctccaaacattaattatcagaagaaaactatcatttaatttgtccagttctcacttagcagttattgagctttatcatatataaattgtcttcagtagatgcagaattattctgtcatttcacatcacgatcccagatttagtgactttaaaccagtgttaaaatgtctttcaaaattattttgtaattaatcacagaataattcattaaccattacaaaatgtaatggttacattacatccttattttgttatccaatattgactagaggatcatccattatatcttctaaaataattctttcagttgattatttgtgttttgtattgttaaacaggcagaaacttctaattttcaaaagagagtattcagattttgagtcaaccaaatttcagtgaagatagactagcatgctaaactcatcgtctcttgaattattaaataaacaaacattaccaccacttcaataatatctgtcaggaatgaaaccacttttccaaatgaatgtttcctgatctattttaatatattaagaataaaacaaaaatatatccatacatctgtggatggacatttaggctgtctccaaatcttacctattgtgaacagtgctgcaacaaacacaggagtgcagatattgcttcggtacactgatttctttttcttctgggtatatatcaagcactggaattgctgtatcatatggcagctccatttttagtttttttgaggaacctccaaactgtactccatagtggttgtaattaattacattctcaacagcagtggtcccaatgtggaggggtcccttttctccacatcctctcaagcatttgttattgcctgtcttttgaatataagacattctaattagggtgagataatatctcactgtagttttgattggcatttctctgatgaacagtgatgttgcgtacatttttaaatgctattagaaagatttaagacttataaagttcacaaatccctagcctgtttacttaccttcccagtctaatttattttatcaaaataatgtaattatgcaatacttcacatttttaaagcatttctacatgtacaattttctcttctcattatttcttagtgtacttctattttaatccaaaactcattgcattaaaaagttttatacatttccctatttttcttcccaatggctttttgttaataattattcttaaataatgctgtggcttgctattctaaaagaccacaaaacaaacagttctgtttgatacactgctttcatgaagtcttgaagacttcaatattccgcaacagttaacctctagtctagtcagagggagttatttacacagactcaattatgactaaaaattctactgggctcttctgaaactttaagacatctgttgaataaccattccaaattccaaatgaatgacaagttaccagcatgtcatgtaaaatgggctttagggcataaaaagcaaataaatcaagacatacgtatgtcagacaggaaaacagaagtgagtacataaagagattctgtgacgaggatggaccactcaactcatatgttcattgttttccacatttctattccatagaaggatatttgacctcttagttaagttaccaatacagataaattactagtgttttcaaagatgaagcagaatgaagattaatgcactggatgactactgaagtatctatattaaggaaaatattcatattgattcctatgcgcattaagaattagaaaaaattctaccacggtgagcatttaaagcaccttggtaatgtatgtatacacatacacacacatgcacacttgtgcacacacatgcgcacacacacacggttactattgacatccatatgcttccatttattcaaattagttacgtgaatgtctccttttccttctagtctttttttctttaaacaatcaatatacaaatatatttctataatatttcaaaaacacaagtgtaaaaggtaaaaggcataaatcctatttactcctccgtgatctcataccactctccagagttgttcctctctaggaaattttctgtaggtttatgcacacatatatagtattttgtttttaacataaatggtatcatactctaaatagtgtgactttatcaggttcatctgtcagagatatctgattgttgcagatacacaataagcccttggactacatgtgcttaaactacgcgggctcatgtgtatgccggttttttctgtctctgccacccctgagacacccttcctcttccccttccttctcagcctactcagcgcgaagacaacaaggatgaaaacctttatgatgatccacttccacttaatgaatagtaaatatattttatctttctttataattttttaaataacgttttctctagcttattgtaacaatacagtgtataatgcatataacatataaaataaatgttcatcagctgtttatgttatcagtgaggcttccagtcaacagtaggttattagttgataagtgttgagggagtcaaaaggtacatgtggattttcgactgcatggggatcagtgcctctaacgcccatattattcaggggataattgtttatatatatgggtgtgtgtgtgtattttttttaaaaagcctttattatattgcataaaatgaatgaatcaaacaatagatgtactttctgtatcttctgctctgtgtgtttcaagctgtatttttctccatccttccaattctactcgttttccgtttttcaaattttttaatctacttatgggaatttttctaattttctctcagtaattatgaatcatctttttaaagctacattttatattatttcatggaatgtaggataagaggaaagacaaaaaaactgtgctcaatagactacctggatcccatttctgaaaacatggcatgagactgaaatagttatgctaagtaaccacccatggataccaaaatggaaaataactagtacctgggagatgtctttgaactgtaccacaagagatattaagctggcttgcactggtaggaacgaaccgatctgcttttataaccagagtctgttccgatgagttggcatctacatcataccaggtgttacatattttgaaaaccattcctgatgtacagtaacataattcacaaatcattactaaaatgtctccttatcctagttgatggatagtagaaattttctttgggtattaagtgtcgccaaagaagagaacaggagtagaaccaacttccttatctttttaagtccatctcacagtgactataatgtcttcttcatcaacatatccttggtgcctggaacagtgcctgacccataatagagacccagaaaatattaataaacaaataaacctatattgaataacatttggcttctattttctcacttggaaaacgagttagatcaaatccctagtcatcctaaaattgaagattttataatttcatttataattcaatagtttcgtatatcattaaatctactaagcaaaatgaaaaatcaaaggcttcattctttcagacaattccatcatgtattcactttggaagataaacaccaataatagaacaacaaaactttctaaaattattttattttttataattttctaacacatggtgttagaaaatgaattttggcaccgtgattaagaatttcttttcaagtttaacctttacattaaaaacagtagctacaataaggatatttcaaccttacttagagaagtgataaaacatcaagtcaacaagtatttttgttggagaatttttttataagcgggatagagggaagttaacatagacactcagaagaataaaatggaaattatgccaggaagataaaaaagcaaataaccctccccccaaaaaaagaataaggagcgagacaaagggcaaaacggaagaagcaaggctcaacaactttgttttcctgatataaaattcaagtacttaaaaagttttttaaaaaataattaaatgcactactcatctcaatgaaatttttcgttttcctattttctagaactttctaaaaaaggaaacaaagcaaaaacaacaacaaaaaaaacctgtttgacttaaggacacttgctgatcttgacacttgataatactttaagaaatggaaaggttttcctaaatctaatacctgcttaatataatccactttggaagattcatctgaaagaaacatagggtttgatttttaatactaatataaaataatctgccttccaatcaaaacaaaaatgttttcaactgtatacgctcctcggttgtgttttgtaccattttcttgaggaaaacgttgtgtaattctttgtgtgttcccttagtaactactgtaaataagacctgcataggtgttcagaaaaatacttagttgcatacaaatccagttagaatctgattttcaaggttttacaacatggtaattttcatttatatccattttgtctacatttcctctatattttgataaataaaaatcttcccatgctttttttaaataagaaaatattattagtcttgttatttgtacctaaatattttatcaatttgaaacacaaattcataaattgtcattattctcagaggcaacaaagcatagaaataaatatttaagttttttctttcttttcttcttcaatctgtgttttaaggctcagagcagacattaagaaatatcaaacaattttttataaaaagtttttcaaatgtttggcccaaagtgaagttgttctgttgatgttatttaaatattcctctcatcttctcagccacaacttcaaagacgtgttcatgccagtcattcacccaaaataaatttcaattcaatgaaaagtaaataacttagggatctataaatgacactgcaatgtatcttgttccatttttaacaggaagtccttcatgcaaatgtgtgagtctcccaggatgcatgaagctccagccttttcgtggtgactcaatagagcaattgtaccttagaaatttgcaaccacctccctaaaaaagttaaaatgaagaaatacatcagattatatttaaccagtggcaaaattcaaattatgtcatttgagcaaaatttaaaaaagaaactaaggcctaaggcaaagtccttttcataatgatatatttcttttgaaaaatctaaaaacacaagagtcataattacctgaaagtcttctcccacgttattaagtgcaatgtttatggtaaatgtagaagcatcatgatgaggacgaagagaacgctgtcgttcaggggagtattttactacaaaattcagtagtgcaaatccctgaaaaagcaaagtaagccagtggatttgcttattaataaaaacattaaaaagaacacctgtgtaaaaatgggtaagaaataggctggaggggtgagaggataactaccttcgtataatagcctgcaaagaccttcagtgtaactggtgcaatgaactcccggataaaatgaagccatacattctccagatcaacttgcttcatgtggatatcatcagttgggacattttcataaccaccagatatacggctatcctagaaacaacattaatgacataataagctgtactccacgtgcaattcccatttatattatagtattttttttcaaccacagatcataatagacaataaaaataacagttgttccaatgtggtatatcatctgctttaactgtaaaattatcaaaataacttaggtaacagctttgtcaatgatacaatgacgaaacaaagtaatgtaaggtcagtagactcctttcctacttcttaaatgtatatgtgaagtttagctataaagtaaataaaattgacttcctaagccctcacatcctttcttaaaaatgagtctttttttacagtgaccctttaggcagtctcagctgcttgatgagcatacacttggcatatctgctgtctgtattaccaaacaccaaaaacaagctttccccgcccttcctcacttctatttgtaacactcaaaagtttttgaatgattgcttttcattatttcatcacccgctgacttaagttcttccttatactttaagcttccctctcccttatcagctcattacctgggggacataaccgtgcagaggcagtaatattccagagtattctgctaaaatggcatgtctgttctcagaggaaaagaaacacatctaaccactggcagtagtatttcctgccaagtctttgacactgaatgcaaatgcaaaactgaattacacctaaggcactcagatccctccttcctatctttacacacaaaaacagttttcagagccagataacatttgccttagaattttcaccacagctcactgtgaaaacgcaaggaataaaaagtggccttggaaaagagtgatatcactctgtaaagacgtgttacctaacaaactctggcctgaggacatcgacccttagggaacatccagtgtaattacatgcataaatgagaaacccgcccaaacta

SEQ ID NO: 96608 - DNA, 13975 bp, Homo sapiens
tttgagagacctatcagaatacaagactggagagagacatttatgagtgacctgtaggtaataaatgaaggtatccttaggggtaaatgagatcacagagagagtgagagagacctgtaaggagagacgagccctgaggagccccaggctttgacagccttacaaaggagaatcggcttacaaagaagttcaagaagacccaagaaataggaggaaccagagtagtttctgtcacagaagacagaaaagatgaaggatccccagcattaagtgttaagaatttagtattggagttagatgaagactgaaaaatcacatctgtgcagttcagcaatgtagatgtctgggagaatggctttgttggtgatatctgggagaatggctttgttggtgatatctaggagaatggctttgttgaagcagtggtattgacaactggattggctatgcattcaggagagactaggagaagaggagatagaggtggctagtagcaacagtcctcttgtgaatggcaaggacccaggtaaagtgaggttgaatgtataagaacaaggagagattatttgtcataataacaaggggagacaattgagacaagcagccctgggggagcatacatgccctgtccagaagggagagtggccatgccttctaatttctcacaagaagctagaaataggaattttcatgtttgaaagattgttgatggctgcattgcttgcaactgcaaaatatggaaaacaaaatattaaactctaaacaaatattctactctaataagtagatttctttttcctgatacggtagcattctgaaactactttctgtgtatactagcattgagcaataagtacatatcttatagataatggaagtcacgcatctcactgttggagaaagaagctacaaatgtggacagagagaagttacaaatgtcctgtgatatgggattggaattaaaggtatcagggtgaactcatgaatagataagataaaaaggatagatacagtgggtgggtcggtgggtgggtagatggataaatggatggatgggtggatggatggatggatagatagatagatagatagatagatagatagatagatagatagaaaatgtgtgtggatatttatatagatacacatacaacgctatcttagccctgtctgctgagagagcctagaaatagttgtaccccagtagccataatataaaccagcatcctaattttggtttctaagtaccattttatactaaaagagctccttagaaaaatggttgaatctggggctggggatggaaaatacaagataaacttggaacattttgtggtaccaaaaagtaaggaagtgttcaaagaatggcacatgtcaaagggacactacagccaatgtaaggtctcccaccaataaaatctgaggacaacttgaacataaaaacaaataataagggattataactcatttaatacatttacagtctatgagtctaaactgatttaaaaccaataaatatattggttaattaaatgaacaaacaaatgcaaaaaaggggaaggctctttcttacagtagaatgccaatgcaggaggaatagtgtaatcagaaaaccaccatttagcaaccatccaaataattgatttatgcaagaatcactaatgaatcttaatactagcaggttgaaataacaagatatgtacacggtcaccaagtaactcctgacaatagactgattaattccacaggaaaaaatatctttacagatgagaaatgtagcagatacaaccttaaccaagtgatcaaagctaacaccaccaatatgggacataatgacctcatgtatgttgtgatatgatgcactgaggagggtccaccccaacttctgtgctggttctgccagaagggcgtaccctgtacctcctcctgaggaaacatcagacaagcctaaagtgagggacattctgcaaaataattggcctatacaaaatgtcagtgtcatgaaagacaaactaaagagctattccagaagaaagcaagctaaagagaacccaggtctgtgggcccaaggccagtgtctctctcactgccttgtgctcagagaggcaacagtaggtttctatgaggcctcctcaatgggcaagtcccaaacacagatttggtgagagcagagagtctggtagactagcagaaagtagggaagtagtcagggtttgatcgtggagtctgaaatgcctgataaggaatggggactttaggtgaaagggacacattgaaagttttttttttttttagtaaaatatcataaatttatacatacacatctaaaggcaaattgatattttaaatttcatcagtctttacagttgctattctagcatctctttttattattattattatactttaagatttagggtacatgtgcacaacctgcaggttagttacatatgtatacatgtgccatgttggtatgctgcacccattaactcgtcatttacattaggtatatctcctaatgctatccctccccccttcccccaccccacaacaggccctggtgtgtgatgttccccttcctgtgtccatgtgttctcattgttcaattcccacctatgagtgagaacatgcgggtgtttggtttttttgtccttgcgatactttgctgagaatgatggtttccagcttcatccatgtccctacaaaggacatgaactcatcattttttatggctgcatagtattccatggtgtatatgtgccacattttcttaatctagtctatcattgttggacatttgggttggttccaagtctttgctattgtgaatagtgccgcaataaacatacgtgtgcatgtgtctttatagcagcatgatttataatcctttgggtatatacccagtaatgggatggctgggtcaaatggtatttctagttctagatccctgaggaatcaccacactgacttccacaatggttgaactagtttacagtcccaccaacagtgtaaaagtgtacgtatttctccacatcctctccagcacctgttgttccctgactttttaatgattgccatcctaactggtatgagatggtatctcattgtggttttgatttgcatttctctgatggccagtgatgatgagcattttttcatgtgtcttttggctgcataaatatcttcttttgagaagtgtctgttcatatccttcacccactttgtgatggggttgtttgattttttcttgtaaatttgtttgagttcattgtagattccgggtattagccctttgtcagatgagtagattgcaaaaattttatcccattctgtaggttgcccgttcactctgatggtagtttcttttgctgtgcggaagctctttagtttaattagatcccatttgtcaattttggcttttgttgccattgcttttggtgttttagacatgaagtccttgcccatgcctatgtcctgtatggtattgcctaggttttcttctagggtttttatggttttagatctaacatttaggtctttaatccatcttgaattgatttttgtataaggtgtaaggaagagatccagtttcagctttctacatatggcaagccagttttcccagcaccatttattaaatagggaatcctttccccatttcttgtttttgtcaggtttgtcaaagatcagatagttgtagatatgtggcattatttctgagggctctgttctgttccattggtctatatctctgttttggtaccagtaccatgctgttttggaaagtctttaaccaactcgctcaccatgtgcttactaggccatgggaggagccttagcaaggaatcttcagacaccctgtggaaaagcaactgctagaatctctcagcaacctgattctcagcccagatcctcatccagtgataggacttgctgactctgagcattcaggcccacttcaccagaagagggatgcatgcatttggactacctgcctgcaacctggtccaaatgcatactggaatgcatgcagaatacagggagaatacaactccatttgcctgcagcctggtccagcatacctttcccacctcattgccaaggtgatcttgtgacaccttgtcaaatgcctggataaggttctgtattcatggctgttgcttgcctgctcatctggaaactctaccgagtaggaaaatgacttattctgagtgaactcttgctagccatgagcagtcctctctttttcgaagcaatcagaaactatcagttttagacttggttccctgattttgctctagttcacgttcagagtcccaaactatggtctccagaatgtatcctctatgcatttttttttttttttttgagacggagttttgctcttgttgcccaagctggagtgcaatggcacagtctcggctcaccgcaacctctgccttccggattcaagcaatcctcctgcctcagcctcccaagtagatgggattacaggcatgtgccaccacacctggctaattttgtatttttagtagagacagggtttctgcatgttggtcagtctggtctcgaactcccgacctcaggtgatccgcccgcctcagccccacaaagtgctgggattacaggcgtaagccaccacgtccagccctcctctattgtttttttatgatcgactcaacagatacccccagaaagaagagtactagttctcttgacttgtggagcagaaatgggcacagatgtgctgtcagccaaatctctgtcctgtcacgggcaggacacaggaggccatgcctggcagcctgccaacacaaagccccccacccagccctggctcactgcccagctaagcttagctctcacttggttgctcctgggtcttgggattctcttctctatctctgctttcccttagatgccacaacccacaaaagaaagaactgcagaattttggtgaacttcagagggcgcatgctcccctccttgtgaccatggtgtcacagaaagagatcactaggtttggagtcaaattttggtgtcaaactcacttgctgtatgaccttgaacaatttaccccatctctctagcttgtgtttcctcaattgtgaattaggaataatatatcctcatcatacagggttatttattttaaggattaaatatgatgatctacataaactgtctagcccatgcaatatatgtttggtctcttttcttgcatcctgagtgggccccaactcaacacttcgttaaagcatctcctattcctgtggccatgaccagacaggttaacataatactcttataactatgcatggaagaaagaaagcctcaagaccgtttctcctgttttcttttagacctttcttgattctttatgatgttatttcctaacgatcctgccccacgtgcttgtggcatcccagattaaattgcatcgtaaagataacaacccagtccaaagccttgtccttttcttaacacccccacccccatcctcaccaactttggacaaccttgaggagaggaaaggtattttatggctcccagtttttcctctcagtgacttgcattttaaattgaagtatatttattgtaatatcatttacaccagcaattttctgtgttaaataaaaatgtcttatcagtgtccaatgtgatgtatatcacttttgctaccttggtgattttaatttgaattctctattacacagtgaatatggagagaattaaatgcatatgataaggtggtgcagtacaatctgggataagggggaaattaagctatgatgattctatttaaggcagtgacagccccagttctgggtcttctgggctttaggagataccacaagagcatgagtaaatattatataagctcagcatgttgctttaatcttgggctcacacggatgtttattaaccaaatatagtgattttaatatatattcatggaaaattctccagcctggtctgaaaaactattcattttcacatttctaacttaaaagatttttctggagaagatagwtttaagaatgttgaattactccaacaattgttttgaaccaagataattttttttcatatcatgtgaggcttcaaggatttgaggctacacatgttagattccaaattcttttaaaatgctttcctgatttaataacaaacagcattttccttctttttaatatgtctatcttgagatatggtttaaatgaaacagatcttgaaagggtctctgagaaggaaattttcatggcatgtcctctagcaccagacttgactgcaccaggtcaggggataaacagcactttgcagatgagtgtgctttattttgaggccctcagacacttcatgagacccctgtattctggaattcactgcctcactactgctgatatacacaatgctatgaaaaatggggaaccattactcatatatttgctaattatgatacctctcacctcttcccctcttttcccatcctcttctcttttcccccaaccaaataaaaaactaaaacaaatacatatatttgttttattttttgcttatttagttttactgtcttattccttaatgtgtgcacctgtagtctcagctactctggaggtttaggcaggaggatcrcttgagcccaggagttctgggctgtagtgcactgtgctgatccactaagttctgcatcagtatggtgacctcctgggagtgggggaccaccaggttgcctaaggagtggtgaacaggtcctggttagaaacagagcaggtgaaaactcctgggctgattaatagtgggatagcacttgtgaatagccactgcacttcagcctgggcaacatagcaagattttgtctcttraaaaaaaaaacaagtaagttgcaaaccacatatcygacaagggactagtgtttagaatatctaaagaactttaaaaatttaacaattaaaacacaatcaggaaatgaacaaaatacatgaagaacaatttcacgaagaggatacacagatagcggataagcacatgagaaaatatttaacaacattaacaattagggaaatgcaacgtaaaacccacaataagatattactacacacctgccaaaatggctaagataaaaaatggcaacaccatcaaattttggaaagaatgccgagaaactgcacctcttataattgctggagggaatttaaaatggcacagccactctggaaagcagtttggcagtttcttgtaaaactaaacatgcaattgccatatgacccagcagttgcactcacaggcatttatcccagagaaatgaaaacttgtgttcacacagaaacctgtacacaaacgttcatcacagtttcatttacaatagccagaaactagaaaccacccaaatgtccttcaaggggcgaataattaaactgtgatacatccataccatagactactccccagcaataaaagaaacaaatcattcgtgcaacaacttggatgatctccagggaataatgctgagtgaaaaacaccaatcctaaaaggttacatactatgtgattcaatatctgtaactttcttgaaatgataaaattgtgtaagtaaggaacatatcagtggttaacagggattagagatggagtttgggagagaggagagaagtgggtgtggttataaaagggcaacacaagggttccttatagtgatggaagtgaagcattctgtgccttgactgtggcgatgattacatgaaaactacagatgggatgaaatttcacagaactaccacacaatcaaaggactgtatggaaaatgagtgaattttgagtaagatcagtggatgacatctatctgaatatcctggttgtgacattgtggtataatattgcaagatgttaccattgggggtaactaggtaaggggtacacgggataattctgtattatttctacaactatatgtaaatctacatttatctcagttaaaaaaatacaaaaagaaacaacatatttgattaattaaatgttaattaagcatgaaagggtgaacagcggaagtgacactgtccttcactggacttcttccagtgcccaagttttcaaatagccaattcatcctcaaaacagtcgtgtgaagtaagttttaacattcctattctataggtacaaggaaacttgaggactggaggggtaataagttttgcaagtgttaggtaaagccccagtctcaaagagtgcaaagccagtgccctcatccttggcaactagggcgccccttctgagcaggccatgctgtctctgctgctgtcgctgctgctataccagccagccaagcccaactcttcacttcctgaggaggcagctccagggttaatatgccaaggccagtaaccatctttgtcttccaaatgggaagcgatgatcattcagagtggagaaccagcagttggcttctttgctaaacagaccataaagagaaaccatgcaaagagcattcagaaaacccaggatgcctcagataaaacagagtgaggtaaaattcccagcagcacaaagacattaattaaagtgaattgaatagatgtgtctgtataaatattcctaaagatggggttgtcaagacggagttaggccttggggaaatttatgagttactgataattatagggaaaataaatcttaaaaggacaaaatcatttaagaatagattttataaactaatgaaattggtggcttacaacgggtagatgggaacagaatagaaagaatggggaaatggcaaaggggtagaagataggatgagggcagagagacccttctctgagtgttcctctttatatagctctgactattggaacaatgggatcacatgccagaaaaactaaatatacaatgaaagccaatcaggaggcaaggggaacccaagatgaaatgcaaatagtaacaaatgagcctggctctattacaaatgaatacatagccacactgagggcagtaggaaagaaaataacctcagtaatatggaaagcagcattgtgattggatactgcaaggctaaggacaagaaaaggtgtacacaagtcctgttcactagttagtaatttgttttccacaggggtgtggatgagcaattttgaaactattttatgtaagtactaagattgagtaaatgattgtagataatggagccaggtttcttaagttgaagaaaggaattatgaataaaggagtggaggctaaaataaactctttggtgttgtattggaattggaggtttcagtatgaacagttttcaatatgtatacagatggatagttttagaaataagtgcagagtggtgtgtgtacacatttgaggatagatatagatagttgcagatataattaatataattatatatttatataaaattttctagctttgccttctaagagggcctagaaaccatgaaaccccagtagcaatgagtacagctagtccccttggtttctaaatgccattcttcaataaaagaaaccagggctccttggagaaatggttgattccagggctggggcagggagcttacaagataagcctgaacatcttgcagttctgaaagcaaggaaatgcttaaatgatgggagaatgtaaaaaagccacaggagccaacttaaaggagctttcattgggcaaatctgggataatttgaggaacaaaatacataatgagaagggattacaccccacagaataaaataagtacccatgaatccatattgacaaaaataaatgattagatgaatacagaaatgcaggagaaaggtcaatccttccttacggtagaatactaattaatattgtagaaagaatgtcagaaatagaaaataactattttacaaactaatttaacagtaataattgttacagagcagaatcatcaatgatgctaaaattagtaggtgaaatatgatgggaatcaggatatttacataatctcaaagtgttttcttacaggacacatattatttacagatacgcagggggaaatactaacttatgtggagaaatctagaatataccactcaaccaagtatcaaagttaatatgaccaaaatgaagacaaatcaacatcatgtaccctctgatgtaggatgtattgagaagagcacagcatcagttctgaggtattcttgcctaaggtgaataagcttaatctaatcatgagaaaacaccaaccaaactgagggatgttctacaaaataactgaccagtgctctttgtaaaagcccaggtgctgaagactgaggagctgtccttgattagcagagactgtagatacaggacaactatgtgcaatgtgagatcctcgattgaactgtggaacaatagggaaatagaaatgatgtctctagatcagtgttgaattaatgttagtttcctggttcagatcactgtaccatggttatttaagttattaacattagtagaagctgaataaaggatatatgggaactctttgtactatctttaaaacactcataagtctaaaattatttaaaaataaaatatgtagaattacaaaggaagacaattttcttgaagtcattatctagatatttaagtaaatttgttacagaaaaaaaaaaatcacatgaagccaaaataatagtaatgttatatgtgcatggctctttaaattttacaaaaagaattttacattgttatttaattgccaaaacaatcccatgaggttggcattattgccccctcccccattttagggacaaagaatttaagagatgcgtagtatggtaaaaacaagcaccaaaaacataaaaaaaaaacttcaaagccaggcaaatgggcctgctttcaaatccaagcactaccatttccagcttgtgccaaaccaattaagaaactttagagaaattctggcaattggcttttgagatttttgtgagaatataaaccctgtaaacagcacagagcctggcacattctgggcacttaagagaaaaggaagatgaggatgaagatgatgatggtactttagagctgaaaagcatctttgagttcagcccagaactcccctgctcccagcatagagttgatcacctcaaaagcggttttggccccactgtggacattgtgaagtgggtttataccctcacagattaattctgtttgagggagcccaacataaaaaaaaatctgtgcctgtccatatatgtagaatatacatatgtttgcatgtatttgtatattgaaagagttaacaataggtgcattcacaaaccaataatttctaatatcaagatgtctaaggaatgaataaggatgaggaggaaggactggtgatcacctggtagcaccctttgtgccgccctcagactcatcgctgatctgcctccagtgggtcttgctatcggtggatgtgcttgaaaaactttgcagcaattcgaacctgagatattttttcttgagacgcactaagaacttgaacacacctgataagttatgggataaggatcaggagggctggcatcgccccacccagtgccctgcatactgcagttcctcattgcatacttactggcatgaattaatgaggattttgctgagagtggttgttgctctgccaccacattctgcaccacactgctttgcacttgttggtttttcgtgtcttttttccccccttagatttcagtgaacttgcatttcctctgggactaggcttaaaaatcagcacatgagataaattgcatataatcaacaatatccttgaacatcccttaaattacttcatgcaagatgatatatttatacaactgatgtacacacactgcatctgtgtgtagacaatgtgcagacagtgtgttaaaatgtagagtgttggttaagatcatgggccctggaaccagactacctgggtttagatcttagtcttacaattaattagctttgtaagcttaggctaattatttaacctcttcatgccacagtttgttcattaggaaaatgagaatgacagtcacactcctttcatacaggagttaaaaggattaaagagagtatatgtaaagcctttggcacaattcctgagactcatatatgccactctttattattattgtacatttatatatgtgcaatatatacagcaatgcatacataaaatgtaattttaaaatagctcagttacataaacttgagcatatagttgagtaaattaaacacttgtctgctgtaatcccctcccaccaacctgaacattcctcaaagcagcaataaaacttaattttgtgctgattttaaagcccctctagttgctacgtggcttgcaccaggggctgctcccttacaactagctgaagcccagtgtctacatttatgaaggcagaaatgaatcttccaatgagtttagctgacatgcagtcgtgtgtgacatctttgcctcctgtcatagaggtaattgagggacccctaccttggatcagaagtcttatttaaactagaccttagacctcaggattctgctatgataccatgtctggttccacttgatggctattgggatgccatagtaactaggggaacatatgtgcaattatatctagtgaccaacctttgaatatgacctagaataatgaaactatgctttctatctcttcttctttcttcatctggatgtggaaaggacagtggcgacagtgggtgcagtggtggtggctgctttaacagcagtagtggtgatgtttgcactagtggcagtggtggtagtacagatcatggcagtaatgatggcagcagcattggttagttggagtgtggtggtaatgctgttagtgattattggcatagcaatgaggcatattagtggcagcggtggtaatatggtgttggtcatagtgaccgtgatggcagttgtctcgctgggcacggtaggatggtagtggtgctattaatgtgatagtggtagtgggaatcatcgtgttggtcgatgctgatcatgatttgatgatggtggcactgttggtgatggtgaaggacattgtgatttccgtaatttaggtcagtgttttaacctgaatttcagaagcaggaagttgatattggagaaaatgcccccaaatatctcatatacaccccaaattgtaaaatattttcctaagtctgggtaacatgggcaaagcatccaaatgaaagtaaccaattcccgtgatataatttgctgatagagctgactgagtatttcacaaagtgtggtcctgtgaacactcatccagcagagggatccataaaaactaaacaagcatgggaagcccagggacttctgtccccttcttggagaattactgtgcacattaagggctctcaaaggatccgcaatctgcagtaaaagtctgtttcactttgtttgccctcgtgtttcccaaacatatttgatcacttaaccctttttctttggggaaggtaggtgcctatcaatcattaggtagaacagttagagaaacaatataaacaacacttgaaataaaaagaaaaataaaacttgaaaaaagtttccccacagggactaattttcaggtgcttagtgagaatgggcaactttaggttattttaaatgtcttgtattgcaaagtggaaaagatcatcttaaatttacataatcagaattgtgtacaaggaatccattagacatgtaaattaagagtattattagaaacaaacctcaaaaatgaaattgcattaactacatcaaacatttacaatctaagaaacccatatccttttattctatacttataaaattagtaatttgatcattatagaaaagtagcccttgtttacgttggagcccagtgctaagttaataaaataaccttggatgactgaaaggaagtggtctctctatagccaatgccaatctgtggttctccactagcacataagaattgcctgggatgcttgtgaataattaaagtgcctaaacctcac

SEQ ID NO: 96609 - DNA, 15149 bp, Homo sapiens
tcagaaaaatcacttagattgctgatgaaataaccccaaactacccttgcagctcacattatagctggatatttttatcctaattctatttggttggaatggaagtagacagcctttaaatctggatggtcagctgtctcttttattttctttagacagaagagaatatgaatgccttcaaccaaagacaaaccagtctaagatgtttctaaataggctgacctaaatcactctaacttttccattaaccagataaaagttcaaggccagggccaagcatagtaaaagttattttccaatttctattctgcttcagatggataatattcagaaaactgtatttgtcattccttgtatgaccatactattgatccttttttatatcttggataaatgactttattctttcttgctattgaaacattaaggtagtgtcaccagtaataatcaatagtaaagcttcatgaagctttccaaggttctgataccagactttctctaatgatgtttttctgctctgaagtttgcaactcatgtttaagtattctaagtattaatttattaagtattttaagtattaataaagtggagatctaaaccacatcaggaaaacatactgttatttttacaaatgttgtgaaattcataatatgggcagaataataaagcagcttttagtctttttatacactatccagtctctcaggggctatgttacagaatttattaatggtctagtggaagaattattacaaatatgagcaatttgaaagtaccaagaagaatatctaaaccaaactgccaaaagaaagtaagtaaacattatgaagagaaagtgatgcataattctatattctataaaaggtgatgaagaaaatctttgagggctttcatttaacaggataaaaatctcagctatgaactactgaaagaaaaaaattacacacagacacattttacagcatgtttaagaaataagaacccataacttccaataacttatataacttctttctcatcctacagaaattggagctataacaagtcattttaattagcagattcaagcagcttcccttggatgaattacactgtcacatctgtagaaagaaaaaaatctaaacagtactttttttaaaccaatattctgttgcttatatattcttggaaaagagccataaattatttgtggtaaaataattacattcccaacattatatgttaaaacattatggtcacaagacatagaaacaaagtaaaaatagacccaactgcagacaaaaagtggttaacctaaacttgaatagcagtaagatttctggaaaatgggcaataaaaaagagggttacgatgttttcttacacaacactctcctgatataaataccgtgtctttctccctccagctctatgttgggggttgattttcttttctctcttcaattggccattatccaaaaggccagtacagaaagtttgcgtgacaagaatatgacaggtaatagaaaatgaatcactactttagatcagctgcacatacaaatatagcatacatggaatttctctctgtgtaataattcttttattctttacgccaataaagaattgagctgtctcctatccaacaaacacagcagtctgttacacaggctgcaaacaacatgagaaatgattttacttgttaagtgatttttaaaaacttaagttggtgtcttggtgcctacagacttcggtttttttaaaaaatcatagactaaattttgaggaatttatttacaaaatacacttgcacaatatttacaaacaccatctggaatttccagaaaaaggctataagaggattacacgcaacaatcccaaatggaaagtagaatcacattgaaagtgggctatattaaaaaggaaaaggctattattgtatgatacttaaagcttatggtattataacattgtttaagactgttctggagatttggtgcctttaaaaataaaaacaggaaagttcaattagaagcatagaaatcaaggatggaattaggtaacactggcagaaacaaggtgacaatgagcttgtaaaatgtagatagcagtctgaaaataggaaagagtaggaggaagctgctgaaacaggtagcagccagtgcttgccatggtaaccatgatgactggatgaacatccatcatggcatgaggcttaaaagagtccccacctgcacctttcttaagtttcagttagtggctccagcaacctgtagacattaataaataacctttcagtagactaaataagctagcagcagcaacaggcatgagttgacaaatctgttaagggctaagtttcaaaggggcttctgaaagatttaaggaaagaaaaagttattttatatacagattaacaatggtgcaaaaataatgatagtggaagttgcgccaagtccttagtgcacttttacacttagatctcatattcattgatgtcctgggtcccaagagacacactttcatgatgaaataaatattttcattataaagttctttcactttagaacagtgagaaacaatgtgacagcatggtcaccaccaatcttctagccccaaaagcactattctaaatgtattaacaaattggaaggattattacaccttcaaacaccactagaaaatgtacacatgaatttaacaaactgcagaaacacgactaacacaggaaaaagtatgaaaaaacaagaagtaaatcaaagctcacttgcagttatctcgtttaatctgtataacaatccaaccatatgaatgtatctctattttaaaattaggaaactgaggttttaatatgttacataactcctttattatcacacaattagtaagtataaaaggcataaaggcctgtttgctgtactaacttaatctccattactacacattgccactctcatgctccatgtgaaacaaagccccacgtaacccttatttcatgagtggcacacactttcaaattccaattctatttttccaaaaactgttttgctaaattaaattatgcatttattagaagcatgtctctagcttttcttcaacattagataaccacactagatagtgaacagctaaaatgtagacgtgtttcattagtctttgtaagtccagcacataaataggatctatattcaagttgttaggggatgagtggatgcatggatggatggatggatggatggatggatggatggatggacggatagatacaatacagacagtggcctgttttgatacatcatttgggttaggaaataaacaggtaagttatagcctgtatgccaaggtagggcaagggtgtctttcttgcccttccatgtggattctttcaaatcatatcttaatagttattttactatgtcactgataaataaaaagtttgcaaatatttcctttatttgaaggaaaacaggaagatgaaatctaggtaattttcacaaccaatttggaatgagatacctgaacttttatcatcctcaggatggaaattttgataaatgatgtgaagacctgacagaagacatgaagctgtaagaataatagggtttaaaaatggcagaaatcatattctgaagaatagcaatacctaagccaaattactctttaaaacaaaacacattaccccagtaataattctctatgtccaaaacacagcaatgcaaacaaatcagcttccttcaactattattgagttttccactatgtaccttaagacaataatgactctaattttatatatatttaattcaaaaacacttatttgatcataataagagtataaacaactcagtaaattttctagttcatctttcctgttgtagacagtctaacaaaaacatcaagataatttctatgagaactaagttccatgaattcagtggacgcttcatagcagagtactaggaggaaatgccaaagccattgtgcagttcagtcctgctagaatgctatccttttcctggtgcacgactgtcattaaccacatttcaatactcagctcaatgtgaccctctctggaagccttccatatctgctcaagagtgcccgctatgtttgtttctgtgacagcatgtatccattaccatatatatttgcatgcatggttgtataccatatacagatgctcctcaacttacaatggcattacatcctcttaaacccatagaaagctaaaaatatcataagctgaaaatgcatttaatacgcctaacctgccaaatatcacggcttagctttgcctactttacatgtgctcagaacactcacattttgtctacagttggacaaaatcatctaacatgaagcctattttataatacagtgttggatatctcatataatttatcgagtactgtactgaaagtgaaaaacagaatagttgtatgggcattcaaagtatgttttccactaaatatgtattgcttttgccaccgtaaatttgaaaaatcttaagtcaaaccatcaaaagtcaaagaccatctgtatatctgtacatatagctgtctcccccactataagaaaggactgcattctactaattgttgatctcctgcacaaaatacacactattttaataaatggcaaagaaaacaaagaattaatacactgcataccctgctctaaaatcttgagggtatatcgagcaggacactgctctaaaatttcattcctcttaccaaatagatagcaaagagaaggatgaacattatcataacagctaaaatatataaaagaatttctcaaaactagaaccattccctttttcattcaacaaatatcgtttaagcaatgactatgtaacaggcagtgttctgggcacaggagacagggcagggaaaaaaatacacaaatatccctgcccccatggagtttatattctaatattagaagatggatttagagaaaatggtactatctagtgtattcggtggtgatcagtgctaaggggagaagttaagaaggaaaggaagttggggcatgccaggttgggggtggggactgcaatgctggatagcatcaccagggcaggtcgccctgagaaggtgacctctgaggtgagggagggacttttattagttgaaaatccctttttcttttgtttaaaaattcattggttaaaaacattacattctataaggtgttaattataaacagaactccacatacatcaccctgtctaggctttcataatgagattttacaacctagtaaatttagaaatgatctaaaacagagctaatgggaagccactgtctcatgacagtgggcagatctgtatttctttgcaaggtaaacattttttttcttgatcatcacaattcaagtttgttttagatgctgattttatttacttactgtggaacatcatctatattcttttaacatcaatacaataatttatctcttttaagaaccaatatgttccagccacagttctaaatactcaaattatctcatgcaaatcatcacgacaactctgtgaggtaggtacattgattgtccagatttcagagataaggctgggttacagagattaagtaacttacccgaagtcacttagagggtaaataggacaactgggatttaagaccaggcctttctcaaaacacaaagtccatgatcttaaccacaacactgcattgcctcaaagataagagcggttatgtcatacagcatttcaatatgcctgcttactaactgttcaaatataaacttaataagaaagtgacctaacaaaagttttttcttctaattcaaacattaagcaatatgaactcataggagcaaaatacagctcctatttttaaagaccatcttgggaatctattacataaacactgagtagtgatgccagggtctttacgatagggaaaaggaaataaaatgtactgataaaagtaaaccacatccttctgtctctaagaatgtctctagtctcagggttgttccttttaaattaaaccaacatggccctctctcacgggtcggtgttacatggcggtgactgcggcaaagtgagggcctcagagacaccactgccgccagcacagccagagacctgagctgacattgggggctgtccgcggggcctgcactctcttgatgagtcagagaagtcccgttgtatcagagtaagatggacagtagctttgattttaattgtggtgagctggagccacctgttcattaacaaaggacatcttctgttatccaacagccgccaggggttcctgttgaaatatatagcaacaaaggaagaaaagaagcaaaacgcaaatagtgcttaccagcaccttagaacgatgctgctcaggaccagtccaacactgaatgtatctgcactgtgaggagaatgttcatagaagcctgttgtgtgcatatttattcacatttttgttaaatgttaaatcgtttagcagagtaatctgagtgcatagtatgtcatttcattctgtttgagtttcttgagtgtcttctttaaatgtctgcagagttgctgcccctttcttgaactatgagtactgcaatcttttaaattctcaacatgagtagagctttttgagctttaaacctacggggaaatcaacaggcctgtttggcagaagcaatgaacatcaagaaaccaycttgctgtggaagcataattatttttcttatccctttttgaaagatctttccttttgatgccagttttcttccttgtttacacaagttcaacaattccaaaggaaaaggcaatcataagggtttcaaagtggcagagaaatttgaaagtctcatgaacattcatggttttgatctggattctacgtatatggacttaaaaccactgggttgtggaggcaattacttgtttttttctgctgtagacaatgattgtgacaaaagagtagccatcaagaaaattgtccttaccaatccccagagtgtcaaacatgctctatgtgaaatcaagattattaraagacttgaccatgataacattgtgaaagtgtttgaaattcctggtcccagtgggagccaattaacagatgatgtgggctctcttacggaactaaacagtgtttacattgttcaggagtacatgaagacagacttgtctaaagtgctggagcagggccctttactggaagagcatgccaggcttttcatgtatcagctgctacgggggctcaagtatattcactctgcaaatgtactgcacagagatctcaaaccaactaatcttttcattaatactgaagacttggtgctgaagataggcgactttggtcttgcacggatcatggatcctcattattcccrtaagagtcatcttttgaaggattggttactaaatggtacagatctccatgtcttttactttctcctaataattatactaaagccattgacatgtgggcwgcaggctgcatctctgctgaaatgctgactgttttgtaaaaccctttttgcaggtgcacatgaacttgaacagatgcagctgactttagaatctattcctgtygcacatgaggaagatcgtcaggagcttctcagcgtaattccagtttacattagaaatcacatgactgagccacacaaacctttaactcagctacttccakgaattagtcgcgaagcactgaatttcctggaacaaattttgacatttagccccatggattggttaatagcagaagaagcgctctcccatccttacatgagcatatgttcttttccaatggataagccaatttcaagccatccttttcatattgaagatgaagctcataatattttgcttatggatgaaactcacagtcacwtttataactgggaaaggtactatgactgtcagttttcagagcatgattggcctatacataacaactttgatattgatgaagttcagcttaatccaagagctctgtctgatgtcactgatgaagaagtacaagtcgatccctgaaattatttggatggagatcgggaaaggtatctgggggatcctgctttccataccaattactctgctgagccttgttggcagtacccagatcatcatgaaaacaaatattgtgatctggagtgtagccatacttgtaattacaaaacgaggtcatgatcatatttagataacttagtttggagagagaatgaagttaactgttactatgaacccaagcttattacagatctttccaattggaaagaacaaagcaaagaaaaatctgataagaaaagaaaatcaaaatgtgaaaggaatggattggttaaagcccagatagcgctagaggaagcatcacggcaactggctggaaaagaaagggaaaagaatcagggatttgattttcattcctttattgcaggaactattcaatttagtttccaacatgagtctactgatgttgttgataaattaaatcgacttgaatagctcagtgtcccaactagaattgaaaagtttgatatcaaagtcagtaagtcaagaaaaacaggaaaaaggaatggcaaatctggctcaattagaaactttgtacccatcttcttgggacagccagtttgtgagtgatggggagaactgttttctcataaatcagttttgtgaagtaagaaaggatgaacaagttaagaaggaaaacacactagttacttagacaagttcttcagcaggaaagaagatcctgaaatgctagaaactgagccagtagaggatgggaagcttggggagagagaaatgaggaaggatttctgaacaacagtgaggagttcctctttaataagcagctcgagcccaataggcatccygcagtttcacagtccagttgggtcaccacttaagtcaatacaggccacattaacagcttctgctatgaaatcttcccctcaaattcctcatcaaacatacagcggcattctgaacatctgaactaaaacactcagcagacatttatctttgtattcttatgaaatgtattttgtcttttttattactagagtttaagtcattttttacttgaatcagatggtgtcatttagtaaggattttatgagtacttggtttttaaaatccagactttctttttctacatgtgagatagttttcattttaactgacatgtcatttgcaaaatgaatagagcaaaataatgcaatgcaggaggagacaaaagaaatgcactaagacaagtgaagaccatcctctcatagaacaatgatctgttttacaggaaacaaattttgccttgaaatttacagtgagactgtacataattgcatgaaaatatctatttttatcctaagacatttttcattcatgagtagtttcaagtttttcatactgtacacatttcgtaaaacacacgataccagaagcaactgaaaatgaatgctgaatttggtatatgtgtgttatctacctcaaagtaacaaaaatatgcggcaaaacataccacccatagtgcttcacaaaacgcacttctatttagccagtgtgtattgtagtaaactattcttaataagactcattcactgtttataaatgttctggtattcattctttatagtgaagtgttaatacatcacatcttatttattttagcaaatcaatatattttctgtatttaattataaaaattaacttagtttttaaaatttatttgcaaatacactttttccatttggcactatggtttgttgcctacctagccgaatctatgtcagtttatcctaaggcggtccacatactcattttaagtaacgtgctcactgtgtataggaatttgtattttggaggtgcttgatctagctacaaagaaaaattaattaggaattactttattataaaatgctctagaagtcttaattgtgtttattttttttaaaaaatgaatgttagaattgtgtgcatggaagtaattaaggtacatcattattatagtttaaaagttgtacatgataagacattttgttttcactgaatgatctattccccatcccaaggcaagcatgaataaaattaggttaaatgtagcatgtggcgtcacagtctcttagaatttgtttcatctattttattttattgaatactgtctatatctttggttatcctgtttgaagtaaaaggacaaataaaacatggccagcaaaaaaaaaattaattaattaattaattaaatcaactataaaagcaagaaatgtactattaattgctagatcagttgtggcaataattaattaaaactaaagattaagaggtaatataaaatgttggcgttagcacacacaatggtatctatttgtcatttcaagcctttatgatctttctagaataaaagacatttttctatgacatgaacaaattatctcaaagccagatatgtgcttggtgaggagagaaaaatggtcttcttaaatgaaatgagtaattctgtgttctatcttcaaattcttttttaagcgtgttgaaaattaaagcataaactagtatctatttttacagaagagatttttgggtatactattctgatttgatatactattctcatttgataggttctaaactgatggatttcaactcaaatattggttttccttgaaaagcacagaaattaatactatttttcccttaaaatagtttaacacgcatttgattctcattatttgcagtagttatgttcaataaagtcactacaactctagattaacagatattgaaccactgaccctatgggaaatactaggtttaggttcctgcaaacctctggtcacaacatctttgtcaattaatcaacatataatttcattttatgtgtgcttctgtttaaagaatatgtgtatatacatatatattaacaatatatatgacatatataacatcacatgttatatgttatattcttaataaaacatatacatacattctttaaacaaaatgtaagtatacttgattcattaacactgaactcagggccaacagcactatagctcatgcctgaaggaagcctgactaatacacatattttttcaataatgcacatcataacattttacttttaggaaaaaaccagacagcacttccgcacagggggccgctgtaaacagtgagatcatcaacaaaaagtacaaaaatgcaaaaccacgtcatgaaagggtgcttgtttattgcatgagagctaaaacaagaagacagagcacagccaggttcaaccttagctgcgaatgtgcacattgggcaactccaatttttcacatgtgaaaaattacatacaagtattgattttggagtcacaaataaatgttagtgagtaggtaaattagcaaatactgaaaccatgaataaggaagatcgaccctataaaatgttaagtacatacatgtagtgttttttgttatgtgaaaatatgctaaatgtggtggtgttcaataatgtcagcaaattgcagtaaagattccctgacacctgaaaatgcgacctttcacctcacagtgacctgtcagaatttccctccagttcaaggctgaataatgtcccattattatatgtgtgtgccacattttgtttatccattcatccatcagtgaacagttgggttgcttccactttttggctcctatgaataacgctgctacgaacatggtgtagaactgcttcacaattgtattgttttcggccgggcgcggtggctcacacctgtaatcccagcactttgggaggcccaggtgggcggatcacttgagctcagaagtgaccagcctggccaacatgatgaaaccctgtctccaataaaaatacaagaaaattagtcaggcattgtggtacacgcctgtaatcccagctactcaggaggctgaggcaggagaattgcttgaacccaggaggcagaggttgcagtgagccaagatcacaccaccgcactccagcctggatcacggaaggagactctgtctcaaaaaataataataattttaatgttttatatatcatatgatcacattgcttgtggctaattaaagagtacatcaagctccccaagctttatcagcctacagacaaacatggggttacaatgatgacaataatccacattttactactggctatttcccttacttactccgatgggaccccggcctccttcctcacccaaatatttcctacagaatgtctcacatatgctcatattcgcctctcccttcaactacccccagtccaccactgtacaggaaagtaaagttcctgtgactcacctgttcactccagaccctcaattactccacacaccctggggccttaaggcaatgccataaagtgattctctcctctcccttcattatatccactcccttgttccatagcaaatgacaatgaaggagttgatccaacaggctagggtgttgcctctctaagaggagaaagagtaagaccacaaatactcaaacggtaataatttaaaattgttgtgacatccatgaatgatgataaggtagaagtgtttattaccaagggaaggttgaatttccttcaacattcttcccttcctactgtggaatcttagctagatctatgataaaaagctctgtctacttagatgatactcaatctacaaaatctacaaaaaggtttacaaacagttctggtttctggcttgtccaaggcagaacatgcatgagaattctttccctgtgactggaagatttcactagcttctcattcactcacacccttctgacgttcggaggtgccctattggaaaaagtgcccttcacgtcaagattcctgaatacgtaattggcatttactagcacttactgtatgccaggctgaaggttttatctccttaatcctcagaatatccttatgaacgtttacatatgaggaaaagtaaggtttgaagaggttatataacttgcctaataggaactcaaactgggactcgtgttcttcaatgcatttcagggtttcatttgtaaatttaaaaaaaaaaatccaaatcagatttatttctttctttaggatactttctttttgtgttctaagtaaaacggtctttgtattttactaaagagggcccccagctgtgcatacatgagctagagattttccccagcaaaacctgttattaacgcatctctaatgcatatctaaaatcattaaaattatacagtttcttttagtactctttcttttctttctttccttttttaaatttgaatgattaaagtttaattcttggacttaacctctgccaacagtcttctcttccttcctacctcagctgctcagtcccatggttactccctaggacctgactcgagccctcactcttcatccaacatcatttccagagcttgttactgtatccacccacgcttttcctggcacacacagacaaaccgcaacagtggtttgaccctgtcctccacttcacttactgcacccaagcagctgaacatgatcccacaccaggctgacagcgcttagagtcctggtcacccggctcaggtgtgccctaaatgcaacttgatattcacactgctgcatttctctagtctattccctttcccacgcccctgttcaagcatttcatacctttcctctagcctcagacctccataccctctccatcttgattctcagctgacgacctaacttcatattccactgggaaaatcaaaataatcagaaaataatttctagaagtgccaacctctgcccctactgcattttatggataaagtggcttgtatggataaactgacctgctctgagggaagcccagctcctcacgccatcccaccccatctcgcatatataaggacattgctccagtaattctcctctctttttttgcatcatttaatcttttctctcagctagattattctcctcagcccacagtatatatatatatatttttttttttcagacggagttttgctcttgttgcccaggctggagtgcaatggtgcgatctcagctcaccacaacctccgccttccaggttcaagagattctcttgcctcagcctcccgactagctgggattacatgcatgcgccaacaagcccggctaattttgtatttttaatagagacggggtttctccatgttggtcaggctggtctcgaactcctgacctcaggtgacccacccgcctcagcttcccaaagcgctgggatgacaggcgtgagccaccacatccagccagcccacagtctttctcctaaaaaagtcatttcacttttttaaaaaagctgtagcttgaccccagcatccctctccagccactgcttcattttttccctcctctcgtttaaagggtttgttttagatgctgattttaaagatcaaacttgctaatggatcggcaatagtattcttttaatattaatatggtaactagcatctattaagtgctaattatgtgctaaccactgtgctaaactgtcaaggaaattgtcacagcaacctctctactgctcccctgatgtctgactttttttcctgctactcactttcccctcactcccttcccaccagctggaatgtgtcagctgttcgggaatgctcatccctggaatgtgtcaggtgtgtctcttcctcaaaacctttgcatttgctgttctttcagcttgctctgctcttcctccagatatcctcatggcactctcttcaaaaaaaaaaataggtccagatacattgccctagcaggattttcaagtgttcccaagacctttttcaaaggtccatgaagtcaacactattttcacaataatcctaaaatacacacagcttttaatattctgcaatgcactcataaagctccaaagaacattttttaaacctgaatgtagaatcattttaccagtttttatgagagccaccaagaaataccagatttttcttcccataatagctaagaacatatcactccatccccttgtatcaactacaagtgaacagataaataaaaacgcagataacctgagattctacactttgaaagtatttcagcagatacctggtttaacccgagaactgtttcaagtacatgccgtttattcaatcttcaaaaataatttggattttatgcctgaagttggccgtaactaaaactgccttaattacatc

SEQ ID NO: 96610 - DNA, 66166 bp, Homo sapiens
  misc_feature (1)...(66166): n = A,T,C or G
gtggtgcgatcttggctcactgcaacctctgcctcccgggttcaagtgattctcatgcctcagcctcccacgtagctgggattataggcatgggccaccatgcccagctaatttttgtatatttagtagagatggggtcttgccatgttgggcaggctggtcttgaactcctggcctcaagtgatccacctgccttggcctcccaaactgctgggattacaggggtgagccaccacgctcggccaagtcattgaatacttcctgtgccttgaggaaaaaagactaaggccccatccctgctctgaaggagttcactgtctaaaaccagcaactgacaccaaaacatgatgtagccagagtccccaaaggaagttacttgcagaacccaagagcctctaggaagactagtgaagaggaggttgggatgatgattaggccctaaaacattggtaggagcacttggagcttctgaaaggagtaggatgaccaactgttccagcttgccctaccaactcctgattttaacaaagtcctgtgttccaagagattcctcagtcaagggaaaactgggattgttggtcaccctaggaggaagggacactgactagtttctttggaggaaggagggcattgaggtcactgggatcagtcctgaggcaccattcatttccctttggggtgtgacagggaatgatgacctttacacgatttctgatcgagccctgaggagctgcaatcaaatttcttgagagtgtgggaggctggtacaaggatttgtaatcctgggcctgcttaagarggtaacgtgtaagaagtggcagtggtggagaagcagcctgggagagcagtccagcccagaatctaagatgtagcagctgggtcagatgaaagataaggccaccaggtaatgcagcacacagcagcagtggcctctgaatcaataacaatggactaccccaaagaatggaaatcagtacatcgaagagctatctgcattcccatgtttattgcagcactattcacaataaccaacatttggaagcaacctaagtgtccatcaacagatgaaatggataaagaaaatatggtattacacataatggagtactattcagccattaaaaaaatgagatcttgtcatttacaccaacttggatggaaatggaggtcattatgttaggtgaaataagccaggcacagaaagacaaacttcacatgttctcagttatttgtgggagctacaaattaaaataattgaactcatggagatagagagtagaaggatggttaccaggggctgggaagggtagtggacaggggtgaggggtagggccgggggaagtggggatagctaataggtataaaaaatggaaggagtaataagatctagtatttgatagcacgacagggtgtctatagttaaaaatcacatttttttatttcaatagcttttggggtacaagtggttttgggttacatggatgaattatatagtggtgaattctgacattttagtgtaccagtcacctgagtagtgtacattgtacccaataggtagcttcttatcacacacccccgtcccaccctcccatttctgggtctccaaagtccgttatatgactttgtgtacctttgtgtacttagctcctacttctttggttttccattcctgggttaattcacttagaataatggcctccagctccatccaagttgctgtaggacattatttcattcctttttatggttgagtagtattccatagtgtgtatatatatatatacaccacattttctttattcacccattagttgatgggcacttaggttggttccatatctttgcaattgtgaattgtgccataataaatatatttgtgtaggtgtatttttcatataatgacttattttcttttgggtagatacccagtaatgggaatcctggatcaaatggtagatctacttttagctcttttaaggaatctccacactgtttttcatagaggctgtactaatttacattcccaacagcagtctgtgttcccctttcaccacattcacaccaacatcgactattttttgatacagtcaatttagttgtacattaaaaataagagtataatttgattgtttgcaacgcaaaggataaatgcttgacataaaggataccctatttaccttgatgtgattatcatgcctgtatcaaaatatctcgtgtaacccaaaaatatatacacctactatgtatccataaaattttttaaaaattaagaaaaaagaatgactgaccagctatcaaaggccttagaagcctctgagccctgtgccttgttgcccatatactcctttcccttagagaagagcagggttagaggtgctgacagagaacaaagcaagtgggagaaacaggtatctctttgttctcccaggcctctcctactcaacagtgaaataagatcttgatttttatctgagatctttatgtttgctttacccaacacccagcacctgaagttatgtgcaaaattttgtgtgtataagcatcttcttgggaagatagtgttcattatggcctcaaagttgttcaagatctgaaaacaatttgagaaacactagattaagtggtttctaaggcccctgttttcaaattctatgatttgataatactcaatataatttatttgaatttataaaaaggatcattaaggaagtgtcaggtttcaagaagccaagaaatatcactttgagaaatatactaactattaacatcaggtaatacaaagccgttttctctgttgtgaatggggaactgatatggttactattatgtgtgaacttggctaggctagttagacacactgtatgcccagctgttcggtcaaacaccagtctaggtgttgttgtgaaggtatttcttagaaataattaacatttaaattagtagactttgagtaaagcagatcacccttcataacctgggtgagtctcatacaattggttttaagctttaagaacaaagacaggtttcccaaagaaggaagtctcctcaaaactgcaacatggaaactcttcttgagtttccagcctgctagcctgccccacaaatatccaggacttgccagccctcacaatcacatgaagcaattcctgaaaataataaacctctctttctctttctctctatcctattgtttctatttctctgtagaaccctgacaagtactggacccattagtcatttatttcgaattacaataattcacacacacacacgaccaaaatggccagcactggtgaaggcagtcagtccttgaggccacttggaacaaatcagtactgttgaacagggtacaaagaaaaaaaacatactcttccaggtgtatgttccaagcttcacgttgtatggccaaagagccaattttgtcaaattgtctgaaagcaagttgattaacacgacaatttggtcaaaagaatgacttggccctgtgcagtggctcacgcttgtaatcccagcactttgggaggccgtggcgggcggatcacgaggtcaggagatccagaccatcctggctaacatggtgaaaccccgtctctactaaaaatacaaaaattagctgggcatggtggagagggcctgtagtcccagcaacttgggagactgaggcaggagaatcgcttgaatccgggaggcggaggttgcagtgagccgagatcgcagcactgcactccagcctgggcaaacaagggcaaaactccgtctcaaaaaagaaaaaaaaaaaaaaagaatgatttggctgggcacaatggctcacacccataatcccagcactttgggagacaaaggtgggaggatcacttgaggccaggagctcaagaccagcctggccaatatggcgaaacagagtctctacaaaaaaatgcaaaaattaggcgggcgtggtggttgtagtcccagctacatgggaggctaaggcagttggatcgcctgagcccgggaggtcgaggctgcagtgagctgagatggcaccacagcactccagcctgggcgacagagcaagaccctgtctaaaaaaagttttgattcaaaatgagtatgtatgtatgtatgtatgtatgtatgtatgtatgtatgtatgtattttgaggnnnnnnnnnnnnnnnnnnnnnnnnnnnnnnnnnnnnnnnnnnnnnnnnnnnnnnnnnnnnnnnnnnnnnnnnnnnnnnnnnnnnnnnnnnnnnnnnnnnnnnnnnnnnnnnnnnnnnnnnnnnnnnnnnnnnnnnnnnnnnnnnnnnnnnnnnnnnnnnnnnnnnnnnnnnnnnnnnnnnnnnnnnnnnnnnnnnnnnnnnnnnnnnnnnnnnnnnnnnnnnnnnnnnnnnnnnnnnnnnnnnnnnnnnnnnnnnnnnnnnnnnnnnnnnnnnnnnnnnnnnnnnnnnnnnnnnnnnnnnnnnnnnnnnnnnnnnnnnnnnnnnnnnnnnnnnnnnnnnnnnnnnnnnnnnnnnnnnnnnnnnnnnnnnnnnnnnnnnnnnnnnnnnnnnnnnnnnnnnnnnnnnnnnnnnnnnnnnnnnnnnnnnnnnnnnnnnnnnnnnnnnnnnnnnnnnnnnnnnnnnnnnnnnnnnnnnnnnnnnnnnnnnnnnnnnnnnnnnnnnnnntacttgcagatcaggaccctccccgggaaagctccaggcccaggaacctaagccgcaagaatctcgaaatttccacaggacaccttgttccttttggccaagtgtctggatgagcccatccccttgggcagcaacaaaaggtaaagggtctctgtgaggctttcagattccaaaaaaaagcaaccgctggagtggagtgtgatggtcaaagcagccaccttaagctttctcctttctttcccactagagggctgagaaaagtcttcttccttgcgttgtatttcatttggcaaatatttaccgctattgtgtgcaaactttaccaggttttctgggaagagaagtcgtggggagctctcagtttgttaataaatattaatacttttggccaaattttgaattttttatgtcacttgttttatttcatttttgaaaaacagcactttatttcatttaactctagcatattcaatggctgtgcatttaataatactgaaataaagtcgcacccaaaatgttagcaaaaaaatggaaactatatatggtagtgacctctacaaatgttttaagcttgaaaaattctgcacgaacgcagacacaggttagtctgccaaagttactcagataaaaatttctccaaccctcaagtcataatcatagttgagaaatgaataaatgtgccttatggcacctccaaactttttgagatttttatataaactagcctatacttctctccttacgattagcatatggggtagctatttttctttaacagagattcttcaaatgtagctagggttaagagaaacgctggcgctgcctctcaggaagctggagaagcaaaagaaaaaattaagagttaagggccgccgggctcggtggctcacgcctgcaatcgcagcaatttgggaagccgaggcgagcggatcacgagatcaggagatcgagaccagcctgatcaacatggtgaaaccccttctctactaaaaatacaaaaatgagccgggcgtggtggagcgcgcctgtaatcccagctactcgggaggctgaggcaagagaatcgcttgaacccgggaggcggaggttgcagtgagccgagatcgcgccaccgcactccagccggggcgacagagtgagactccgtctcaaaaagaaaaaaaacaagagttaagggccaagtcaatccaaccgcggccggcgactggaggctgagcatggctggcgatctggggctgcagatcacggcgcaaacccgctcacctccacccctcccgcgcggccgccggcgcgcgcccgtggcgtcacggcgtcggggtggagccggcggcaggggccaggcctctctaggctctccggctgagccgggttggggcccgggttgggccgcccggggactctggagcattgggatttgtagcgcgccctctgggtaggcggctgtagcggagaggcgtgcgggatcgggatgtcggggctgctcacggacccggagcagagagcgcaggagccgcggtaccccggcttcgtgctggggctggatgtgggcagttctgtgatccgctgccacgtctatgaccgggcggcgcgggtctgcggctccagcgtgcagaaggtgacttgggggcgggcgtggggcgcgggtctgactgggtttcgctgagtcccggggtccggcctcgggaggcgagcgggcaggccccacctaccgccctggacgcggccacctgcagcacccgcgggccctggggccagaacggcgcgcccagaccggctgagtcttcgcgttccctccctcgtctgggctgaatcccgcgcgcccttcctgtccaggctgagggtgccaggggcccggtgtatgacctgggccgctcgcttgcctcttgccacctggggagccacctgtccggccttacctggatgggactgaggtgactcgccggacgggactgggcaggctgtgcannnnnnnnnnnnnnnnnnnngcaactttttgctgacatgcaggttttctgctataggatcccctactatagcctttggacttgtgcctcaataacttttcatatctttgtagaatttaagtttattctctattcccacttgtcatctttattaactactactccacaaaatgctggttccttacgtgagcaactgattgccgtggatattagaggtattgggcaagttttgaaggctgtgtggtcatcagttttctattttccatctttgagaattcataaaattctttatttcccctcgtttgagagacctgccaaatcattggttggttgttagtaaagccttgaattgttgataatattggtcagcaaccaacaaattgatatccttctgttctcatattaatgaagtgttgatttatacacaattgtcaatgcaccaaaaataatatttatttgttatggtgttcttattgttgttcctttttttcttttgagacagggtctcactttgtcacccaggctggagtgcagtgctgtgatctcggctcactgcagctttgacctcctgggctcaagtgatccttccacctcagccccccaagtagctgggactacaggcaaggggccaccatgcctggctaaatttgtttgtattttttaatagagatgggattttgccatgttgcccaggctggtctggaaattcctgggctcaaataattcacccgcctcggcctccctaagtgccaagattacaggcgtgagccactgcagccagcctgttatggtgttcttattttctcttcccagtaccaacatctttttatgttagaaatttgagggagggccggagccatcagttacctaaccattcccagcagcactgtattccccctttttctcagtgtcccgttcttcttcccaccaccttagaggtgtttttctttgtagcacttgcccaggagcaaggtccagctagagtgccagtgagtagtgactgctttgagcatttgttctggggaaacatcagacttccttccattaagtttttcttttttttcttttgagacggagtctcgctctgtcacccaggctggagtgcaatggcatgatctcggctcactgcaacctctgcctcctaggttcaagcaagtctcctgcctcagcctcctgagtagctgggattgcaggcacccgccatcatgcctggctaatttttgtatttttgtagagacagggtttcgccatgttggccaggctggtcttgaactcttgacctcaggtgaaccgcctgcctcagcctcccagagcactgggattataggcgtgtgccactgtgcccggcctccattcaggtttcaggaccaagacagtggaactgggattgtagcagctccctggtcccttctctggctagctgtgtgggaacactgcccacccacccacacactatccctatcccagcctgaaaagaaaaatgaaaggcagacaccacccttcagtgactgggtactcattacctttctaagagtatttatcacaaacacgatactttttaaagtctcccttataattctagacacaaagtacttttaagcactgtttttttgtttgtttttgtttttcttttaaggaattgaaatatttggaaccaaagggagaaatgaattactagaaaatgcaaagtttcacagttaatatataatttggggcagatcattagtttttttaggaatgaagtgaggaatctcaaagatggatcaagattgctgtgagtggcaggaggccaggaagatttgcacagactctaaactgtggaaaatgtgtctggataaaagaaagatatgagtaaataaaaatacaaaaaaaatgcctgctcttcccrgataaagcacagtcgtagattaagaaatgtgcagcaatgcctctctgtgtggtaggagtttatagcagtactgcttaaagtgtagttacggggctgctgggattgagataataaaagaaaactaagcatttagaaacttgtgtagcaacttagcagaataattttatgtctattgactctagtaatgaaacgtttgggattttattttgtatgccttttttttctggaaactttataaaaattattgttatttttagagacagattctaactctgtcccccaggtggcctgatcacagttcactgcaaccttgaactcctgggctcaagcaatcctcctgcctcagcttcctaaagctctgggattacaggcacgagttactgcactaggactagaaacttaattgtatcttaaaaattgctggtccacaatgaatataattttttttttttttgagatggagtctcgctctgtcgcccaggctggagtgcagtgactgatctcgattcactgcaagctccgcctcccggcttcatgctattctcctgcctcagcctcctgagtagctgggactacaggcgcccgccaccaagcctggctaattttttgtatttttcatagacatggggtttcaccgtgttagccagggtggtctcgatatcctgacctggtgatccacccgcctcggcctcccaaagtgctgggattacaggcatgagccactgcgcctggccaatgaatagaaatttttwaaaaaaacaattagcaactggtcctttactgcagataatttgagttttttgggaacaaggatcttgttggtctacattgctgcttagtacctggtttattacctcattgttacagaataaataattgaattgcagttaaaatgttaggaattcatggggctctatgacttagacacagaacttgattgtgtttattctgtcaagtgaaaattacacctcttgtaatattccaatggaaagaatgtataatagaaacctaaaacctcttagtgtatgatttgattatactgggaaagaaatttttaaaaaagaaaaaataaagagattcccctttgtagacaagaacaaaataggctgtgagaagacgtcaatcttacttcttgtggcctttattttttaaatgtttaacagtagagatacatttttagcttttttctgtaatttgtatttttaaaaaatctttcttagggactcttaaatatacaaattaactactagaagaatattttgtgttggaaactccacatatgaacatttgatattttggtttgaaaaatggagaatatttatcatgttccccagtggaacatcatgccattatgagaaactataaaaaatgataatgtcttggttggaagaacaggacagaaaggtcactccaaagagtaatactgtgtactctatgtacatgcttgaaaaacagactaggtggttgttgtcttttgtttttaataaaaaaaaattaacttttattatatacttgatctaattttggtttggttctcctgtaaaagaacagatttcactactgcaacttgtttggggatggtatgtgacatcctgattggtaaagtggggggaagtgaccctgagtcaagtctgaaggtttatagccttgaaataatgatatccacattgagttttctggggtaagaaagtgtttcttgtagttaaactattacagtctgtagtcataaaagccttgcctagaaagggcagaagtattaattgacagaaggagaatagattgtgttaaatctgtttttttgatgagctcactggggaataagagattctttttccacatcaccttgtgtaacacttatactccccatattgtcactgtatcctcagagttccttttttctttattttggccttttcatactacatgttagaaattttccttaactagtgatcttgattggttatctgcatttttttggtaccatgccttgccctggcacttaggtatatctgtcatttgcaagtacagaactctggttcaacccctccagaaataaatctcttacgttctctttctgccaggttagggaggggcagtgatctggctggaggaaaggaattggggctccttataaagactttgaaccagtcctacgtacaaccccatctggcatcccagctttcagaggaacctctaatttccagagttccaccctagaatctctgccctttgcttacgggcatcactctcatagttcactcatatgttcattcatatactcactttatatttatggaatatctaagaaaccataggcacttctagatgctggggataaaatgaactaaggagacacattccctgccctctaggaactcacattctgaggagaagggtagaggtgacctgactctggtcttataggccattataaggaataatggttttactctgagtgaaatgggagccaaggtgagtagaggtgcagtgtaatctgagcaggcagtgaggtattggcatttcctcctctgtcctaagccatgtaccatctgcccactcactgttcgtattaaaaacatttgttgccagacgcggtggctgacgcctgtaatcctagcactttgggaggctgaggcgggcggatcacgagattaagagatcaagaccatcctggctaacacagtgaaaccccgtctctactaaaaatacaaaaaattagccaggcgtggtggcgggtgcctgtagtcccagctattcaggaggctgaggcaggagaagtgtgaacccgggaggtggagcttgcagtgagctgacattgcgccactgctctccagcctgggcaacacagcgagactccgtctcaaaaaaaaaaatttgttaaaatctggtctgatcctatttgctcttctctttgtccttgtgcatttaaaccttgttaatgttttccttttaatagactgggaggaattggagatacatgcatatgtttaagccatcattttgacttgaagccatagatttttatgaaatttgtttattgattgattgattgagacagtctccctctgtctcccaggctgcagtgcagtggcgtggccacagttcactgtatcctctacttgctggactcaagtgatcctcccacttcagactcctgagtagctggaactacaggtgtgggccactacaccctttttgtatttttgtagagatggggttttgccatgttgctcaggctgatcttgaactcctgggctcaagcaattctcctacctcggcctcccaaagtactggattacaggccactgcatccagcatacaaaatttattttattttttaagttaaagtaaaatcgacttttggtgtrtagttatgtgaactttaggacatgtgtagaagtaatccccaagctcccttgtgttactttattgtagtcacatctccccactcacctaacctctagtaaccactgatctgttttccgtaacacagtcttgtctttttgagaatgtcatataaatggaatcatacagcaagtagccttttgagactggatttttttcagcataatgcctttgagatttgtccatattgttatgtatatcacttgtttattcttttttatttctgagtagtatctatcatatggatgtactacattcattcacctgttgaagtacatttaggtgatttctggtttctggtgatcattaatagagctgctataaacattagtgtacagattttaaggggaatattaaaaagctttgaaccagtcctgtgtacaaccttatagggtaaatttctctagggtaaatacctaggagtgggattgctaggttatatggtaagtgaatgtttatcttagcaagaaattcagagtggccataccattttgcattctcatcaacaatgtatcagagttccagttgttccacatcctcatcaatacttggtatcattagtttttaaaacttatttgatttgacttgcatttctctaatggctaatgatgctgaatatctaacttcatgtacatatttgtaatccacatgttttctttagtggagtgcttgaagtcttttgcccattttcaaattgagttctttgttttcttactgtcgagttttgaaattttttatatattctggatattagtcatgtgctggatatgtgatttgtacatattttctaccagtctgtacttttgtctttttattttcttaacagtatcttttgcagaacaaatgtttttaactttgatgaagtccaatttatcaattttttgttatatgaattatacttttggtgttctaaggactctttgcctaaccccaagtcacaagaattttctcttgcattttcttctaaacattttatagttttacattttacatttagatcttgatccattttgagttaatttctgtaagttgcaaagtttgggttgaggttgatttttttttttttttttttgagatggagccttgctctgtcgcccaggctggagtgcagtggtttgatctcggctcgctgaacctctgcctyccgggttcaagcaattctcctgcctcagcctcacgagtagctgggactacaggtaccactgccacacccagctattttttttttttttttttgtattttagtagagacggagtttcaccgcgttgcccaagctggttgtgaactcctgagctcagacaatatgcccgcctcagcctcccaaagtgctgggattacaggcgtgagccaccatgactggcctgattttttttttttttttttgcatatggatgtccaattgttacaccaccatttgttgaaaaaactatcttttctccatggaattgcccctgtacttttgttgaaaatcagctagtcatatttgtgtgagtctatttctggactctgtattctgttccattgatctatgtgtcagtttttatgccaatagcatactattttgattactgtagctttatagtaagtcttgaaattgggtagtgtgcctctaactttattcttttttttcctctctgactttattctttttcaacgttgttttggctattttagtttttttgccttgcataaattttagaatctacaaaaaatactattgggattttgttatagaaatctgggatggcagttcttttagcacactgtaaatgttgagccacttatttctggctttcatggttctgatgagaaatccacggtcatttaaatttttgttctgtatatgtgaaatgtctggtttcaaactttttgcttttagttttcagcattttaattatgatatctgggtgtgtaatgctttgggttcattctggtaaagttttcctgagcctcttgaatatataggtttcactgaacttgggcagcttttagcactgttacttccctcaagtgattttttttcctgttctgaaccctttcttttcttctttggagacccctgattaaacaaatattagaccttttgctatgtcctggggctttgttcttctttttcctccaatcttttttctttctgttgtgcagataatttctattggtctatcttcaagtttattaattttcttctatctcccttctgctattgagcccatccagtaagttttaaattttgatcagtacatttttcaattctaaaacttttcttttttatgtcttttatgactttcttttttctttctttttaaaatgggatatatttaagccattcttcatgatgtcctgatatactgaccttgatatacacatacgtagttaaatgattactgcagttaccgttgctgagactgtctttccatttgttgcaagtgtattcactcctcttggagtattttcataatagctgctttagactgtttatcagatatctgtgtcatcttggcattgacatttcttgattatcttttccaatgtgagttaagatttttctggttcttcatataccttgtagttttggattgtatccaagaaattttgaatattatgttaaaagaccctggggtttttataaatcctatgaggatttttgttgtttttcttttagcaggtatttattgcatttgggttcaggctacaaattcagtcttctgactgcagtttcaatgtcagatttgttttcaaaatcttggcagtactatttggatctgccctgtgtgtgtgcaacctagtagtcagtctgggacctgggcagtgatctatcctttagttctgttcttagtatttttggtatagtgtttaggattacatccatgcaagtgcagctttggggtgagcctaagagttcatacacaactttctgtggtatcttttccaagttcctccctctctgagatggttctggtactttttgattccctgaacctcccctggtggtccccggccaaaaagctggggcttttattactccactcggctgggtatgtctggggttaggcagcagaaacacacagagaaaaaagccataggggttgaccacaccctcttgggatcaccgctcatctgattggagaggaagttttaccttcctcaggattttaggtacctgttgagacgcaccgataccattattaactgctgctgccactgctgcaggattttgtgggtataaaagtatggagacaagggaaaaaagaaaaatgggagatctgccccatttcctctgagtgttaggagttccctttctcattctttgagccaaaacagtagagcttatcctggcacttcctctgtgccctagctcccagttctggttttcaggatgtcttgagtctaagccaggggatttcagaagaaaaatgggaaactcaccaccagttccatggtacctgaattcttatctacttccccagtccacctgctgccatatactttttaagagtccacaatggctgctccatgcattctgtccaggtgttatatttgtatttagcggaagagacagggtggagtgtgcttactctatcgtggtctgaactggaattcactttttttaaaatttatttttaattttttaaaagccttttttcttattttaaaaacacaccttcttgtagaaaacttagaaaataaaagtagagataaacaaagctaaagtcttctgtgaactcatgagttactgctatttggtgttggcatatagtccttttttatctcataaatgtgtctttttcaattttaacaataaaaattaattagataataaaatcatgttaattattttaaccagtagttttgagacccaaagacccatactattgacttgatctaatgctgtttttactaaatcttcttttccttaataggtagaaaatctttatcctcaaattggctgggtagaaattgatcctgatgttctttggattcaatttgttgccgtaataaaagaagcagtcaaaggtaattggatttataaaaataacaataatctttatggttttttttttgtaatagttttcctcaggcttctgtagttgtggttttcctaagttatacatatatatagtattttattgggattacagtttcccagtatttttcaacggaaatttgtaattcacagtgagctcctttgtcagggaaaggtaacatctgctgtgtcctctggtttgtctcttttcgactgtaatataaatgctcgccatttcctcattccaggttatagctagtgctgttttgatttcctgtttggcacaaaataccagaggattataaacagaagttacagtgtatagcttctactctcatgggtttacaactgagttatttctattgtaaaatgagtttttatttgtttttttctggccatttgacataaagtgctttcctggccaaagctatggtctaagtcttagttctttaagaatgttagaaacattcttaaacattgacaacatctcaaaacattgaaatggccaccttgcttgagaacatggcaaagattacttgtaaattctgaaagatcttttacttcatttttctggctgaactgcttcttctcatctttttggtttgaaatatttcagtctatgcaaaagttgcaagaatagtacaataaactcttgtatatctttctcatagattcaaacatattttgtaatatttaccattttctgcaaactgtttttttctttctgaaccataggaaaggagtattttctcctataaccacaatgcaattataacactcargaagtataacattaacacagcactgttttctaatactctgtcttcagtatttgctcttgtcttagtgaaaacaaaaaacaaaaaaacttcttttttcaatctagaacccagccaaagaggaggcattgcatttagctgtcagtcggcttaggctcctttcatctagagcacattcttatgacattggcaattttcaaaagtacaagccagtttagtagagtgtccctcattttgaggttttctgattgtttcctcccagttagattcaggttgaataactttggaatactatatgggagttgatgtgtttttctcaatgctcaaattgaagttgtcccagattttccyggtgggataaatagatttttaaagaatatcacaaaaaatactcgagttgctatattttaagaaatttggaccaaaaagtcaatatttttgtttgcatcctggcatcagtttgtgttgaaaataaggtctcagcttcaataattagactactttccttgagagttttcctttattgtcattaaccagcttctattatgattgatcattgcttaaattaagatccaatcttattattaccaagaaaaaataaatctgacatactttgaatagtatttgtttttttcccagcacctaaaacaaaaaaagctactttgttattcagaaacaacctttaaggccgggcacagtggctcacacctgtaatcccagcactttgggaggccaaggtgggcggatcacccgaggtcaggagtttgagaccaggctggccaacatggtaaaaccctgtctctactaaaaatacaaaaaattagccaggcagggtggtgcacacctataatcccagctatttgggaggctgaggcaggagaattgcttgaacccgggaggcagagattgcagtgagccaagattgtgccactgcactgcagcctgggcaacagagtgacactttgtctcaaaacaaaaaacacaaaaacaaaaaacaagaaacaacctttgttttcttcaagtaaaaaaaaawtgctgcagaatcatcttagtaatgctttatttgttaattccagttgttttgttagaatgctaaacccwggtatttttcttaaagattrtattggatttctttttctatattgtaatattataaagaaaaatatcactggctttaaaacatgtgttttatccatctttacttttagctgcaggaatacagatgaatcaaattgttggtcttggcatttcaacacagagagcaacttttattacgtggaacaagtaagtacattttgtgataagcaccctactgctgggttcatgccacagtgagtacacggttatgaaatctctttggggagttttaactttctgaattgagaatagtttcgtttggttaagagggatgaaatgtgcctgctttctggcttgtatgctcactgcatgtcatttgggcttgacttatattatataataccacaaaaagacttaactgtcattaaaattatccatttctttctttcgggtaagttagcttttcaaacaagcatagatcaaagatctaaaaaattatacctaaaaagagtcagaggaaactcacaaatttcagaaacacagtactgtactatggtttatattttcagtctactctaaatttaatatttgtctatagcggccaggagcggtggctcacgcctgtaatcccagcactttgggaggccgaggtgggcggatcacgaggtcaggagatcgagaccatcctggctaacacggtgaaaccccgtctctactaaaaatacaaaaaattagccgggcgaggtggcgagcgcctgtagtcccagctactcgggaggctgaggcaggagartggcgtgaaccccagggggcggagcctgcagtgagccgagattgcgccactgcactccagcctgggcgacagcgagactccgtctcaaaaaaaaaaagaaaaaaaaaagaaaaaaaaaaagaaaatatttgtctatagcatatgaggcatatatacactaaacacagttataatattgtaatagctactgtatagtaaacatctgtgacagtcccaagttccattatccttacaacaaacctataatttaggcatcatatctgtttttacagagaaataagttgttcagggttgctcagggagcaaatagagccaagattctaaattgtctttttgactcagaagcgtatgttctttatactatccccatattgccttcaacatgtttctttctttttytttttcttttttcttgagacagggtcttactctgttacccaggctggagtgtagtggcatgattacagctcactgcagcctcaacttyccaggctcaggtaatcctcccgccttagcctcctgagtagctgggactacaggtgcactccaatatgcctggctaatttttttgtattttttgtagagacggggtttcaccatattgccaagctggtctcgaattccttggctcaagcaattcttccacctcagccacctcccccagctagcatgtgtttctctgtgtcttggtttaaacacacacccacattccctcccccaaaatccccccgcccacgtacccacacacaccactgtaaaatgtgtttttgttaaagcattaggctccaaaggacatcttgagcttgggcagtgggaaagaaaagtgagcagagggggaaaagatgaatctgaaaaatataattagggtgaattcacaaggacttggcttctaattcagtattgggcaggaagaagaaatttgaatttaccaatactgctggccttgatgtttgggctgtatgatagaaatcatagagaatgtaaggaggaatgggctgggtagtagtgagagtaggtagaaggaaaaatgataaaatgtttggttttggacgtgtgaatgtggagatatctcagaggtgactagaacattggtttaacttggactgaggcatagcacatctccatcagataggatctttttattttcatttttgggggatgaggtcttcactttgctacctaggctggagtgcagtggcacgatcatagctcactgcagcctcgaactcgtgggctcaagggatcctcccacatcagcctcccaagtagctaggactataggtgtgtaccacactatggctggctaatttttaaaatttttatagagatggagtctcaccatgttgcctagactggtcttgaactctgagcctcaagtgatctgcctgccttggcgtcccaaagcgctgggattacaggcgtgagccaccatgctcggcccagtactcttttttttcaggacatgctgcatctcagattgatgcctacatctgcagttcctctgtgcttactccactccccagcactggccttggttatggcaaatcttaaataaatcttatacagtagtatattgtcagatgaaggggtgaatgaattaaacttacctgtacagataaggtatctaatcttagtgaccctgttgacattttgagctgaataattcgttgtcatggggaccgtcctgtggtgttgcagctgttcagcagcatccctggcctctacccactagatgtcagtagcaccccagcccacctcaccaccatttgtaccaaccataaatgtstcaaaacattgctgaacgtcccctggggacatccccaatttggaaccattggtgtagatgaagtctcaaaaaataggtgtgttctctggtagagattatgtggagaaaagaaaagcaagctaaggatttggactgcgggtcccygctcccaccaaatttaaagtgagtcagggaagaaaaagccagcaaagcaggaccaacgctaatctgggaagtggatggatgaaagtggagggaggagtattctcagggaaagaactgattggatgtgtcatattcacttggccattggccccagtgattgctttcatcaggacctggctaccatatcactcatgacagtaaggtcggaatattaggaagcagagtttttgtctgatgctaggactatacatcaccattagaaggaatagaagagttagatttcaagacagttcactttccttactggtggtggtggtgttgtagagggataagacttcttcctaaagcaattcattgtgagttttttatcttggctgtccttttttcttttttgaaatgtttgtattctttcatgagttttgggaacattctttgcttgtagaaactgaaatagtggatattttttgaagaaagactgaaagcctttgtgcttcttttacattaaaataatggagcggagcctattctgctcattgggccccagggagccaatgtggtgtatgatgctgacagattccacaagagccctagcaaacagccgggacacaacacagatgggcacagcacagggccagccagaagcactaattgttcatttgtgagagaaaaggagagacagactagatcctgtggaaaaacctattgttcgttccagtcctggccagcagctcctcctcccagcttgttgtttttttcctcctgcatccatggtgcatttctgtcctcatggccatagaaacattattttcctcacagttgctgtcaggaggtctaaaactttgaactttctttttgtttttctccctatctctcccccatccccctgttagggaccaggaaacttacgaacttttttcagtctttgagctttcttcatgttcttcaggttaagctttttttccaatatattcaaaaagtggtgtgtttagcctgctttctaaaataactctaactgataacacttccattttggttcttttaaattccttttgttctaaaaaaaaaaaaatcacgagctgttttgtttctttagtcaatgtctcttgggagatttctgccagctaacttcagatcagggtgtgtgccaattagcaacacaaactgtgagtcatgggagcctggattcactcataactgtttgagggctcacagggagtaatgcaccgtgctgggggctgcactgcgtatacagatgaataagaataccagccctaatttacaatctcattatataggtacacaaattactctatattcccattgcacaaaatagatttttattgtagtatttgatacttacattaatgagtcttaccaaatacttatgacttaaaatatattaagagccacagaatgatgtaaagtgttagaagggtttaagacaattaatttacaacattgccatttacacttttccttcatttttccctttttttgttgatagagataaaataaacccaggtcagtgctgagtgaatattggaatgtatgctattacttgaaaaatcagtattctagattgtcttgttctatgttataaattaatgatgccactttcatcttgtgattttgtctctccccctcactgcttttcagccacactagccattcagttcctctaagacacgctttatcttgctctaggacatttgaacatatagcacattttgttgggaatgttcatacttctgattccttcttatccttcagagctgagatccattgccatttctgaagccttcactgaccaccacacaggggccatctgttaaatactctcatggcacctctatttatccatttttttttttttgaggcggagtctcactcttttgcccaggctggagtgcagtggtgctatctcggctcactgcaagctctgcctcccgagttcacgccattctcctgcctcagcctcccgaggagctgggactacaggtgcccgccaccgcgctcggctaattttttgtatttttagtagagacggggtttcaccatgttagccaggatggtctcgatttcctgacctcgtgatccgccttcctcggcctcctaaagtgctgggattacaggcgtgagccaccacgcccggcctctatttatcctttatagggcgtattccagctgtaagtgagcaactgagtaattgattatttgtttacattccctggtagaaagtacagtcatcagggcaaaagtgctgtgtgtctctgttcatagctgtgtacccaactcctggtacaaattggcttataaatttttgctgaaaccagtgattgaacatcagatttaagtgtataagtatgtgcwgttgtagaatggctctgaagaattatatatcaatagattttatctttatcaaacacaatctgatctttgacaaaggtgctaagaccagccagcagaacaagaatagttttttcaacagatggtgctgggaaaactgaacattcacatgcaaaagaattaaattggacccttacctaataccatatacaaaaatgaatcccaaaatgcatcaaagacctacatttaaaagcttaaactataaactaaaaactcttagaagaaaacaggagaaaatcatcatgactttggatttggcagtgattccttaaatgacatcaaaagcagttaacaaaataaaaaatagataaattggactttatatatcaaaggacatttattttttcatttgtttatgatgactaatttttcaattttcttaactattggaactctccaaagtagaaaaattaccctaaatttaattataaataataagtaagctatgttaaaattaatttgacataatgtgcaatttgcatttaaaaaatgtctgaaaaaatttagtcattgatatctaatatgcagttaggcttcagaaaaccacctgcagcatgtaacgtggaaggtgtgcatcttggtaggtttgatttgtaatttcatccaagattgaggactaaaacaataggaaatcactcctctgatttgtactcatgataatggtgaccatttggatctctaaagggaaaagaagtaacatgctcatgatctgtaaatgttgcgatttccattaataaaggtgaaaaacaggaccctatcaacagnnnnnnnnnnnnnnnnnnnnnnnnnnnnnnnnnnnnnnnnnnnnnnnnnnnnnnnnnnnnnnnnnnnnnnnnnnnnnnnnnnnnnnnnnnnnnnnnnnnnnnnnnnnnnnnnnnnnnnnnnnnnnnnnnnnnnnnnnnnnnnnnnnnnnnnnnnnnnnnnnnnnnnnnnnnnnnnnnnnnnnnnnnnnnnnnnnnnnnnnnnnnnnnnnnnnnnnnnnnnnnnnnnnnnnnnnnnnnnnnnnnnnnnnnnnnnnnnnnnnnnnnnnnnnnnnnnnnnnnnnnnnnnnnnnnnnnnnnnnnnnnnnnnnnnnnnnnnnnnnnnnnnnnnnnnnnnnnnnnnnnnnnnnnnnnnnnnnnnnnnnnnnnnnnnnnnnnnnnnnnnnnnnnnnnnnnnnnnnnnnnnnnnnnnnnnnnnnnnnnnnnnnnnnnnnnnnnnnnnnnnnnnnnnnnnnnnnnnnnnnnnnnnnnnnnnnnnnnnnnnnnnnnnnnnnnnnnnnnnnnnnnnnnnnnnnnnnnnnnnnnnnnnnnnnnnnnnnnnnnnnnnnnnnnnnnnnnnnnnnnnnnnnnnnnnnnnnnnnnnnnnnnnnnnnnnnnnnnnnnnnnnnnnnnnnnnnnnncctgactgcatgtccattcataggctttctgcagggggaagcacatcacccgctgttggctcattctggcagtccaacctggcattgtctttacacagtcctgcatgcaattttgtatttacaataatcaggagcatttcatcttttattctgtagccatagtttcagggggtctccctacatctcccccttttctctgatttaaatgaaccgtagcaatcataggttggtgctgatcacgattggattgaagaataatttttccaattttacacgtgaacaataaaccaatagcacaaattatacacagaacaaaattaacgatagtggatcctcccaaagattttacccattgaatagggttgagattagataatccctcagagatactgtctaaaacaactcatggaatgggagaaaatatttgcaaattgtaacctcgaagcatgtaacatattaatccctaatccctagtaaggggttaatatctagaacatgtaaagaattcctacaattcaacaacaagaaagcaacaacgcagttcataaatggacaaaggacttgrgtaatacacagatggtcaataagcacacacaaagatgctcaatgtcattagtaatcagggaattgcaaattaaaaccataatgagataccacttcacacccactagaatggtgagaattttaaaaaaaggaagataacaagtgttggtgaggatttggaaaaattggaaccctcatacattactggtagaaatgtaaaatggtgcaacgactgcggaaaacagtttgccagttcctcaaaaagttaaacatagaattactatatgacccagcagttccacttctaggtatatacctaaaaaaattgaaaacaaagactcaaacagatacttcacaacaatattaaagcagcagtaatcacgatarccaaagagtacaaacaacccaagtgtgtaccaacagatgaattgataaatggtatgtagtatataaatacgttgaaatattgttcagccataaaacrgaatacatttctgatacatgctacaacatggatcaatctagaaagctaagttatattatactacgtgaagtaagccaaatataaaagaacaaatattgtataattctacttatatatgatatacctggaataggcaaatgtatagacactgaaaacagaataggggctataagggatggggtgaggaaggaatggggaatgatttcctaattgttatagagcttctgtttggggtgatgagagttttaaaaacagtggtgatggtygcacaacgttgtgaatgtacttactgccactgaattgtacacgtaaaataggtaaaatggtaaacctcatattatgtatattttgccacaatttttttttacagttaagtattagagagtgcaatggcaagctattaaagtaatagaccatgagatatgggaaagtagccaaagttaggagtggttggtcggaagaaaagggaatgtttgagggattaaaggttgcagtgagttggaaggccaggtatttaaggagtaagattgagaaaactgaaaacttttcttcctatgtgctgactaatattggagcattagactttgagtggtagaccatgtaaaggtgaggatatgaccatgggtgtggaatgcttaagtagagaatgaatcttagcaattgaacatggttcaggtctcacaggaggaggcctggagttggggtagaaagcaaacttgacttggatgttgattagtagatgccagaggttgatttgcgggagccgcaaaggaaaaaggatttttttttttacttctatatttcttagctctgtacttttattgtagtattgacccaagagttgttgaatttctatttattggagagattttggtaagcatgttaggttgccaatggctaagccaatcctaaagttaacagatgtagaactaggctcaggcaatatttcagctcttctgtaggtcaggaggtttttgttggattacgtgtatcaggacaagtgcagtaaaggggaaaagcattggcttttaaaaaatctgcttttaaagtgtgtagagcaggtcttcaaaggccttttccttagttagttttggttttggaagtatatacatttcatactatatgtcacataattgttgtgcagtgtgttcaacttataaaatcaagaagaaatcattcagaaaggcacatgtaactaaattatactttgcaattacagtatggcctctaattttgttttctcttatggcacatctttaacatagtctctgatttatgctgggtctcaaaatactgttttattctttctaggaaaacaggaaatcattttcacaactttataagttggcaagacttaagagctgttgaacttgtaaaatcttggaataattctcttcttatgaaggtaatctttttcttgtgtgatttggatattattggttttttttttctgtaaatgtcccttaattgtattatttcctacctattttgttttaggacattaagaagacatacgcacacactccccattccagtgaagtttaataatagccaatcaaaggcgtatgtggtagacttcagtacttgtacctcaggaagttctaaggaggtttgtggtggaccagagtttcacatgttagtgagaatttgtgtttctgtccttgagaaatggaaaagatacagactagatgaatgaaatgcccaaatttcatcttttataaaagctcaggatggatattgagatattatagataactagcagactgttagaagctcttatcattacaggcatgatggctcgcgcctgtaatctcaacactttggaaggctgaggcaggnnnnnnnnnnnnnnnnnnnnnnnnnnnnnnnnnnnnnnnnnnnnnnnnnnnnnnnnnnnnnnnnnnnnnnnnnnnnnnnnnnnnnnnnnnnnnnnnnnnnnnnnnnnnnnnnnnnnnnnnnnnnnnnnnnnnnnnnnnnnnnnnnnnnnnnnnnnnnnnnnnnnnnnnnnnnnnnnnnnnnnnnnnnnnnnnnnnnnnnnnnnnnnnnnnnnnnnnnnnnnnnnnnnnnnnnnnnnnnnnnnnnnnnnnnnnnnnnnnnnnnnnnnnnnnnnnnnnnnnnnnnnnnnnnnnnnnnnnnnnnnnnnnnnnnnnnnnnnnnnnnnnnnnnnnnnnnnnnnnnnnnnnnnnnnnnnnnnnnnnnnnnnnnnnnnnnnnnnnnnnnnnnnnnnnnnnnnnnnnnnnnnnnnnnnnnnnnnnnnnnnnnnnnnnnnnnnnnnnnnnnnnnnnnnnnnnnnnnnnnnnnnnnnnnnnnnnnnnnnnnnnnnnnnnnnnnnnnnnnnnnnnnnnnnnnnnnnnnnnnnnnnnnnnnnnnnnnnnnnnnnnnnnnnnnnnnnnnnnnnnnnnnnnnnnnnnnnnnnnnnnnnnnnnnnnnnnnnnnnnnnnnnnnnnnnnnnnnnnnnnnnncactgcaacctctgcctcctgggttcacgtgattctcctgcctcagcctcccaagtagctgggactacaagcatatgccaccacgcccagctaattttttctatttttaacagagacggggtttcaccgtgttagtcaggatggtctcgatctcctgacctgatgatccgcctgccttggcctcccaaagtgcggggattacaggcgtcagtcatcgcgcctggcccatattaattattttaatacttataatgcctcacagttaaatgccttctctgctagtgtactggtatcagatggcgcccaggggactgtctacagcatcagttttacttgataagtatttgatgatattaatttaatatggaaacaaatgtgaatatattatggaatataacagcaatgcatgagtgaaacaattttgccataatctcacctgaattgattttcctttttgatagtttaatatagaaaaatgtaccttgctgcaataacttgtgagaggtgctgttaataagaaggacacagtaattgagggagtaaaagtggttataaggaaatgtcatgaaccctcaattgtataattttaaattatgtaatttataatctataattttataccttaatatataattttagtttttaatagttcatcaaacattctttaatttggtcattgaggtgtttaacacttttattgctttgaaaaaaattgtgatttgaaaagaaaaattgtgatttgaaaacatttacttctgtaatatgtctcatatttcaaatcttttttgtttgtttgttttgagatggagtctccctttgtcacaacctccacctcccgagttcaagcaattctccttcctcagcctcctgggtagctgggattacaggcacatgccgccatgcctggctaatttttgtgtttttagtagagacagggtttcatcatgttggtcaggttggtcttgaactcctagcctcacgtgatccgcccacctcagcctcccaaaatgctggtattacaggtatgaaccaccatgcctaagcctcaaatttccaatcataatgcagaactgtgacctcaagcacaaaattgagcatttaaagcacttttgtctacttgatattgaacatgcacatgatcaaagttttggttctcttagcaaaaaaatttatacaaacacaggctttcacagtttagcacacataattctagggcctgtcctggcagtgaaggagccccactttgcaatcatccctttccagttgctaatggtttgattgtggcctttggaaatgtttagagtgtttttgccagaactggcaccaatgtcattagtttggccaaggctagtctgaagcaaaatggtgaagtaattgaggtgtgtttgcaatctcttgccactgttgctttcctccagtctccccagatgcccggtcttccgcttacttttttgttcttattcttgcctgatgatggctaaggctttcttctctttgcttttagcataaaatcccaactccttaccaaggtttggctctttctacacttctgaccacctcctagacctctttctccctgaggttgctaaagattagcaactgcatctttttcagcctgtttttgttcttgtagcactcaagccctttcttaccttaaggccattgtacatgcacggggtctctctgccatcgtggctggatscttctcatctttttagggtcgagctcatgtagcacatctgggaacccttccctgccaccctacttaaaggaacccccttgccctcaatctcttatgttgccctttgtttccttcattgtacttactaaatttcaaagattcttagatacacattttttaaactgaaaattaaatggaaataattatagattcacatgcagttgtaagaaacagtacagagatcccttagactctttgcactttctcccaatggtaaaattttgaaaaactatagtataacatcacaaccaggacattgacattaatacaatccataaattttattaggatttccccagttttactttatatttgtctgtgtttgtgtgtgtgtatgtgtatgtatataagttctatacaattttttcctatctgtaggttcatgyatccaggagcatatgcaagatactgaacagttccgtcactacaaagatctcttgtgttgttcttctgtaactatatctaccactctcctatacacctccctaccctctctcattcctagctcctggcaaccactaatctgtcctccatttaaaaaatgttctaatttgaaaaatgttatatacataggattatacttttaaatatataaccttttgggatttgcttttttcacttagtataattccctggagattcattcaagttgttgcctgtatcagtagtttattcctttctgttgctgagttgtattcaatagtacagctgtatcacagtttatttaaccattcacttgttgaaggacatctgtgctgattccagtttttggctattacaaataaagcttttatgaacgttctttgtatagaattttctgtgaatgtaatttttcatttctctgggataaaaacctcaaggtcatatggtaattgcatgttttcttttrtaaggatctgccaaactgttttcaagagtgactataccatttactttcccatcagcaatgtataagttatattttaacatctctgaaatcaggatgcatttcttagtagcatgttaaataatgattcattttacagtctgtcttcttaaatcatcttatttattgacttgattgcttatttgtcttctcactaaaatgtaaatgttaaaaagacaaggattctgcccatattgttcaatttgtttttacaaggcctagcaacagtccttggtatgctataagttactcagtaaatactcattagatatatgaatgaagatgctaattgtttatatgttgtctaaaagtgcagttattagagcttgtaatatttttgtatgacctcaccacccatcctgagttatctacattttaacagaagatctcagaagtgtcctaaatctaattttttatgagaatagtgtagggtgtataaagaggaattgcccattttagtttaaattatttcttataacaaatcagaagaaggcttatgggtggtcactttaaatacttttaaaaagtcttatgttttaataaataatgtgaaaaatctatatgccatgtaaaatataaagaaatgacagggtgcagtggttcacgcctgtaatcccagcactttgggaggccaaggtgggcggatcacctgaagtcaggagttcgagaccagcctggccaacatggtgaaaccccatctctactaaaagtacaaaaattacccaggcgtggtgatccacacctgtaatcccagctacttggaggctaagggaggagaattgcttgaacctgggaggcagaggttgcattgcgctgagattgcgccattgcactccagcactctaagcaaaaaaatgtaagcctggggaacagagtgagactctgtctcaaaaaaaaccaaaaaccatatgtatgtgtgtgtgtatgtgtttgtgtgtgtgtgtgtgtgtgtgtatatatatatagaaataaagaaggtgtgagcactgaataagatgagaaggaagttaaaaggactagactgaaagaactgagtctacaaattttattaattgatgtgttatcaattaaaaatgaaagaaaaaaatttatattactatttttcacaaataaaccaacatctttaaatttattttagggagtgaggtaggattaacaaaagtgggtaagttcaacaagaagtgggcartacttcwtaagtgttttgtaaaacatcagttttacaagttgaagtgtccatctacatccctgtagtgtgtggcaggatagggtttttttttttttcctagtatgtcttaaagaccttaaaactcaaagcttgttttctgtatacctaaggctttttgtaaattaaagattttgcttatgtcttatctttgatcattagataagtataggtagtattaaataaaatcatacaaccagattttaagtacttaatgtatagggaaatttctgtctgtgttagtgcaaacttaatttctaataggaaagaaaaaagctaataagagctcatccttcgttgtctagtattaagagttctcaggtctttgattcatagaggcagattgaagctaagatataagattatgattaatgtgaaaatatttggactatgagccttcaaaatcaaagattagctgataactttatatagatgttattactattggaatagtagtgaattaatgctattctactaaatagtatagatttatctgggaggcctgcaataaacttaaagtgtacatatcccactgaaataagaatactacaaatatagcctccttcctagattctctcctttaactatcatagttaaaaataggtagagaggtaaaaatatagttgtttttttttaaaaaagtttataataagtacctgagcatctggtatttgctaaaataattcaaagtagatatgttgcatttcatatgttagaatacaaactgcccatttaggataatattgctgttttttattttcttaattgcagaaaacactattataagtagttaaatgacttgttattgggtttgtttgcatgtatatagaattgatgtggaaattttaaacactactaaatgcattttcctaaaatatgttttttaaaatatagatatttcacagttcttgccgagtgcttcactttttcactagaagtaaacgactttttacagccagtttgttcactttcacaacccagcagacttctttgagattggtctggattttacagaacttgactgaggtaagaaaatactgtgtgtatgtggaaaatatgtgtgtatgtggaaaccatataaagactatggggaagaaaaaattaaaggaataaagatagtaatttgattatttgagggaaaattaagtgtctaccacatattggaatggaagacaaagtggcatcttattttgtttgttttgcttttctttttgagacagagttttgctcttgttgctcaggctgatgtgcaatggcgtgatctcggctcactgcaatctccagctcccaggttcaagtgattctcctgccacagcctcccaagtagctgggactacaggcgcgtgccaccacgcccggctaattttttgtatttttagtagagatgaggtttcaccatgttggccaggctggtcacacactcctgacctcaggtgatccatctgcctcagcctcccaaagtgctgggattacaagcgtgagccaccactccccgccatatctttgatttatatcagtggaattcttttgtgtcagactccttttgctcaatattatgtttttgacatatagcaatgttgtgtgtaaattactttgcttatattttcattgctatttgctgttcaatgtatgattttaccatagtttattgtctattctattcatgtacatttgggttatttcctgtttttagctgttatgaataatgcatctcttggtgtacatgtaattgctatgtctatacataggaatggaatttttagggcatgaatgtgtatatatatcttcacctttttttttttttttgagacagagtctcaccctgtcacccaggctggagtgcaatgtgcgatctcagctcactgtaaactctgcctcccaggttcaagcgattctcctgcctcagcctcctgagtagctgggattacaggcgcatgccaccatgcccagctagtttttgtatttttagtagagatggggtttcaccatgttgtccaggctggtcttgaactcctgacctcgtgatctgcctgcctcagcctcccaaagtgctgggattacaagcatgaatcaccatgcccagccatgtatctttacctttaaaggataatgtcaaaacacttttgcaaagtgataataacaatttacacagtatcagtatgtgatcagaggactttttatttcatttactgtcataattgacattattagtctatattttagccatcctagttggtaagtaatatctgagtgtgattttagactggataaaaaaacaagatctaactatatgttgtctataagggacacacttaagatttaaaaaatataaagaggttaaaagtaagtgagtggaaaagatatatcatgtaaacagtcactgtaagaagctggagtggttatattaacatcagrtagtatagactttaaaacaaaaacatgttactagagataaaaagggaattttataatgataagatggtgaattcatcataaatatataacagttataaacacctaataacagaggtccacaatacatgaagcaaaaatggacagaattgaagggaaaaatagaaagttgagcagtgatagttggagacttcagtaccccactttcttttttttttctcttttttttgagacggagtctcactctgtcacccaggctggagtgcagtggcgtgctctcggctcactgcgagctccagctcccagattcacatcattctcctgcctcagcctcccgagtagctgggactacaggcacccgcccccgcacctggctaattttttgtatgtttagtagagatggggtttcactgtattggccaggatggtcttgatctcctgacctcgtgatccacctgcctcggcctcccaaagtgctgggattacaggcgagagccaccgcgcttgaccctcactttcaataatggatagaataactagacagaagattaacaaggaagtagaaaatttgattaacagtaacaactaactagacctaacagacatttatagaaaactctacccaagaacagaatatacactctcttgaagtgtacatggaattttctccaggatagatcataggctaggccatactacaagcctcaataaatttaaaggggttgaaattatacgaagtctgttgtctgaccataaaggcttcgaattaaaagtaacagaaaaaacttgggaaattcaaaaatatatgaagattaaacaacacacttaaaaataaccaaagggtccaaggagaaatcataagagaaattaagaaatactttgagatgaatgaaaataagatacaacataccaaaacttattagatgcagataaagtacttagaaggaaatttatagcaaaatgatattacatgtagaagagtatatttaaaaagaagcaaaatatcacgtcaatagtctaccattctaccttacgacatggaaaaagatgagcaaactaaattcaaaacaagcagaaggaaagaaataatggaattagaacaaaattaatataatagagaatagaaaaacagtgaagaaaatcaataaaaccgaaagttgcttctttgaaaagattagctaaactgacaaagacgagagaaaacccaaataactaaaattatgaattattatgaaattatggatattaatactgacctcacagaaataaaaaggattaataggcaataccatgaacaagtgcatgccaacaaattagataacaagataaaatgaaaaatttcctagaaatacacaaactactggaaataactcgaggagaaataaataatctgaataaatctataacaagtaaagagattgaagtaataaataataaattctcacctagaaaagcccagagccagatggctttactannnnnnnnnnnnnnnnnnnncccagagccagatggctttactagtgattctaccaaaagttaaagaagaattaacacgatcctttcacaaattcttccaaaaaatagaaggggaaaatagacaattgaatagtaatagttggagactttaataccccactatacttccattattggagtggattatacttccattattggagtgagagatacttcccagctctttcttttaggccagtattccctgataaccagatcaaagacatcaagagaaaagaaactgatagaccaatattccttatgaatacaaatgcaaaaatcctcaacaaggctgggtgtggtggctcatgcctgtaatcccagcactttgggagtctaaggcaagagtattgcttgagcccaggagttcaagaccagcctgggcaatatagcaagacaccatctctccaaaaaaattaaaaattaaaaaattagctgggtatagtagtacacacctgtagtcccagctacttgggagactggggtgggaggattgcttgagcccaggagtttgagacagcaatgatccaggatcacaccaccactgcactccagcctggatgacagagcaagaccctgtctctggaaagaaaccacacacacacacaaaacttcaacaaaatattagcaagtcaaatccagcaacatataaaaaggattatatatcatgactaagtgggatttatcccaagaatacaggattggtttaccattcaaaaaatcaattaatatggatcttttataaaaactggtaaatgtaaaaaaatagaaaattaatatacaccatattaatagaataaaggacaaaaaaacacatgatcatgtcagtagatatagaaaaaagcatttgacaatatctagcccctcttcatgataaaatgctcaacgtactaggaatagaaggaaactccttcaacctgatctttgaaaaacccacagccgacaccatacttaatagttgaaaactgaatgtttttctcctaagttcgggaacaagacaaagatttccactctcaccacttgtaattaacattgtatgggaggttctaagccagggcagttgagcatgacaatgtaataaaaggcaactagattggaaaggaaggagtaaaactatctctatgatgcagatgacatgatcttgtatattgaaaatcctaaggaatttcctaaaaaaattagcactaatattataaatgagtttagtaaggtsggagrgtataagatcaatatacaaaaaaaaaaattttcttttttgacacagagtctgtcacccaggcttgagtacagtggcatgatcrcagctcactgtagtctcaacctccaggctcaagagatcctcttacttcagccgccagagtagctgggactacaggcgcacaccaccatgcccagttaattttttttttttttttcgagatggagtcttactctgtcatccagtagggagtgcagtggcatgatcttggtttactgtaacctctgcgtcccaggctcaagtgattctcctgcctcagcctcccaagtagttgggactacaggcgtgcgccacaacgcccagctaacttttgtatttttagtagagacggggtttcgccatgttggccaggctggtctcgaactcctgacattaagtgatctgcccgcctcgaccttccaaagtgctgggattacaggtgtgagtcaccgtgcctggccccagttaatttttaaattttttgtagaaacaaggtctcactattttgtcctagctgctcttgaactcctgggctcaagtaatcttcccaccccagccttccaaagtgctgggattacaggtgtgacccgccgcacacagctaaaaatcgtgtttctatatactagcaatgaacactagaaagtgaaattaagaaaacaattttggctggcgccagtggctcatgcctgtaatcccagcactttgggaggccgaggggggtggatcacctgagatcaggatttcgagaccagcctggccaacatggtgaaaccccgtctctactaaaaatacaaaaattagccagacatagtggtggactcctgtaatcccagctatgtgggaggctgaggcaggagaatcacttgaactggggaggcagaggttgcagtgagctgagatcacaccattgcactccagcctgggcaacagagcgagatgctgtctacccacacacaaaaaagaaagaaaacagtttcatttacaaaaacatcaaaaagaataaaatacgtatgaataagcttaactacaaaatatatactttgaaaagtacaaaacattgttgaatacagttaatgaaggcctaaataaatggaaagacatcttatatacatggattggaatatttaatactgttaagattatagtattcttcgaatttatctacaggtacaacacaatttctaccaaaatttctgcttttttttttgtttttttttttttgtagcagacaagctgatcctaaaattcacatagaaatttgaggaacccagattagcaaaagaatcttgaaaaaggaacagtatgggaaaactcacacttctcaatttcattgtggctttaatttgcattactctatttcctaacaaaattgatatcttttcacatacttaccatttgtatatccttttgtgaagtacctcagtcctttgttttctaaaaaattaatacactttaattttagagtagttttaggtttacagaaacattcagcagtaaatatagtttccatatgcccttactccccaacagtttctgctgttattagcatcttgtattacggtggtacatctgttacaattaatgaaccaatatggaaacattattattaatgtaatgtatctaccattgcagtactattatacactgtagtttcactgtcctgaaaaatcccctgtccttcacctactcacatctctttctgaaccctgggtaacactgatatttttattgtctctagctttgtattttccagaatatcatatagttggaatcatatagtatatagactttacagactggcttctttcacttagcaatatgcatttaaggtttctccatgtatttttgtgccttgttagctcatttctttttatcacctaataatattccattgtctgaatgtggcacagtttatccaatcacatttttttttttttttttgagacrgagtctcactctgtcgcccaggctggagtgcagtggcatgatctcagctcactgcaacctctacctcccaggtccaagcaattctcctgcttcagcctcccaagtagctgagattacaggtgcctgccaccatgcccagttaatttttgtatttttagtagagacgggatttcatcatgttggccaggctgctctcgacctcccgaccttaagtgatccacctgccttggcctcccaaactgctggaattacaagcatgagccaccgtgcctggcctatccagttacctattgaaaaacatcttggttacttccagtttttggcaattatgaataaaactgctatacacttttgggtgcaggtttttatttggacataaatcttcaactcatttgagtaaataggtgtatgattgttggatcatatggtaagactgcatttagttttgtaaggaactatcaagctatcctccaaagtagctgtgtcattttgtattcccaccaacagttggagagttcctcttgctccgtatccttgccaacatttgctgttgtcagtgctttggattttagctattttaataggtgtgtagtagtatcttattgtttcaataggtgtgtagtaatattcattgtttgcagttccctaatgccttgtgatacagagcatattttcatgtgcttatttaccatcagtatatcttgggtgaggtgtctgttcagatcttttgccattaaaaaaatttttgtttgtttgttttgagacagattcttgctctgtcacccaggctggggtgcagtggcatgatcgtggctcattatagcctcaaaactcatgggctcaagtgagcttcctgccccagcctcctgagtaactgggactacaggcgtgtgccaccatgcccggctaatgttttcactatttatttatttatttagagacagagtctcactctgtcacccaggttgagtgcattggcatcatctcggctcactgcaacctctacttcctgggttcaagtgattctcctgcctcagccttccaagtagctgggattataggaggctaatttttgtatttttagtagagatggggtttcaccatattggccagactggtcttgaacttctaacttcaagtgatccacctgcctcggcctcccaaagtactgggattacaggcaagagacacagcgcccagccaaattttttcacttttaatagagatagagtgtcgctgtttcccaggctgtcctcaaactcttgagctcaagtgatcctgccaccttggcctcccaaagtgctgggctacaggtnnnnnnnnnnnnnnnnnnnnnnnnnnnnnnnnnnnnnnnnnnnnnnnnnnnnnnnnnnnnnggcacagtggctcatgcctgtaatcccagcactttgggaggccgaggtgggcggatcacgaggtcaggagttcaagaccagtctggccaatatggtgaaaccctgtctctactaaaaatacaaaaaattaccacgcacctgtagtcccagctacttgggaggctgaggcagaagaatcttttgaaccggggaggtggaggttgcagagagctgagactgcaccactgtactccagcctgggtgacatggccagactctgtctcaaaaaaaaaaaattatttatacttctttttggctggtctttagaaatatagttactttttgtgaattgacctttaatccagtaatgttactgaattcacttagttattctagtaacttatctaatagctttttttgcaaaggatgtttctgtgtatacagttatgtcttttgcaaatgactagattttttttctgctggtttaacactttttttctttttcattggcaaggacctccaggatatgttgattagaaggagggatcattaattctttttcttgtttctgatcttggaccaaaggctttcaacatttctttacttagtatgaatttggctttggggtgctatcctttgtactttatcaaattaaggaagttccctttctttgctaagtttgctgacactttttattatgaatggktattgaatttatcaaacatattttctgtgcttattatctaggtttagtgtgttttatgcaagctacttggggtttgtagggctttttgaatttgttgcttgaggtcttcgttgattttgaaaaatgctcaggtgttatctcttcaaatgtaatttctgctccattctccttatctttttttctgaaagcccaaatatgggccattgccctaggacctcaattctctatggatctaaggagagttgttgattttcagtttgctcaactttttttttgtgaggatgtaartaatgacttccaagctctttacctatcagacgggaaattggagtcccctcttgtacatttttaagtttagaccttctcactgaatcccctgtatatctaaccctatcttacatattttccatccttttgtctctctgtgcttcattctacccagtctattccaacctgtcttccaatctattattcactcttcaattgtttctaatgtgctattaaaacccatcaagttcttaatattttagttctataatttttattttttcccatataattagcatgtttattttaaagtccacgactgtgaattccatcatctgtagctcccatggactgtggactgtctttttttcctgtttttgtttttcttccatgttattgtttcttcatatgcctggttacttatttgtatatatgtgtatatatgtgaccttgatattatatttgtaaaattctgtgtagaatttgagagccttaacataatgctgtcttgctctagataagatttatgtttgtttcttccattcttccagttaacaggattatctcaatccaacttaataattgagatgattcaaatctgacttgtagttcctatgagagccggtcctagtttactcctactcttagggtagagccatttgcagtccttagccaacgtgaggggggttgacctaggtcctcctaccttaggaagccctgatgtctactctgtgtcaccctagcctcctaagggcctagcacctatcagaggccctgactcataaatatttttttaatagatggatgaatttaccacctgtcaggcattgtgctactcactgaaatacaggttaacttttggctattaaaaaaagttgtatctggaacaaattttagaataaaaatttctaaatttaacaagagtttgaaatataagaatacttgaaggcgctccatatttaagtggcataactcttgaatggaatcttaaagtacttgtattataaataacctacaaatgacctcgtttttggaactcatgtcatttgttttcattttactgatcctttctactattaaagtataatttatctttaaatgtttccatttgcttttctttttatttcagttatttacttacttaagtattttttggaacatctgctatttgctgggaacctccctaggtgttggggatatgaatataaatgcaatcttgtccctgcccttaaagagctaagggtctagtagagaggcagtaatggtgtgagataatggctaaatggaagctatctatagaatgctacagactgagttagaaggagtgtgggagtggggcaggcttggacaaagccaggaaatgctggtcttgaaggacaaataagagttatagaggtgataaactttgtttcaagaaattgtttttcagtatgttaataacaccctaacaggcatttcagtttctctgctagctattatagtttacagaggtgttgacaacttctgtttctcttggcatgctttatgccaagaatcggcctgttaataatattttaggctttgggggtataagctttttgtcacaaccactctgccatgaaagcagccgtaggcaacaaatgagcatagctgtgttccaataagactttacttatggacactgaaatttgagtttcatataattttcatgtgtcacaaaatattctccttttgtctttttaaccattaaaaattatgaaaaccatttttaatttgctgtacaaaaacagagagtaggctggatttggcctgtgggccatagtatgccatcccagctttgggcttttttttgttttgttttgtttttgagacggagtctcgctctgccacccaggctggagtgcagtctcggctcactgcaagctccacctcccagcttcacgccattctcctgcctcagcctcccaagtagcgggactacaggtgcccgccaccatgcccagctaatttttttttgtatattttagtagagacagggtttcaccatgttagccagaatggtctcaatctcctgacctcatgatccgcccgcctcggcctcccaaagtgctgggattacaggtgtgagccaccgtgcctggccattttttgcatttttagtagagatggggtttcaccatgttggctaggctggtcttgaactcctgaccttaggtgatccacctgcttyggcctcccaaagtactgggattacaggcgtgagccaacgcacccagccgactagtgtatgtttaaactaaaaatgtatatactttgttttttttaaaaaaaaaacaacaaaaaacacaaaagtaactaacgcatgcttggtatacaactaaaacctttcagaaatattatacagaaaatgaaaatcttccctctctcccctggctagatctcatgccctatataataatcacttagaaccatttggaatatattctagaaatgtttttgtgtacatattaatttttataaaaatgggtttatattgtatcactgatctgcatttaatcatgcacttagtaatttagcctttttgaatcgattttgtgctgttgtgttttcaaggtgcaaaaggcagttgaagaagaaaattgctgctttgggactattgatacctggttgttatataagctcacaaaaggtaaagatgacctgaaagatctattttaaataaccgaaatttgatcaagagaaatgatttgcctaaaaaaagtagaagttactttttttttttttttttgagctagggtctcgctctgtcaaccaggcgggagtgcaatggtgtaatcatggctcactgcagcctcagcttcctgggctcaagcgatcctcccgcttcagccccctgagtggctgggactattggtatgtgccaccatgtctggctaattttttgtatttttagtagagacagggttttgccatgttgcccacgctggtcttgaactcctggactcaagcaatccatctgcctcagcctcccaaagtgctgggattacaggcgtaagccactgcacctggtcagaagtttttttttttttcccccttcctgtactccagacatactgctctttggtaccctattaacaacatgttctagtaaagctagacttattctagatttattataagaggaggacaatttttaaataaattgtgatgaaacttcaatataagactggggaacagtcttaattnnnnnnnnnnnnnnnnnnnnnttcagtaacaaatctgccattttgctagtgggtataactatgggtgacattaacatctttgagcctctttgtcatctttaaactgggggatcgtaaagtgacaacatgtatgtaagtacttttgcacaactataaaagttcataaatattaagtgggaaattgcttttggagacttcacattgaaaatacacattttgggccaggtgcggtggtttacgtctgtaatcccagtactttgggaggctgaggcgggcggatcacttgaggttgggagttcgagaccagcctgaccaacatggagaaaccccgtctctactaaaaaatatcaaattagctgggygtggtggcacatgcctctaatcccagctactcgggaggctgaggcaggagaatcacttgaacccgggaggcagaggttgcggtgagccaagatcgtgccattgcactctagcctgggcaacgagtgaaactccgtctcaaaaaaaaaaaaaaaaaaagaaaatacacattttggaatgaatttgagggtagacaaaggtctatattatatactatcgataggtgttgatttatactatctgataataaatgtattatttcctatttaaatttaggttctgtatatgccacagatttttcaaatgctagtacaactggactttttgacccatataaggtaaaaatttttttttcttctttttgaatcacmcmtttttktgtaatatagatagatttaaatttttaaaattagtttatttttaattgacaaatatatcatgtacaacatgatgttttgatatatgtttagaggtttgatatatgtaaatatgtatattctgatgatacgtttttatgctcagatgtgttggagtgggatgattacctctctaatttcgataccactttctctcctacctcctgtgagggacacaaggtaataataaacatcagacatagtaaccagcacaatggttcttgaattcattttgtttygtggggaaaagcattttattacatgtttgaaggacttgtatgttcattatgtaastttttggcttatgcaaaaaaacaatttgctgagttttaaaactaatatttctagagctgtaactaactttttaatgaattttatttgaagccacaattttggatcagtggatgaagagatatttggtgtgcctataccaatagttgccttggtaagtaggaaacttgagggattccctttgtatagtataaactaaagtaatatgtattaataattgagactagctttaagagaaacagaaggtctttggcagagtaagattaaagtatttttttttctttttaagttaaaggtccctggatatgaccagaatatctgctatatttttgggaaggggaccattgagccagtattctatcatggaagtactttataaccttttctgacttgcttgtatattgtttatcagaaaacttaaattaaaaaaaattttttttaattctgagtggtatttagtttacatttggtactctgagacaaaacacagtgatggggcgaatatttatgttctgtttgataatgtgtaaccacaaacagtgttagggcaacttaaactagcagagaaagttgtatgtacatttaataaagtccttagccatcatctaccagtaaataagtttgtagaataatgaaatatttgccatttttgatttttttttttttttttgagacagggtctcactctgtcactcaggctggagtgcagtggtataatcatgcctcactgcagcctcggcttcctgggctcaggtgattcttccaccccagcctcccaagtagccaagaccacaggtgtgtgccacgacacctggctaattttttgtatttttggtagacataggattttgctgtgttcccctggctgatctcgaactcctagactggggccttctgccacctttgcctcccaaagtgctgggactacaggcatgagycactgtgccaagcctgtttttgatttttaagagtcctttcacattgcctttgatttcctgtggcagcttaagcaggaggtakagaccacctgttgcaagatgtgcagtctccacagtagctgggggagcagctgagggaaagggaatttaatttccaagttacaaaatcattatcatttagagaggatcggtcttattcaatctaggcataggtgcagggttagattaaggtatggctggaagagttaccaattagtgacagagggttctttaaatgagttgttgttgttgttgttgtttttgagatggagtttcactcttgtctcccagactggagtgcaatggcatgatctcaccgatggctcactgtgacctccgcctctcgggttcaagtgactcttctgcctcagcctcctgagtagctaggactataggtgtgcaccaccatgcttgactaatttttgtatttttcctagagatggggtttcacgatgttggccaggctggtcttgaacttctgacctcaggtctcccaaagtgctggaattataggcatgagccagcaggcccagcctttagatgagttttgatccttaaaatgttgctgtttgtatatctacatttgactatattaacaaaatgttacaatttttattttaacaaaaatgtatggttgggaaatagatggtttttacttacatctatttatatcaaaacatttacctatgttttatattgtttaataaaataaataaatttgtgagggttggttattttgactaatgaatgaaacaaatgttagttgaaaatgaaaaaaatcttagtttttttttggttatcatttttattcttattttcttttttttttttttttttttttttttgagacagagtctcactctgtcgcccaggctagagtgcagtggtgcgatctcggctcactgcaagctccgccttccaggctcatgccattctcctgcctcagcctcccgagtagctgggactacaggcacctgccaccacgcctggctaattttttgtattttttttagtagagatggggtttcaccgtgttagccaggatggtcttgatctcctgacctcgtgatttgcccacctcggcctcccaaagtgttgggattacaggcgtgagtcaccgcgcctggcctcttaccttcatttctaagattattcatagataattaaaagtcgtgaagtaggttacccattaaaaattcctaaggcaggccgggnnnnnnnnnnnnnnnnnnnnttctctagagatccccctcaggcaggccgggcatggtggttcatgcttgtaatcccaacattctgggagaccaatgtgagaggatcgctttaggccaggagtttgagactagcctgggtaatagagtgaaaccccatctctacaaaaaaatttttaaagaaatggccaggtgcagtggctcacacctgcaatcccagcactttgggaggccggggcaggtggatcaagagatcgagaccacctggctaacatggtgaaactccatgtctactaaaaatacaaaaattagcttggcgtggtggcgcgcatctgtagtcccagttacttgggaggctgaggcaggagaatggcatgaacccaggaggtggaggttgcagtgagcccagatcacgccactgcactccagcctggcgacagagtaagactccgtctcaatgaaaaagaattagctggatgtggtggtgtgcgcctgtagtcctagctgccttgtagtcctagctacttgggaggctgaggtgggaggatcacttgagtccagaagtttgaggctgcagtgagctgtgatcttactgcactctagcctgggtgacagagcaagaccctgtctctaaaaaacaaaacaaaacaacaacaaaccaaaataaaaacaattcctgaggcatgtcagttatctgcagagtattagtcctagggagactcctatcctatggttgttgctccctattctctttgggatttttttttttaattttaaggaaaaggaaaaagaaacgaagatgtttaatcatgagagtacaataagtgagacaatgctctataataaaattggccactgttaagggcaatgggtttacatttgaacatttttggtaggttgctgaccagcaatcagccatgtttggagagtgctgcttccagacaggtgatgtgaaattaaccatgggaactgggacatttttggatattaacactggaaatagccttcaacagactactggaggtaagtagttaggatttatcctatttattaataaaatatcacttctgttcatatttaacttctgtgatacttatactattttcccattttgtgatattctctaacatattttattattcttaaagacagttaattatcatttccctttcttttccctttaagtgaaaagcataaaaaacaagaatgatattgttgaaaaattcaggatatatggtcagctttctgggtatttttctataacacatgttgtatttgttcaaaactccttactaggggccgggcatggtggctcatgcctgtaatcccagcactttgggaggctgaggtgggcagatcaccctaggtcaggagttcgagaccagcctggccaacatggtgaaaccccgtctctactaaaaatacaaaaaaattagctgggggcatggtgtccggcacctgtaatcccagctacttgggaggctgaagcaggagaatcacttgaaccggggaggcagaggttgcagtgagccaagatcgcgccactgcactccagcctgggtgatgcagtgagactctgtctccaaaaaaaaaaatcttcttactagggttctaaattttttttttctatttgttagaaaattattttgtgaatttctttgagtggtagtcctcagctagtgaccaatgcaatggataatgacaattgctaagaatttgctctttttaatagaacaaatcctgggatttacagaccaagaaatctagattatagaactatactagtttgggctctgtttccataacatggttactaagaggtggcttaaaaaacctttttcctaccttttatccctcctcaagctcttctttttcccctaactaggaagatggaattagaaaatgttgataattctattagattgtttctatttaggagccttgtttgaaaaccacagataaatacaatagcatagttctctagcaaaccaatctcatagtacccttttatttctcaagtaaaatatttattgccatatttctagagatgtagacatgcctatagctaatacaaattagtatttattgttcatattatgtgccaggcactgtgctaagttctttttatgtgttaattcagtttgttcatttcgtagctctctgaggtaggccgttttgtagttaaggaaactgaggctaaaaggttagaaacttgcaagactacagctagtaaatgtaagtgggctagagtttgaacgtccacagtctgacttcagaggcactttgcagttttttgagataaccaaatcattacattgtagaagtctctataatgaattatgcatatatttgacttaacattcgttgtttgttttgcaaggcttttatccattaattgggtggaagattgggcaagaagtcgtatgcttagctgaaagcaatgcaggagacactggtactgccataaaatgggctcagcagttaggtaagttgtcttttaaatggatttcacaagccagacctaaagaattcaagaatgccacaggattgcagattagtaggaagcaaatggattgttcaaatgaaacactaaaataaaatgacatctattaaaagaaaatataaagtatttttrtgatatcgaaatggtaaaaggctaggtcttaaagacaggaaccataaagaaaaagaataataagtttaactatgtaaaatattagtgggtaaggagagatatgccataagcaaaataaaagacaaattggtaaaaacaatttgtagcatatgtcagaaaaattaataacatgacaaaaatgggcaaaggaccgaagtacaggtattttacgatcaaatgactataatgaaatgctgttcacgtacgataattaaagaaatgcacattttgggctgtggttccagtgtcagttcagttttcagtgcttttgcagtgctatttggatccgcccctcatttgtgccacccagtggtcagtctggggggtggtttgcctggagattagttctcaaagccttaagcttgttgtttagggtcatatcttcacatgtgctgctcaagagtgagactaggagttcataaaaacctttataaggtaatttttcctgagctcctttctctcagtaatctccctggtaccttttgactcttgggatccccatattggtgttctggctagaaagctggtgctttagtttctctactgaacagctgctactacttctacctccctagcttagtggcaagagggatgagagaaggagaaaaggggggtcagagagagagagaaggaaagaagggaaagaaaggaaacaaagaaagagaaagaaggctgggcgcggtggctcacgcctgtaatcccagcactttgcggggctgaggcacgtggattacctgaggttgggagttcgagatcagcctgaccaacatggagaaaccctgtctttactaaaaatacaaaattagccgggcatggtggtgtgcgcctgtaatcccagctactctggaggctgaggcaggagaatcacttgaacccaggaggtggaggttgtggcgagccgagatcacgccattgcactccagcctgggcaacaagagcaaaactccgtctcaaaaaaaaaaaagaaaaaagaaagagggaaagcaaaagggattttcttaacgtctcatctttgagttttggttgcctctgctgctctgtctgctgtcactgcagccacaggattgccaggggcaggcaagaccaaggggagtgggcgcacgggaagaagcaagcaacagggatttccccccrtaytcttagcttgcagttttatgtgcctgtgctactgggctgccattgccgctaccataggattgcctgggagaatgaaaaaaatctaaagaaaacaaaaaatgagaatctctccactctgtcctgtagagacccttgtctcctactgctcagaccagaaaggagcttctattgaagctctttcatgtctgcactcagtgtacagatctgagtccttgggtttcaggctacctctgagtctaggccaggaatatcagagaaaatataaaaacagggagtccccagacggcttttccatttattcctccaagattcttagttrcattcagtgggggagagagaatggagtgtgcttactctgaaagactttttatcaattagcttatttgacaacagattaagtggaagattatttagagaaattcttcaagcaaggaatgaaacaaacagtgaggaatgtgaataagataatctctctttgttttctgtttctttatctgttaccaacaattttcctcaaaccaactgtctagtatgttttcctacatcttatcttgtaaaaattgaacatttggacaagattcattaaaaagtatagattttaaaaccaatttttttaaagagataggagtctcgctatgttgcccaggctggattcaaactcctgggttcaagtgatcctcctgcctttgccttctgagtagctgggattacaggcacgccaccatacttggcttaaaaccagtgtttttaacattagtttttgaagtggtagagatattttgatgtattatctggacattttgaacaaatggatgaaacttacggatttgataactgtcattttgagtaaaatttgtagttattattgagtgatcctcattaacttgagttttaatgtaagtgctccttaaatgtctttagtgaatttaagtatattaatttagttatataacaaatcataaaatgatataaagtcaacttaattaaggctctctaaagccagcaatatttattacgactgagtcttttcttctgatctttgctgttcagtcctacatactcattcagaagtcactttacaaacaaggatatccaaatggccagtgaaaaggtatttaactttattagtcagcagggaaatccaaaatcaaaccaccatgtaatactaccaaaatagctaaattgaaaaacatagacaatatcaattattggcaggaagataggtgacgaactctcgtgcctgccgctggcaggagccttaaattggtagagccactttgaaaaactatttggcagttatctgttaaagctggttctaaatgtgaagaccttagaactggccattccattcctttgtgttaataaacagaaatgtatacatatgtccaccaaaaataatgtacatgaatgttcattgggatctgtttctattagccaaacactaggaactacccagatgtatatcactaatagaataaattgataaattgtctatagtcacataatagaatactatatagaggtgagaatgaatggagtacaactacatgtaacagtgtgaatgaatctcacgagtacgatgtttaacaaaagaaatttgtatcttgacctgggtgtcagttacttggatgtattcacactgtgaaaactcatctagctatatacacttaggatttgtgcatttttctggtctgtatatcatatacttcagttaaagtttactaaattaattgtcttggtttttttgtttgcttgttttttaaaaattgacttttaatatatctgttactggccccttatttaacttattagatggagtatttcagttaattttcttgggtattatattacaggtagatgatactttcatcagaaacctaggatggctcttatctttcagaggataattttttaatgccaaaaatcctacatagaattgattttttaaacagcccaaatatctttaaaggaaaaagcagccaggtgtggcggctmacrcctgtattcccagcactttgggaggctgaggcgggcgaatcacctgaggtcaggagttcaagaccagcctgaccaacatggagaaaccccatctctactaaaaatacaaaattagctgggcgtggtggcacatgcttgtaatcctagctacttgggaggctgaggcaggagaatcgtttgaacctgggaggtggaggttgcggtgagccgagattgcgccactgcactccagcctgggcaacaagagtgaaactccgtctcaaaaaaaaaaaaaaaaaagaaaaaaaacgtaagkcctgctgcatacagagcctatctaagagggccttctacctcctgtctcccttctatgggcctggaaacctatgcagtgtgagaattcagatagtaccagaacagaatggtctttgtgctgacccttttaartgagcaatcttttacattatrttcataatawatgttgatgcaggtaaatactatcatgtaacataattctgtttgtgcctctctaacctcttcattttgttttagggttttttgttgtttgtttgtttttgcagaccttttcacagatgctgctgagactgaaaaaatggccaaaagtttggaggattctgaaggagtttgttttgttccatcttttagtggattacaggtatgtattttttaaagttaatggcaatcacaaatatttttctcctcctgccacatccaaacttatatatctaccattctgttaccttaaaatttgagcactgaacagaactaagatgaaaggtagattttagggctgagaagttatgctctgaccaagcatgaattccatgaggaagcagagcatcctgaatgtggccctgctggcttggcttgtgctggtagaattcagctgacttctgcttagaactgtgtggaacctaagagttggcaggtttatcatagaacttttacataagacttagcattactttatcatgaccaaaaatagccatttcacagtggggggaatgtatcagtaaatttgcattctttacttagaggaaataagccattgagaattaagataaataatgtcaaggtacatacatcacacacatatgcacacacatgtatatgtatgtgtatattttgcacttgtacatttgtaagttttaaactttttttaaaaatcaaaatcttggctgggcgcggtggctcacgcctataatcccagcactttgggaggccgaggcgggtggatcacaaggtcaggagatcgagaccatcttggctaacaaggtgaaaccccatctctactaaaaatgcaaaaaattagccatgcatagtggcacgtgcctgtagtccaagctactcaggaggctgaagcaggagaattgcttgaacctgggaggtggaggttgcagtgagccgagatcatgccactgcactccagcctgggtgacagagcgagagtccgtctcaaaaaaaaaaaaaaaaaaaaaaaatcaaaatctcctttcattaattgttgtggtggagtattgattactttgcttaatcaaaaaatgaacctaggagaagtcttgattttgtaacatttaactttgtatttaattgaaagatctctgatactacctttaattttagaatattattacaaatacttttaaaacaacttttcaagtatattattatgaaagttatatgtctatcatatacttcagttaaagtttactaaacttttttttgggaaagctcatactatttttaatcctcctccaaatattttttcctttcaaaaaatacaactttctctttcttcttgcttatgtcatattcaggcaattagttacaaaagtccaaaatttgagtttgggtttataatatagaagctggtagaaaaaaaaattaggtcagggtgttttaaatctttaaaaatatcatacttccaaaactagattttaaaatgagcattatttcaatacctgtaatatttttgtgtactttatcctaaaggaccgagagcttgtgaattgattccattgcatcctcttcaggatgatgtgagggaacctctaaatagcacctatcatagtccagaaagtgaaaattttttatctaattgagatttcaggaaaaaggttagatgaataattgtcctcagcaaggtaaggtttggttaggcaactactggttcttttcttctctctgaaaaatgtgctacaggacttagtagtcaccttgtcttagcaagtctgtctttgacttctctatcacctcacatacctgtaatataatataataattatatatattatataataataataatataaagtatatttttttaagttttaaacccaaaagatttagacaaaactatctcaggtttgatttttaatttcctcttgatagcaaaatgtccctgtcctgccatgattgcaacctgcccatatactggcagtagagggcagttgggagaggtggtaggttgaccgtaggtcatgtatttccctgtgtaaaatgaaactttaactggaaattgaaagttaaaccaaacagcaataatgtgttartactaaactgtttggaaaataggagggaagatcacctataatctgcctatgtgaacaactagagaaaatgagggatggggcatgaaaggaaggaaggtttatgtatctgtgaaactgcctttagttttagaatatttttacagctttagataattgggatctggatgttgaaggcccctaatagtctcattttctcaaaggaatctactgagaaaggggtactgggtgagctttgaggaaaatgggaaagtctaggacagccacttcagggaatggcagaaagggtgggagccatacactgggggtggcatcagttagtgcaaccattatggctttcctctagcagggctcgtggtttggggagtgggatactgaaataggtattagaggcaagaaacagtggtcatttacctggacgttagagttactgtgatgatggcagtaataggatagacagagaagctgtttgtccacatactcttgaggactggtattggaaagcagtcagcaactgacagcagttcttagygtctttgggttcctgcttctctctgttctgcttttctcttttcattaccagctttgctctgtgtcctttcttcctccatagcttctgcttaattgtcatcatttttcttacactttttgcttcttcacaacttagaaatatcacatacaaccttcctctaccttatgcatccttttagcttcagttcccccattgatgaggtctttttcttcgggtttcctggttttggttttcagggcagagaatctgattggaccaccttgtccttttgcgtttcagtcagacactgagtcagctgtactcaccctctgcagttgtggtgatggcattaggactagagcatgaaacatggcagctttagttaacagggcctgtggattcaagcagtttccttagaaggggatgaagccagcaagtcctgtgattgccatctctagttttgtgagtgactaggatgtctgaatggtgcagtctgtgttctggggcaggagactactagttttgcccagggcaccaaacagatttcaggccagttaaagcagtattttctgtgatatcctggaagaagtcatatttatgcaggaaaaaaacatagcatattgctagggactaattgaactggccaaatctgactaatcttagttttatgatactataccatctgatataaaccagatttactatatacgtttttactaattaaaatcaccagaaggtgttaatagatttgaaaaattaaaataaaatctcagtaggagggaaatcatagctatagcaaagataagatgtaatatagaatttcttaagtcattaagaaaaatattgtttgttcatttattcaccaaatgtgtattgttctcccatggggagccagatatagtgctaggcacaagagacacactgggagtacatcggacaaggttccaccctgtggtacttatagtgtattgaggaaggtggggtttcaacaaaccatcaagcagaatatgtgattataaactgtggtgcatggtatgatgggaagttacagggttccataaaaacagagacctcatctagtctctggggtccagagttttccctgaggaagccaaaccaagatttggaagggagtaagaattaattaggagaaagggtggtagaaggtgtttcaggtaaagggatgatgtgtcaaaaccctgaagctagaaggtgctttttctgaggatcataatttcctgacagcgctggatgtccttgaaatgaccattttgatgtgttagcgctcttgtgagactcttgtctgtttccttgtgagactgtgagactgcaagctccagcagggatctttgtttttcatgttttttgtttttgtttttgtttttgtttttgtttttgttttgagacggagtcttgctctgttgcccaggctagagtgcagtggcgccatctccgctcgctgcaagctccgcctcccgggttcacgccattctcctgcctcagcctcccgagcagctgggactacaggcgcccgccaccatgtctggctaattttttgtatttttagtagagacggggtttcaccatgttggccaggctggtttcgaactcctgactcaagtggtccacctttgtcggcctcccaaagtgctaggattacaggtgtgagccaccctgcctggcctgtttttcatctttgtgtcccagaattgccttacatttctggagatacaaagatgaatagaaacctcatctgattaatacatacttccagctcaacattttggctcttttgagaacatgttaggctggattatttctgatattaggcagtaaggctattaagctaagagagaagagtgtagtggtgttttttttttttttttagaccctgtctcactctgtcacctaggctggagtgcagtaacgcgatcacggctcattgcagcctcaaacccctgggcacaagcaatccttccacctcagcctcccaagtagctgtaactacaggtgtgtatcacacccagctaatatttaaagttttttgtaaaggtggtatcttgctttgttgcccaggatagtgttgaattcctgggctgaagcaatcctccctccttggcctcccagagtgctaggattacaggtgtgagccactgcacctggccagagtatagttttaatgtctgacaacatatttgatttaagttatgacactaaaaagtacatttttgtagaaagctattctacatagtaaaaagtagaaagctattctacatattaaacaattttagtgtaaaaactttatagctggagaagggggattgctgtgattgctcttcattttccacatttataaagctaagcatttaataatttgttactatatgcttcagttcctctttctgacataaatgcaaacagaagctaagtacagtaactatgactcaatatcgcttaaatgctgttaaaaagttatcccaatatttaccataatcttttattttaaaattatttaaccatagcattattttcttctaacgtggctatgttgttgttgtatagtatttcctcaagtccgtagatgtaatttagaataataataatatattcttgttatctcttactgtaggctccattaaatgacccctgggcatgtgcctcttttatgggtttgaagccttctaccagtaaataccatcttgtacgagcaatattggagtcaatagctttcaggtatgaaaacctgccctaaacttccccttccccatagaatattgccatgtctttcattaatttgctactaaatggaaaatttcttaattttaattaaattctttgtatttttggcttatttgatactatatattatgtaatatgttcttcttgctaatttccatggtatctttcttattttttcttatatttaatgtaccaacaccactcagacttgatatctgaaaatygaaggatttttttaaaaaattcaatttcttaagcatgcaagattcaaaatttggattttcaaaggtttagtatccttattcatgaaagataattccaagtaataatgcttctgttgtaccccaaaattgagtcatcagaattattcttctgcatatttccctgtaatctttttgttatgagacaggtgttaattattaaaattaagaatgatgctgtcatgaatatgggatgtttgtaacatttaaaataaaattttctgtgattacaaagtaattgtttttatatttgatgaattctattagattttacttatggtttgtcatcttaatagctatctattaaatagatgcttgttttaaatttttctttgtasaatggtaatagataaaatttagttgtaaaatataaattatgccttcttacatgaaggcaaaaaaaacacaaggacctgcgcttcttgcttatttgagtatctgttatacagtttccatttagcacaatttatttctttaatattttgttttgtacattttataaatatcaaataaataaaactatagtttgtatttttcaagatcagaataaagtagtgaattattatgatatgaatttcttataaatagttatcttgttttttaactagaaacaaacagttatatgagatgatgaagaaagagattcatattcctgtaagaaaaatccggtatgtaaagtttatttctaatagacttaattagaaattagaagtaagtggtagctgctatgagctaccactcatttcttttttagatcctgaataattcatctttatgattattgaggatttcaaaaataatttctgcttagctccttcacaacaaaattcttttttttttaatttgtatttttatcgagacagagtcttgctgtgtcactcaggctggagtgcagtggcatgatctcggctcactgcaacctctactgcctgggttcaagtgattctcatgcctcactatcccgagtagttgtgactacagacatgcaccaccacgcccagctaatttttttgtatttttagtaatgatggggtttcgccatgttggccagggtggtattgaactcctgacctcaggtgatccgccctcttcagcctcccacagtgctgggattacaggtgtgagccaacgcgcccagctacaacaaaattcttggtcataggaattcagagaggaaaggagagctaattgtggatttatggagaatataatacaatatcaaatttgggtgcatcttggcacccatatgtgtagtatatcaatttttaaaatctcttttttgggtgtatatcctttgggcatgtaagcatcaaacttctcgactttcttttctgtaatatctaagtgaatttttatgttgccttagtttattatacctggcttgttttgaactagtcctaagacaaacaaggacaggtgagaaaattggtggcagaaataaggaaaatgtttaaagattacccagtaaggttctctgtcattaggttaatgctaagtgatttaattttagaattaaaaagtaaaacttataaaataaaatcaaggatttcaggaaaaaaatgtggcccactgaaaaagaatgatacttttgttgtagtaattcatcttacatattttgttccccacagggcagatggaggagtttgtaagannnnnnnnnnnnnnnnnnnnnnnnnnnnnnnnnnnnnnnnnnnnnnnnnnnnnnnacattgacatgtcatgcctgggtgcagcttctctagctggccttgctgttggtatgtgtgaaatttataagaatgagagttttcttgcaaactcttccttacagatagcatttctcctctcaaattacaaaattctagagagtctggaaagccttggcgtccattaaactccatacacatatgcatattactcacaaaatatcctgtgccctcctctgttggtgagtctggttgcacctcttctatcctcacctcaccccttcagtcagaagtatgagacaagaacagttaattctcagctgcgtcagtctctagcaacagacagtctctgggtaaactttctggatagatagtgttaaagaaaaaaattattcagtgacacttattaaagaacaataaggtgagccaggtgcagtggctcatgcctgtaatcccagcactttgggaggctgaagcgggtggatcacctgaggtcaagagttcaagaccagcttggctaacatggcaaaaccctttctggactaaaagttcaaaaattagctgagcatggtggcacatgcctgtaatcccaactacttgggaggctgagacaggagaattgcttgaacctgggaaggcgaaggttgcagtgagccgagatggtgccactgcattccatcctgggtgacagagcaagactctttcctcaaaaaaaaaaaaaaaaaaaagaacagtaaggtgggctttattctggaggactatcaagaataggtatagggactacttcagtgggatcttatggtgggagagagaatttaggctcaactttgaatacaataaggaaaagtgagaaattatagccaaagagcagagtgagagtcagtggatggaaaactactaagaggaaacattgaggtaaggggaaattcttgctaaccaacctaataacattctcaggaaggcaggccagggtgatcagatatcatctggaggatactggaggatgagatatcgaggttgatcagaaattgaggatgggctacactaatttagcagtattcttgctcaaattagataatgcagagatgaccatggaagtccaaaagttgaggccttgaggcctagttggaaaagagcttggaggagcctgagtggagtttggtcaaggaggaaactttgtcagtaggtttgcctatggcattagaaaccactccattcttttatttattgaacaacgtttgtggagcacctgctacatgacaatcactgctggcaataaagggattaaaagccatagtctctgattcctggtgggaggagacaggtaagtcaagtgattattaagtttgtctgataaagccagtgaacagtgacagtgttaataagcaagtggtctaggcttcccagaggagatcacatatggttcaattttgaaggggctagcagagagtcaggtgaggagagggtaagagatggttggctcaatatccctattgcaacttgtgcaaaggcattcatcaatgatgggaagtactgttatggtgagagcaagaagggagtgggagaggtacatagaggtgtagttgtggtgactcctcataaagaggagttcggacctgatcctgaaggcactggagagccactaaagaattttaaccgggggtgggggggtggggaccatagaaagatctgcatttgaacagatcgctttgacaattagtgaaaagatcagtgaggaggaataagaatgaaagtaggcatgtcaatttaaagggccccctagaaagcaggatgatgccttaggatactcagagtattttaatgtgtttctttctgggggatgcttggtacaaaataagatattttacatttaaaagttttaggctaatagtacattaaagttacaaaaagcctaaaatcttggtaaattcggcttaaacttgattctactaaaaatctggtaattttgaataaaattgaaagttactttcatttgttcattgattaacgtttgattgaagttgaagaaaataaactttcccttaatcaatcccatttgcaaatttgaactccttcatattccaactcctgtaaatttagtatgtttgattttcctcttattactttcacgtgcctgattgagcaaacttagaactgtaacaaggtaaatcacgaatacttaaacaacaaacaaattgaataaattaagctataattatagtatatcaaggtctcataagcatttttatacttatgttaatcaaattcttctacacttttcaccttataagactaaataagtcagattctcttgaacatttaaaatgctttaagtaacaaacacatgcagggtttttgttttgttttgttttgttttgttttgtttgagatggagtctccctctgttgcctaggctggagtgcaatggcgcaatctcagctcactgaaacctcctcctcccaggttcaagcgattcacctgcctcagcctcccaagtagctgggattgcaggcacccgccaccatgcccagctaatttttgtatttttagtagagatggggtttcgccatgttggccaggctagtgtcaaactcctgacctcaggtgatccactcgctttggcatcccaaagtgctgggatcacaggcgtgagcctctgcgcccagccccacatgcaggttatttttatacataacacagtgacttgagttttatctacatcattatatttaatttcagatatttgcttctgtctcagaaatgtgagactatgtatatcctctgtattttataaatttacccagaaattggatttgctctatacatacttaataaaatgtcttaaaatatatatgtcttaaaatgtaaacaataaattctggaaatgaggattttaagaaacacatttattttcctgactagatttatctaactatagtatactgatgaaaactatgtttttcttttaaaaacttgtctacattaatacctttatttatttttaattaaaaattttttttttttgagatggagtctcactctgtagcccaagctggagtgcagtggtgcgatctcgggtcattgcaacctccgcctcctgggctcaagtgattctcgtgctcagcctcctaagtagctgagactataggcgcgtgccaccacgcccagctaattttttatattttagtagagacagggtttcaccatattgcccaaggtgatctcaaactcctgacctcagatgatctgcccgnnnnnnnnnnnnnnnnnnnnnnnnnnnnnnnnnnnnnnnnnnnnnnnnnnnnnnnnnnnnnnnnnnnnnnnnnnnnnnnnnnnnnnnnnnnnnnnnnnnnnnnnnnnnnnnnnnnnnnnnnnnnnnnnnnnnnnnnnnnnnnnnnnnnnnnnnnnnnnnnnnnnnnnnnnnnnnnnnnnnnnnnnnnnnnnnnnnnnnnnnnnnnnnnnnnnnnnnnnnnnnnnnnnnnnnnnnnnnnnnnnnnnnnnnnnnnnnnnnnnnnnnnnnnnnnnnnnnnnnnnnnnnnnnnnnnnnnnnnnnnnnnnnnnnnnnnnnnnnnnnnnnnnnnnnnnnnnnnnnnnnnnnnnnnnnnnnnnnnnnnnnngctcacgcctgtaatcccaacactttgcggggctgaggagggcggatcatttgaggccaggagtttgagaccagcctggccaacatggcgaaaccacgtctctactaaaagtacaaaaaattagccgggcgtggtggcacgtgcctatggtccgagctactcgagaggcccagggcaggataattgcttgaacccgggaggtggaggttgcagtgagctgagatcgcaccactctactccagcctgggtgacagaaagagactctgtctcaaaaaaaaaaagttctcttgctttttattatatatcatatgatccttccttcaaagagcagtctatgctagaactacaaaattatcttaaactggaatttaaataaattatataaaaggctatagtttgaaagagaaactattacattaatctccaactttgaattttatgcatattccagaaagttgacatttaccttaagctgtaagacaaaaatcttaatttgtcttcatttattgtaattgcataaaaaagaaaatatcctatttctttctctttttttttcttctgtttttctatttttagagacagggtctttctctgttactcaggctggagtgcagtgatataatcatagctcactgcagccttgaattcctaagcaagtggtctcccctcctcagtctcccaaagcactgggattgcaggcatgaaccactgtgcctggccagaaaatatactgtttttcacttgggattgttttaataatagcaagttatgaaattaaatgatggcatagggtagctgctttagaagtgatgtggtgtcccaccacacagaaactgagctgaaagttagaaaccaaaagacttgaaaatactggtataattattttcaggaatgatcgatctaacaaaattcaaaagtaacaaagtattttggattgttttaaaaatagtttttgtttacctttctaccagcaactcgtataggtttttggataaactttattggactcatgatttgccttaaaatttgaggataatttttttatctatagggttttggactgacaaggaggaactaaagaaactgagacaaagtgaagtggttttcaagccacagaagaaatgtcaagaatatgaaatgagtctggaaaactgggccaaagcagtgaaacgctccatgaattggtataacaagacataacactaaatgaaatgatcaaaaccataggtagctggtttatgtgacgtgcagatgagatgaagctcagggataacccatatgacaatgactaagaggagaaaattttaaataagcttcataacttaagaagcattgcttttaaaaaaacaaaacggaacaaaaaactcttatttttttcccctaaaccatggtaaggcagca

SEQ ID NO: 96611 - DNA, 13151 bp, Homo sapiens
ccaggatggtctcgatctcctgacctcatgatccgcccatcttggcctcccaaagtgctgggattacaggcgtgagccaccgcacccggtcccagctaatttttatatttttagtagagatggggtctcaccatgttggccaggctggtctctagctcctgacctcagatgatctgcctgccttggcctcccaaagtgctgagattataggcatgagccactgcactcagccaaattgtcccttttctaatcagcacttctacccccacaccactgtgttgctattgtaaacaatgcagatggttgttcaagtattctgtgaatgcaagcgaaacataagctaacatggagagatgtttctggaaaggtgtgaacaaattgagtcaaacccgcatgtactcagagcatgcattacataaaggaaactcgaggtgggctctcttataaaatgtacagtcttctcatatctgtcatataaagacaattcacttgttttacagcttcatatagttaaagaaactcatgtaatttgtctcaagtgtttaagaaagtcttcatttaattaaaaagaaaagtacagttcataatataacagagccaggtctgccatttctttgttcatatttcatcgtttcgtgccagtcaaactacctgtcctgtgacaagtggaatggagcttgcatgttccctattaattgataatggtgttaacaagggtttattatatctactctagaaactttggaaatacagtgattcttagctattccctggcagatctcaatattctctaaattagactaacattttaccacaaaactcgaatggtaattgccttcttccaatttaccaaagaacttaagttgatagttagaatcctctgtgcagtacatgtgtgaacacatatgtgcatgtacacatgcataaattagtatcaaagacatgaacagtttcaacttgttcagtaaattgggcagttgatgtcagggcacatgtagaagttgaattttcttaatattcatttgctctgctgctgcttatacttgccagcgaataatattaaaggaattcctaaaatagctgttcattgtttgattaactgcctcttgttcttgtttttcattaacatttgctaatgctgttataatatagtgctttctaactcttttcatgacaggacaggacatatatatatgtgtgtgtgtatatatatatatgtatgtatatataaaatatacacacacagttataatgtttatatgggacactggggtaaagggctcaggaatttgcccagaggctgaggcgatgagcacacacggaccctcttcaaggtgtaccgtcgtacgctgtgcacagcctgagaagctgtaaggtgccacatcgcagacatcatatagtcctgatttctgctagcaacattgtttccgtgatcttatgatcattaatcaccagtgttctgtttcatcatctacaaaagagcactgttactctccagctgttccccttcctgatgaacttgcgaaagtggagagaaggatataaactcagaagtgtctttgcttggtgggtaaattaggtctccttgctatgttccttctgcaaccaaataactttctgcgaacacttaatgcagagcttgataccctgagggttcagaagggaagagaccatcaggcagtatggtctttgcctcatttctaaaaagcttctggttatatctgagctgagctgcttctaaatgccagggcctcccttgaccatgtttcttttttctcacacgctcctttcaaaaggacaagacacatttaaagatacaattaaatatattgaagttacaaagcaatttaaagaaattaagcaataagacacacccaaatatatgttacaaaggaatttaaagaaattaaagtaaatagaacattttcctcttttatttgcattgaaataaagtattatttctttactcctagtatgttattggaactgtgatatacttatttagaaaaaaaaggtactgaatcctggaattcaaacctaatcttaggtttgagtcccagaactaccacttatccaatgaaatgaacaagcatagttattgtttaagccttctcaataaaatgggactgatgatacctgaggagatctcatgtatgaaaatattttgtccaaaagcaaaaggtaaatacaattggtttttgtattaaaagggctcaatgagccctccagtccagtggcagctgcttgtaggaattcagacactcagttggtgagggcagctctggtgatgccaagttgacgtgcgccctccctctttatttcctccctcgccctgcagagtaacctgatccactacctgggactgagccatcacctgctggcactgaattttatcattgtttcttttggcaaaaaaagcgcgtggtcttctgcccaagtgaaggtgaccgacacagactttgatggtgtggaagtcagagtgtttgaaggccctccgaagcccgaagagccactgaaacgcagcgtcgtttatatccacggaggaggctgggccttggcaagtgcaagtgcgtcctggtcaccttcagatggtttgttgttgtggttggccttgggggagatgtgtaactgagtttggctttcttagtgggaaagaaggggaccatttatctaggttcccctggatggtcccagttacccctgttgtcccagcaaaattattactagtgcccccttttcactctcaaaagggtcctggtttgggtgataaattaaatggttatcctttgtaaaggttttttgcttgttagtttgtttgtcaattcaggtagactgttgtaaaaatatttcctatgatctaaatcacagactaacttattgtgcagtgctgatacagctttctgcaccaaaacaaggtgaagtttcaccaggcacgcatatggggaattatctgtgcttcttttgccaacttgtgttttgaagatatatttctatgaaatagaccaggtattccttaatacacatgttaacattttatctgcttatgaaagcaaaggtaaaaatatatgcaaccattcaaaggaaacaatcttgcaaagttcaagaatattttctttagatttggatgatttttatgagtagaacacattcaaaatggcaggcagccaaacagagccgcccagaagagaacctcccaaggcggaattcggggtcttgtctctgctaataaatgatcatggagctacttcctcatcttcagtccagagcttttggcatccccttagtttaaaagcaatggcaacttgttttttttattttatcattatgtgatttttttttaaaagcaacaaaggtcaaaaggtttgactttttctagtaatcttatttaattccatatccgttgtttattcttttattcagtgattttttttcacattttcaatagctgttcatgagtatgtaggtttgcccgagaccaaggggtttgctgggctgcaggtctttcagtgcaaaagctcaaacagttgtgggcaagtctggaccattggtcagtctaaggtgtgctcgggtgtagggatacaaaaatgaataagaaggagtttctgccttaaaagagattgaatctgtagcattggacgcttgccaggaaaaacattgtactggaggacagcaagtatgggtgccaggaatgggatggattacaagagtcagcctggccttttctgcataattttgactgatcacttctgcctgaggaagaacttgagcaggtggaggtaacaggtgtctatgtaattcttaagcttccgattctaagactgccttggaaaccctataaataaggaaatgtttggctctcagttggcacaatatagatcttaatttactgagagtaactaagaattaaattcttacatattaaattggttctgttactgcagacctttggaatcctctaagaaatgctaagacttcctaaaattctagttttttacgtgttcatttaaagaaaataccatattcttcaaattgatcactttactgaactgcagcaaatgaagtgttaaaagagcaaaattgttaaaattattatttttagacataagatctcactctgtcacccaggccagagtacagtggctctatcacagctcattgtaacctcaaactcttgggctcaagtaatcccccttcctcagcctcccaagcaactgggactgcaggcgtgcaccactatgcctggctaattaaaaaaaatttttttatagaggcagcatctggctatgttgctcaggctggtctcaaacttctgacctcaaatgatctccttccttagcctcctgaagtgctgagattacaggcatgagccaccactcccagcctaaaattgcatgattctaaggaagagactgcttatttgctgtgattttttttccagaaagatgtatacatttgaagagctataaaatcaggattaatttggtgcatttcatatagtccgttatgaaataaatatttagatagtaatatattcaaaactaaactatgcatttcctgttatatagtagttgcatgttattagaaatcagatttaatttttcatgtgtacatgtaactctattatttgttcacatttgctttttattatttgtttttagtattagctccaagcctaaaaacaattcacacttagcagaatttatgagtggacagtattaaatgacctgttttgtaatgattgttccctttgtgtcttttagaaatcaggtattatgatgagctgtgtacagcaatggctgaggaattgaatgctgtcattgtttccattgagtaagtaattaatgctagtcatagaaaatttttcttataaaggaattctagataacagtctggttactttgttttacaagtgataaagtaaaaaataaaggtctcaagttggcaaagagatatgcccaaagtcacactcagcataatcagaaaaatgatttctgatgtaacaaaatttattgaactagctttataacacttcaaattaccttttcaccgttagttttgaaaactgaaaaaaggattaactaaaaacctagagaagtatgcaatcagttacctgcaacatataactttttaaatctaaaaagtagtaaggattttaagagaatctcttctacagctgagagttgaaaaagttgctctcttagagtcaggttctatgacttgtgccttgggaacagaaatacgtgttcaacaaattttaatggtgtggttagtagtaatagtagtaatattaatattttgggttgtctctgtcagttctgtataagccacttttctgggcaactaagaagaatgtgaataataattataataattttgatgataataataatacaacacaaaaatcacgccatcttttttgtaccaggcattgtgcgaatgcttttgcacacgtgtctcttcttctttaggtcttttttagataccatcctctcagccaagcctttttttgacaagcctttgtgaaattgcaacccacgttcctctgtttcatttctctccaaagctatcatcaatatctgacaaaccacatatttgacttattatgtttattgtaataagtggaaatagacaatatgaattttataaaggcaaacatttcaggattgttgtttgttttgtttattgctgaatcattagtgcctggaaacatccctggcatatggtgagcattcagtaaatatttatggaatgaatgaatgaagcaccttaattctcatataaaacatccaagatattttgatatctttttcataagtgaggaaattgagacccaagaagctaagtgatgtgcataaggccagatagctagctcatcgcatagatggggtaggggaataagtcagatagttcctgaggtctctggacctttttgatccagtttcaagccactattgaagggagcttataatgctgagtggcagggccatgacgccaaccactttttcttgccccaggctcattcagttctcttcttccctctgcctctctgtcagctatcctcctgttcatggtgcgccacctccttgctcctactccagatttgagtggatcttttcttctgcagtctcttgaaaggggctgctcagagtcactgaggcagttctgaccctgttgacagaagccctagagtcacccaaaagccctagagtcacccmaaagccctagagtcactcaaaagccctagagtcacycaaaagccctagagtcactcaaaagccctagagtcacccaaagccctagagtcaccccaaagccctagagtcactcaaaagccctagagtcacccaaaagccctgcagtcacccaaaagccctgcagtcacccaaaagccctagagtccagacagctggagccaaatctgctgaggaagcagccaccgcacctggacctttctggactctcagcaaggcctcccagattactcaagggttgtcagtgcagwttggtaatacaggaaccttcaaggaaatgatttgggcagttggcctgagcagctggccagaggaaagcacaggggatgtttaaggagacaaggccctacagctcggtgttgaggaacaagcttcaggggccattcagttggtttcttgtgtagccccagctccttgcaggcctgagaaaaggagggaagctgggcttgcttcagttggcaccgtgcagattttccatttaccacagggcctaccctccgggcttcaatatcactatttggccacatgccctaaaccgttcctccattcccttctccccttatcagcatctgtctcaagtaaaatgggtattgcaaggcttatcataagacacagaagaataagatatatttaagaggatttttttgaaaagggctaaaatttagaagggactgctttgatttaaactttgcattgttcctaatctatacaacatggtgtccagatgggaggcatgagcatatggcagtcaagttccatcactcatgactgtgtgacctcaagcaggtcatttaaactcatgtgcaaaatggggttgagaacccttcctgtatgtttagaatgtgagctactgggaaaacagtgaggtatggtggtgtgccttacttgagaggctgaggtacaaggattacttgagcccaggagttcgagtccagcctaggcaacacagggagaccctattttttaaaaaacaaagcaaaggccaggcgcggtggctcatgactgtatcccagcactttgggaggctgaggcaggtggatcacctgaggtcgggagttcgagaccagcctgatcaacaacatggagaaaccccatctctactaaaaatacaaaattagcctggcatggtggtgcatgcctgtaatcccagctactggggaggctgaggtaggagaatcacttgaacccgggaggcggaggttgcagtgagccgagattgagccattgcactccagcctgggcaacaaaagcgaaactctgtctcaaaaaacaaacaaacaaacaaacaaagcaaaaacaaaagaatgtgaactcctggaaacagaaatcacgtcttccttcctttgcatctccagaacccagtacaaggcttggagtgtgcatgctaggtaaatgcatgctgagttgggataatgactgcagagaattgtcatgagaatcattttagacaattgatataagaggagttcagatattcaaaagcactagctgagtctggaggattattgctctatctagcctatagaatgaaaaggacaacttacacgtttatttatcagcatgtttggaactcacagtacttttttttctttttctttttttttttttttttttttgtagaaatagcaagatagtaatccttgttaagattcaggctaacccaagagcactttataacctatgctgtagttgaggtacagccaacattatatgatcatgatgtttctcttggaaacgatgttcaggcctggtgtagtggctcacacctgtaatcccaacacgttgggaggctgaggcaggtggatcacttgagtccaggagttcaaaaccagcctggacaatatggcaaaaccctgtcttacaaaaagttaaaaaacaattagccaggcatggtggtgcatgcctgtagttccagctactcaagaggctgggttggaaagactgcttgagcataggagatcaaggctgcagtgagctgagattgcgccactgcactccagcctgggtgacagagagagaccctatctcaaaacaaaacaaaacaaaaaaatagaaaaaaaaagcagttcagagcgggatctcagtggctcgcttctttcttctttcttttattccataaatatttactggattcctgttttgtgctagttaccgtgttaaatgctggtgacataacaatgtaagaatgacttaattcctgccctcatagagtttatgatctagaagagaaagaccttgaataagtaatgttaaaagtgtgataagtgatgggaagtagaagggcaagtagtaacagagacatctaacaggcaagatcttacctcgtttaaaggatcagaaaaggtgtcttaaagaaagtgatgtttggatgaaacccctaagaatgagcagaacctcattagaaaaagtggatttgtcatggaagaccaaagtggtgtagtaagagggcttgggaggggagggacgaggcagagagcagtgagggaatgaaatgtgagagaagacagacggagggacgactgaggaaaacagaagtaagtgtggatgattccaagagtctttaggaggatggtggacgcttggttcttctggagctccgccttctagaagacaggctgtctggagccagcagctccttgccttgaggccctctagagtgggtagtggcgtcatggctttgctattctttcatgtggattatggcactggggaaggtttttatctgaggaagctggtgggcaggggttccagcagccttggtaatggaatcacctcttatgagcaccaggagttgggactccatgattcatgtcactcatgctggctcaagggtctggggacagaccaaatgactgataggtgaagtccttgagtacaaaacctacgtaaaagctatgtctcctactcagtagcttctacaacgctatactatttttacatattaattgcacaataagtatttgttaaatacattacagtgtttatctaagatttgcagatgtatcctcatttatacaatctagaatataaaaggccttatatttataaatttcagtgcagtttaactataatagagtatttttttacctctagtttatgtattttttatttatttatttttgagacagagtctcactctgttgcctagggtggagtgcaatggtgcagttttggagaaacagtcatccatccacattccttcccctcgagcacagttttattatatgttcttttaatgaaaaggaagcttctgggtgggatgcagtggctcacacccgtaattccagcacttagggaggcagaggtgagaggattgcttgtggccaggaatttgaggctgcagtgagttatgatggtgtcactgcactcaagcctgggtgacagagcaagactgtctcttaaaggggacagggggccgggcgcagtggctcatgcctataatcccagcactttgggaggctgaggcgagcggatcacgaggtcaggagatcgagaccatcctggctaacacggtgaaaccccatctctactaaaaatacaaaaaattagccaggtgcggtggcgggcgcctgtagttccagctactctggaggctgaggcaggagaatggcgtgaacctgggaggcagagcttgcagtgagccgagattgtgccactgcactccagcctgggcgacagagcgagactccgtctcaaaataaataaataaataaaataaataaataaagggggcagggaagaaaggaagctttgctttttttttgaccttgtgatgcaacagtagaaaggaaacttctgttagtggaataaatagattctccctctggagttgtctcactcagagagcacaatctggatttaattattgatttgttttggatatcccctactaaaaatacccctaagacagtggggaatattaactcttttatgttcccaaaatgaatctattgagattttcttgggtgatggtgaaaagtaaaaaagctggaaaaggagtgaggcttatcctctctcctgctgaatctgataggagtataattttattccagaatgccgcatgtatctttcacctaagtagtactatatgaagagaacttggcgtcccttccacagcagaaggttgtgcatatggcttccaggttaggttattttgaggaagaattgcgcatttcaaccctcttagcacattggtgtcattcggggcttgggggcataggtttgaagtcagttgtgagttcagatcccagttctgccacttctagctgttacagacaagttacacattttccttcaacctcacattctcatccttaaacccagaagtttgcttgagatttgagtgacatacgtctgtagaacatttggcaaggtacctcacccagcaggaatatggtcattttgatagactgtacacattaatttgattaaacctcatgcctgaatttacaccaaattttgttcttctgatgggagttacatgcagtgataaagctaggtaatccacttggcattgcagagtcatcctctccctgaagtgagttgggcaaattgaggaatatatatgcatccataatattaatatgatataacatctttgatatttacgtatcaggtgctttaagatctgcagtttttaaatattgaatgtcagaaccctctttcactactttgcagggacatagctttgagcaccagcagcagagagcagatatatttatgtatgctttatttggctgtaccacccatgaatttcctcctgattcttggctttctgtgtctagatattacaaaattttgatatacttcttaggtgaatttcaagctactttgaaagttcatcttatgccaggtaacctaataaatatctactttcaggatattcttcagtctacaaagtctccattttttttttttttttttgagacggagcctcactctgtcaccagtctggagtgcagtggcgtgatctcggctcactgcaacctccaactccctggttcaagcgattctcctgcctcagcctcccgagtagctgggattacaagcacatgccaccacacccagcaatttttgtatttttaggagagatggggtttcaccatgttggccaggatggtctcgatctcctgacctcgtgatccgcgcaccttggcctccccaagtgctggaattacaccatgcctggtgctggtgagccaccgtgcctggccaaaagtgtccatttttattgagtaaaactgaagaatgtttccagcatgaaaacagatgaggggaggggttaggccatggatctttatggcaccaggaacactcttgcatcataacctgtttgtttttaagcatgtttatcctattatataagccaattattaattgagaagattgagcagtagcatgttttttttaggttaccaattgcctttgatcaaagtctctcagaccttttctgaaataacatctaaaaactcaacttatttgacatatggatgctagtggatatgttctgaccatctgggcaaccaggaaaacagtttattgtgatatgtgggatattgctgaaatgaaataacctttgttttcacaacttgagtcatgaagtacatttgtttttattaaaattaaaagttcagcttggtaatactgaagattaaaaattgagacccaccccccaccccaagaactaggggtaaatagactcatatgaaatgatgtcatctagtggacaaaactgcgtaattctacttttttgctcaaatggaattatatagattatatagcagcagctttcatacatagtgaaaaatcaactggaaaaaaaaagcattttgcatgattaattgaccaccccagatggaaaaataagaaattagaaaatttattttatctgctatatggcaaacgctaagggattttttttttttttttttttttttttttttgacagagtctcgttctgtcgcccaggctggagtgcagtggcgcgatctcagctcactgcaagctccgcctccactaagggagtttttttattgcatttagtttcaaaatgtggtaattccggaatgaccagatccacattcactacttgtcaacgtatttcacaaacatttgtccatttgattttatctacaatgaatgtcaagatgtttaattacctagcaggattttattttgagacagggtcttgctctttcgcccaggtcttgttctttcgatctcagctcactgcaacttccacttcctgggttcaagtgattctcaggcctcagcctcccaactagctgggattacaggtgcataccaccatgcccggctattttttttttgagatggagtcttgctctgtcacccaggctggagtgcagtggcaccatctcggctcactgcaacctccgcctcctgggttcaagtgattttcctgcctcagcctcctgagtagttgggattacaggcgcccacgaccgtgcctggctaatttttgtatttttagtagaaacgggttttcaccatgttggtcaggctggtctcgaactcctgacctcaggtgatctgactgcctctgcctcccaaagtgctgggattacagacctaagccaccgcacctggccctttttttgtatttttagtagagatggggtttcaccatgttggccaggctggtcttgaattcctgatctcaagtgatccacctgcctcagcctcccaaagtgctgggattacaggtgtgagccaccgctctcagcccaactagctggattttagactgtggaaaataaatgtctttatttagagtagcttagaaaaaattagtttgtgaaaataagtatgctaattataagatggaaatcaaaagtcttgagtcttcattggctgttattaatttttaattaggtaatt

SEQ ID NO: 96612 - DNA, 48872 bp, Homo sapiens
tgtggcacctccccacacttcctcctgctccagacatgtaagatgtacctgcttctcttcccctttgccttctgccatgattataactttcctgaggcctctagaagccaagcagaagctgttctgctacctctatagcctgcagaacaatgagccatttagccccttttctttataaattatccagtctcggatatttctttatagcagcacaagaacagaccaatacaggatccctaccaccttcattcactcactcatgcaaatagttattaaaagtacatattatggttccaggttctgtgttaaggcactagagatgaagtcctggcccacatactccatgagcttagtctaatggaaggagaaaataagtataataaaatgtttaacattaagtttccagtttaaggaccccataatatatatgataggtcaaaatgggtgtgagaaagatgctcctggagaatgtttcaaagacgatgaatgtcatgattcttgaacctcctcacccactttgagaacagaaaatagagaatcaaggagagtgaggtatgtggtcgtagttctttgaagaagaatggggaaagatatcactttcatcacaagccaaaagaaaggagacttcaaggcgaccacttgaatgtttgttgatatttttgttcacattaacaagatacacataagatgcaagtgaaacacaaacacccatagtaactcaacaacgtgagcaacttcttccggaatcagctagtaattttcaaatactagaggaaaatttacattttttttcttttgctattcacagcataacagctgcaggcacagcatacttttaagtcttatctgcctcgtaaacattttctccaacagatccttaaatctccagtgggcaatcaacaaaacaagaaatcgaacttttatttatggcgtttaccaatttctgaggtgggaatacttacaccatggtagatttcaagctactaacatgttgtcactgaatgcgaattgggaagaggtgtgcaatagcatctccaccatatagatccaatagatgtaaatcccctcaggagcatagataatagcaaaatgtattcaaataactaggaaattagagatttgaatatttattgcatgagttttttgtataatttagttgtacatttatatcatttaatttttaataatccctgtttaacaactgccttgcaaaattcctaaaaatttaacagtaggctctcataagccagtgcacggcaacttctgcacaccattgacattaagttcattgaatatgtagccttcactatcctatctgtcactctgaaactagtaaaatatggattttcctcactaactatgaaattggtagtaacttttgggacagcatctcctgttcctttagtccagtggatactttttagtcttaatctttcttgattatctgtagtaaatgacatcattggtatgcctgttgaaactgcctcatcaccagtttttccagtctcttgtgttcctctcacctctctattactcagggctacattgaaagctttcctttttccactgagttcttcaatgttggtgtttgtgagtgttcttaatcctcgaatcttctcacatttcacactgctcctgcgaagccttgtctactctatcatttacatgcagtcaacacccaaatctgtatgtccaaaccaaaattcttgcctaatcttctaatctttatacccacatttgcaattgctccatgatgcattttcaccagagtgttccacatacattttgaactcaaaatgtccataacaaacttgtttatttcctttgaaatttgtttccccctttcaactcaataatttacgggtagcaccatttgccaaatcacctagccaaatccccagatgtcattttttattcctctttttttcatgtattccacattgaagactccagctcctgtcggttctgacgttaatatttctaccaagtattgcttctttctgttctcactgccactgataaaaattgagtcctaattacttcccattgttgtaataatctatttcctaactttgactcatcatacacattgatgcatctgtaatctttgtaaatcacaaatcctttaatggctcccagttgccttagagcagtgtctctcaaacatagctgcacaacagaatcagctgagcaaggattttgttcaatcaagtttataaatgaataatttacatataataaaatgcatgcattttaagtgtatacagtgtgcttttaacaaacgtattaatacatacctgtgtaactaccaccacaatcaagttataaaacacttctgtcacctcaaaaagttcctacatgtcctacaattggggaactgaatccttactccaaaagacagccccaagctaccaccagcttttagtcattaaaggtgttgcctgttctaaaatttcatataaattgaatcagacaatatttactctttcgcacctggctttttttacccaagataatatctttgagattcattcaagacatgtgaatccataacttcttcctttttactattgagtagtattccattgtatgatttatcaaaattgtatccattcattggctgatggacatttggattgtttccagtttacaggctattacagataaagcttctatgaacatttgagttgaaatactttataaatgtatacttatatccctcttgggtcaatatttaagagtagaattgctggttcttatgataatggaatatttaacattagaagaaactgacaacctcttttccaaagtggctgtaccattctaggacccactagcagtgtatgagagttccatgcagaaagccaaggcaacagctactcgggaggctgaggtgggaggattgctctaactagacagattgaggctgcagtgaggcgtgattgcaccactgtactccagcctggacaacagagagaaaccctatctcaaaaaataaataaataaaaataaagagcctgggcaaatatagtcaccttgttcgttttccttctttcagatatcacagacctgtactgcctgttgctcaatgccttaaaactgttgtttttagttgttaagagtgggaggacaagtccaacatcaggtatactgtcatggccagcagcaaaatccactttgcgaacatcttaagaaatatgatgcctgactcccactctataccaattattaataaatctgagtacctggagacgagagagaagaggtgattctaatgtacaagaatgttagagaatcactggctcagaggattccatccccaacctaaggcaagatccttcagaatctgtctcaagcctccattctacatctgtctcctccccaccattccataaccatcttttgtcatttctaagttgcaaccatatagcaatttgctgacatgaatataatattttaaatatcagtgtctttgtaaatatctttgcctttaccaagattctttctggtctaatacttctactggaagtactttccttcaacactcagctaaaatgtctttggctctatgaggcatttcttgttaaagagcccgagatttctagggcagaatctgatgttaagagagtatcaggaaaacaagtgcagtttagtatttggcactgccatttactacagggtgaagttggtttcctcgggtataacaagataatcataactacctggtagagggataaatgaaattacacagggaatgcacagctgggggagaaaattttctcctttactctctcagagtctccagctgggtccaagaattaaacggacacaaaacagattaacagggaaaaagcatacaaattttatttaataaaactttacgtataagtgggtgtcctcacaggaaaataaacacccgaagaagtggctaggcctaagtgcttatatactaggttgaacaaagagaggcaatcgtggaagagtatctaggaagatactggttagtttaacaatatctgtacagatgtttctcggcctcaactccccttctctggtgatgagtatctttcctcttggtatagggagggcatctatcacatggtagtttcttttcctgctttcaggaagaaaaggtcagagtgctcttcttgcacctgctgtttatcaaatgcttttttttgttttttgttttttgtttttaagacggagtctctctgtgacacccaggctgaagtgcaatggtgcatctctgctcactgcaacctctgcttcccgggttcaagcaattcacctgtctcagcctcccaagtagctgggactacaggcacgcgccaccacgcccagctaatttttgtatttttagtagagacaggatttcaccacgttggccaggctggtctgaaactcctgacctcaagtgatccgtctgcctcggcctcccaaagagttgggattacaggcgtcagccacgacgcccagcctcaaatgcctttatacatcaaaacgatcagtatgccaaagctcgggcggcaagctgtcgactccagcacctagcatggtgcacacagcagataccaacggagtatttcccctcacatggctcacatttcctttgtaaccctcccaagcaaagctctactgcaagctgcatcttacccgtttacatgtctcttttccctactagactgagtttcataatgactgggactatttctttttacctttgcatcccttgggcataaaagtgcctaggaggccaggcgcagtggctcacgcctgtaatcccagcactttgggaggccgaggtgggcagatcatgaggtcaggagatcaagaccatcctggccaacatggtgaaaccccgtctttactaaaaatacaaaagttagccgggcatggcggcacgcacctgtagtccaagctactcgggaggctgaggcaggagaattgcttgaacccgggaggtggaggctgcagtgagccgaggtcgcgccactgcactccagcttgggcgacagagcgaggctccgtctcaaaaacaaaaagtgcctaggataagaagaccacagtctaaatcaatttcagttgaatgacgagggcttgatagtctcgagatctgctttttttcttttttgagacggatcctccctgtgtcgccaggctggagtgcagtggcgcgatctcggctcactgcaacctccgactccctgattcaagcgattctcctgcctcagtctccccagtagctcggactacaggcacgctccgccacgcccagctaatttttgtgtatatatatatatatatatgtgtatatatatgtatatatatgtgtatatatatatgtgtgtgtatatatgtgtatatatatatgtgtgtgtatatatatatatatatatatatatatatatatttttttttttagtagagaaggggtttcaccatgttggccaggatggtctcgatcacctcgtccgcctcggcctcccaaagtgctgggactacaggcgtgagccacaggcccggcagagttctgcttttagcaaattattccaagcactttttacggtgtttttcactctcagtgctaattcacgctgtggtgacgatgtaccatccaatccttgataggaaagatcagagaatctgaccaagactagatggagaggttgcaatttttcatcagatgaaaaatccagaggatgttttcattgttgagctaaatgaatctgcaagtctatgctgccctctagggcggcctacagtgcctttaggcgagtagcaggagcaacacaaaacttaacagaggtttccctgcggagaaactccctttaagaaaaaaggagaaaccaaaaaggtgggccagcaccggaagcgggggcgcgggttcgggtagcggggacgcgcacgcaccttgcgcgtcttcgcccctcctgcggttgccaggcaaccggccccggaagttgcggcaggtgcgtccgcagcgggcgccgctagccagcggaagatggcggagrgyggaggccctgagccmggcgagcaggagaggaggtcttccsggccgcggcctccgagcgcgcgggatttgcaggtgaggcgaggagccgggggagggagcgcggcggtggacgcgggctggtgacggcgcgggctggtgcgagttggaggccacctctggcctcggcggagcctttccccgaccccgtctggggatagaatccggcrcccggtctcccgatgtcgggtcttgacactgtggtggtcgtgaacacaagtgcccaagcctccagcgctggtgctttgtctcccttccaccccacgtatgatgtaaaaatagctattcgtttagaatgacattttgcggggtcagttggtcggttcacgggttgatgcttccttcttgagacttactccagaagaaaggttactgtggccgcagggaagtagacagtcacctgaacagtaatgatacgtgatttgttcttttttgtcttggatgctatttctgacttgcttacttaaatataaaaatggttccattttatcargtaggtttttcttttaaaggggtgaaggaaagcgatgcactctatgcccatacagcctagttgtctaagctgtggtctttaaaacattgcactgaagaaactgggaaataaaatttcgtaatgttgtgtaggacactagtattagttagctaaatagtagcgcaccaaatcccgttttatcagatactaacgccacttttctcattttaggcgtttttgtgtctcattataagattattgataaaaatttgacaagtaaatatcagtaaggagatactaaggagaatcttggtagaacagttttactgtattactttacaaccacacttcattctaatgtgaacaaaccaccatccattgtaacatactgctgagctttgcgaatgtggaaataaggacatcaaatccttagtcggtgctgaactctattgatgggtaggtatgtaagtgtaaaagacagttctaccttttggaagcctacagatttcttcggagaaatagggtatgaatacttagcataacattttaagatggagtatgattgggtgccaaaataagcagtgcataaagcgaagaatttggaggctggagagatcagtgtaacattaggaggtgaacttaatgtagaatagttccagctcccatagttggttcagtagtagtaaacagtatcaagggataggaagctattgtgtacctcatctttcctattataaacccacatcactaagaggcagcatggagttagtagtcccaccaattttggtttgcctcttagtcctgctacttagtagttttgtgaacttaggagaaatgtcttaacctgtctgatcctgtgtcttcatttgtaaactgaggaaggtcagggtgctggtggtggtgtaaggattaaataatgttataaagggcctatgcaaaattcctacattatcctggctcagttgttgctgggcaaatatttgattcctttttcctcaggagaaagatgctataactttccctggctagtcaattctaatatcattaaagttaatagagtgtgtaacttaatgtcctttccctaatttaaatccatttcttctttttatgtgaaaagtgagaacagcttggttaatgaccacctgattcttggcaaattgtttgcagtcttaatccagtggatcaaagtacgattaatgtttrgagatactctggtagatgttgctaattgtgagaatgccttcatttccaccctaagttaygatggggattttttttttcatctcctgtctacttgttgtaggttagggcagtaggaagataactgatttctttatgaatgtgatttggtgtatcaagtacagtatctaagtattgataatctttcctttagaacttaatatgaatgtgaagaacttgcaaagaaacttgaaaacagccaaagggatggcatatcaagaaataaagtatgtatcaaaagtttaaaagaattaaataatgttcttcccaaatggtaccttggatattgattatttatagattatcttgttaccgtttaatctagacatgcttttcttaagagttacgcagttcgtgcagctttcagtagatatttcttacttccctaacagcttgctctaagagtctttcagagtgagtaaaggggcaacatattaccaattggaacaagcagaattacccctgagtaagtgtatcttagctgccatgcagtgtagggtttgtcagcatctgaatcaggagggagtgttccaggtaccaccagagaaaagctgcatagttgcttcccaaaaggcctcccagccctgggagcccccaggttacaaactgcagactcggaaatgtttttttgcatatcagagtagattttcatagctcccttcatccccctcaaataaggagatggtcatggggaaagttaggggtgggattgttagtggcaaaactaagcccaaaacctcaccagtgttcaatagtatttctgaattgctttctcttctggtgtccctcagcccgccacacacatgttcattaaggtatttagttgtatactctgtcccagttttcctccacatattatctgtttctacataggttggacggggagggagtgggaasagggataacttcagtattgttagggttaggattggatttgttaggatggactcaatagtgggtactataaatgagaagaattaaaatgtctgatagctgttctgataactgtgttgccacaagtaccctaatcatattgaatgtcattattctgtatcgttgattctctagtatgcatctgtgacctggaaggcttgtcagagattgctgggccctaccccagagtgtgattcaytggttctagagtagagtttaagcatatgcatttcctagaagttcccaggtgtctgtataataatcatttattacagcgtctagaattggttactctaaggctgagaattccaatacttttaatattttgctatatactttattttctcacccgattcctttgctttcaggtttcaagttcttcacatttcaaattctagaggaaagattatcaatactttacttacatactttatcctctgcatattattgaaacattttcttaattacgttttgagatttttttgttgtgttagttttgaccagtacttcaattaatatttatcaatttaaattatcatttcctcttttgatgtaatgtcatctatgttaaataatataaattaaatttctttgtagtatttactaatgaactcatgccatatgatgccatatggcatcaactccctctaaatattactcattttcttctaagtttttaatgatgtaccgttaataactaggatctttcagccaggtagactctttaatatcattttcctcatattcctcttttcttaatgtatgttccacattccatggggctagtggcatttttgcttttttaatttatgtcaccaaagaaaattgttatttgattggaagcatttattcaaatcttgttaaagcaaaaagtgtttaacaaatataaccccaatttaaaatacatctatctatatctatttctgattcattttctattatgttctttatataattcaacgtcaatttgttgccttttaggtacaatattagaaacaatttgagaaacttaaaatctagttggggaaataaaacagcaaaagtacacaagtaatgacaacataatgcttaatatgaatgtcattgggggtatyacgtgctatgagtatttagaaaaaaagatattaagaagattagaaaaggttttgtgaaggagagctgaaatgggcctttgaaatacagatgacattttcattgatgagaataggaatatcataaaagtaattcataaagctgacataatgagcttagaaggaaatccataaaataatactactttaaagaaatttcagggaggtaaaatttctgaaaactttagaccctagtcatcagactgtgtatgtgcatgtctgtctctctctcctctatcatttgtttgttttttgttttgtgtttttggaggggatggagtagtaaaggaccataaggagatataacactgtaggaagaaaaaaaaatcttggggaaaatgaaacactgatacaatcattactaaacatttaagaataatatcttctagtgatggaacacatgctttgtgctttccatacattatttaatccttcaaatgactacggtgattttttataggcatttgaagatgtggtaactaaggctcagagaaattaaataatttgcccaagatcacacaggaagtgcctaagttacgatttgaattcagtccttttagattaccaaacacttttataattcagatttctagcaaagttgccattgtacaaatatgaatgttactgaatgtgggagggtaggggtaaaaaaattagaagtctttcattttgttttatttgtgtatattttaaaagttgactaatagaattttcaaagaattaacattgccccaatgccctgttcttcttggaggtagttttcatatcatttgtgtgtctaaaaggagcattttaatctgttttgttatgattttgggtttttttgtttgtttgttttttgggtttkttttgaaaaaaacaaaaaaaaaaaccggagattatggtcatgccaattataattgaatagccacaggagcattaaagaaagttgttgagttgttgtccaaagatgtcaaaagtcagaaaaaattctatacaatactgaaatattggattactttttaaaattccattttaagaacaaatataattttatttcattttgaaataaactatccagccaatatctagaatgtataatttggtaatattactttctaaatggtatataaaccatatataatttatggtcttgtttgttcagaaactcattttcctaaacacgatgaaatttataagtttggtagacttttaaatagaatacttctgaaattgttttatatgcttggagtttgaaaacttgaatagctgaatgaaactattttatgagatctgatggaagaagctgacgttagtgtgaacatcttcaggaattcttaaaagaattgcacaagaattttaggtttaaatttgaaaatggtttgttacctaaaacagattttgacactgttcagtagttaattgaaaataatcaagtaattattataacttaaagttattctaatagatgtggcattttggttagttctatataatgagatgcagtaagtttatttcagaaaggaatcatctgaagcagcagcttttttcatgaaaagtctttaccactcaattttaagttagtgttctatacataacttctagttgtatggaagaggttattcctagtgttatactttgtaacaagcctgttattatgtagttggccttggcagaattgtatgaagatgargtgaagtgcaaatcttccaagtctartagacctaaagccacagtcttcaagagcccacggacaccacctcaacggtaagttttattttgttttgttgtaaaaagaaattataatcctttctaaaaatttactaacttcaaattattttaaatggccttcttcaaggtttcttcaataatttttaaaaattattattccaagatcgaggcagatttggataaaaaatagaaatgattaatatcatttaggtactattaaaacttttacaatcagaaagccaaaagaaacttacggaaaaattaccttaaaatacctaatattttggtagatatcatatgaaattatatcctgaatactatttttcttgggcacaatggttctttaatattttttgagtcrtaggactcattaagggtctgatgaaagctatagaattctcctctcaaaacaactttcatgtgcaagtttgtcattcgtttttaaggatatgtgtgtttcttgaagccactccatggagcctctgcaggtcttttgtcctccatttaagaatctatgatttttgaagtctgtctcttcttcctttgggtgatgattcctctaatgtgtgacctcctaaatagtatttgttgttattaaaatccctgaagtataaaaacaaccaactgtgaagacttaagagatgagaaccaggtgtcttttattgctgtgagttttcttgttgccaggaatattttcattaacatctttttagtactgtaaataccatccctggggaagaaacgtcagttttcccattatatcttattctcagaaagtctattttataagttttcagttcatcaaaaagcaagactagtagagtaaatactgtgtttacttcacctatattcaccaagttggtacaatgttacattgaacttgtgcacgcatgtattctctctctcttttttactcaactatttgaaaggaaattgtagccatcatgacacttcacctctagatacttcagcatgagtctcccgagaagaagcacacacttgcaaaattgataacaccttacaaaattaatagtaattcaggcggggagtggtggcttatgcctgtaatcccagcactttaggtgggccaaggtgggcagatcacttgaggtcaggagttcaagaccagcctggccaacatggcaaaaccccatctctcctaaaaatacagaaattagctgggcatggtggcacgagcctataattccagctacttgggaggctgaggcacaagaatcgcctgatcttgggaggcagaagttgcagagagccgagatggcgcgactgcactccagcctgaatgatggagaaggactctgtctccaaaaaaaaaaaaaaaaaaaaaaaaattaatagtaattctgtgatgccatttaatatatagttagtagtcacatatctcttatagctttttctttggatttaggattcaactgaggacattgcattgcatttaattattcctgttttgaatttctgaatacacagaactcttcccacctttttattgttgtttttagctcagctacataatctaaaatttattatgttgacttttttagagagtctaggccagatgtcttataaaatgtctaacattgtagatcactgtttcctcatgattagatttttattagaatttttgtcgggtatgctagataagtgatattgtctgctatttattacatgacaacaggagtcataatttcaggattttccaccattagtgatatgttcatytggttaaggtgctgaccaccacagcactccattgtaagatactgtgtgtcctttgtaatcagcagtttggtatcttgacactagttgaacatcctattctttcatttaattcttacctttatacatataaaatactgtatttttagctgcttctttaatttgtatattctcccaagtcttgaaagtacttaatatgtatctctgtacttgcattttactcactatttggccactgtttccccagtttgaacataagttgaatgacttaatatttgagttcttatcataagattactgtattaatattttccttgctattcaaatataatcattaagatatttcagtgaagggttttcttttatgctgtctgaaacaatgctgtgattaataggtataattcagtaatccagtttgtaaggattttgtgcctcacatttgatttctagaataatttatctatcaaaagaactgagtttccttaaaatatataggttgagacgtaaactgtgtttaatctgtttataatacaatgtatagcagattgttcgcaatctttttttctamgtatgatatcttctaatgctaagtgtatacttcctttgatttcatattcaatatcgaaattttcccagtttcgttgtatttctacaggtctgtttggtacagaaaacagtgcttattttcatggtccacctccttgggcggtatttgaaatcaaaacagttattgtctcattgtcattttaagccaagacagtttcattatctgaaastctggacataagatggtctgtgtttttaatttacaagaggagttacgtaatctacagaaagaccctcaggatatagtctgatgcctgttttgacatattcatccatgaaaagttaaatatcacaatcagaacttggatatgtcctccacaagtcattgtatagtagtattgctttgagaattaaatgagataaagtgaataagatgcctagcacagagttggtacttagctgggccttaaaaggatttaagatattaggagttagataagcacagaagacaagggacaaaattccaggaacagagagtcacataatcaaaatgaccagaggaaccagaaaaagaaccagcagaactttagtagcttagtagcaaataaggttggatagatgggggtgcagccaggaaggctttcataggcatgtgacctgtgctattgcacaaggccccatgcttagaagggccctgtgcttggagtaatgctttgctgttactgttttgaaattcttaattggttttgaacaaggggactcgattttcactttgcactgggtctcacaaattatgtagccagttgcggatacagccttgaagaccaagaagataagttgcccctgtgtagaaggcagtggaaagtcaatttgtcttttaataaaaatttagtgacaaaactataatacaatgttaaaagctttgactcaagatagatacatctcagttgtaatttttttgttttcatataagaaaatggttttattcctaatttttagttcccatacagtttacaaatacacttttactctgataatacagctttgcaactagcaaagcagttgcgctaacacccataaatataggtggggagacaattaacatccactaatgtttctctacataaagtattcttttaatgtcatttttttaaaaaacagttgcaaatagactacataatgtaagtgggcaaaaaggcaattaagtgaatctcttgaaacactaaatgtataataaacagcatattatcaacatttacatgattcacatcaaaatgatgacatcctaaaacatattccctttaaaagatttatcaataaaatattaaatatcttttaatactctggtacttcatatactgcaggaaaattaattgtaggtctagtcatcagcttaatcagggatccttttcccattagcttttattaataaaagaattacaattaggtcacaaataaacagacaaattattaattacatgatttgaggcttaggatgaaaacttgtcaaaattagtttgatatacagcaaagttatatgacccactraaaccaactgttcaatagtttttgccttgtgtgaactgcctgtagtgaaaaaagaacaaatttttaatgatgaaagatacaataaactrtattttggaacttttcaagaggaagaaggaaaagctatttcaataaaattaagggcaaatacagatcctgacaaaggcatcctgacatcagggaggccatgtgcttgctatatgtaaaacttgattcccccaacaacatayagaaaataaaaactgcactggctttgtagttatgtctacagtctaagtttcccttatggatactaagctaaaataaaacacttcacaattgcaaacctttccacatccccctgaactaaaaataactcaagatattattagttttaaaatccccaataaaattacctctaaaaacaatcttgaccattttcttgactgtttccccgaagcaactgggctctttaaagaatgcacacacaccaagaaagtcctacacatgttttctcatccccatttagccacatttcaaaagaccttgatttcagtgggagagatgaccrtaagtttcaggaaggccacacactagacatgaagcaccttttagttttttttttttttaaagctattaagactgtgaaatttgtcttttttaaaaaaacccaataccatgtgccagataactctttcaccccaaaatataaaatcctatgcttataattttaaaaccctcagtgagctctggaatattgtgcatatttaatacctaccagcaacctagaagtagacaaataccatgtatttgtcataccaactttccaaataacctgactcacccattactgactgggctctctcattactggccctgggctctctcacttcctcagcaaccacctctttggaactttaatttccacacctttttttaaaacctgcacctcaagctttctccatcatcccagcctctctgcctgattccatcccatgtaaagtaacctcatctgagaacctgcaatcaccttttaccaaacacatgataagccttagcaacctagggactatgataactctggccttggcctaaggttacataagaacatgatagtttgctgaccttgtggagggaaatctaaatgaaatcaatataacaaacaaagctagccaagatcaggtatttccattctgagtataaaagcaactgatcttaagcaacgggcagagatgttaataccggagatatatttgtacaatcaaactcttgtgtgctggtgaaagactttacccccaaagtcaagtcaaaacaaaaccaaagcaaaatggagaatgagtcaatgtaacaatgcaataaaaagaacaggattcaagcttcttgctgcaaatactgaactggaatctttttctttacaagttttactagaagacagcagtcatgacatttccctaataagggaatacctttaggccacacccgtgttctgaagcaattcaaagttcaatgaatattggggggcagggataggggctgatacacattttgttagtgagaatggcagccaaactaactcagggtcttaagagactgagagacctcagaaaggaactactaccagggctggatctaggccttcctttcaggagccaaagtcagaagaatccgaggaaacaataacttcacagcaaagatgccacagcattttattaccatcacaaaagtcaattaatgatattttcattgaaatatccacactcgatgattcaacatataaggcgaagagggatgtctttggaaaaggcacttaaggtggaacattagcaaatcttaccatttggctaaaacaaaaatgatctcgttcaacctggctggaggcctgttagggctgttccttctcactgtggcctgactaaaaaccagtggcattaagaaagagtcacatttcccaagtctgggrgtgccccagtggggtggtgctgctttcaaaagccctgagtccctaaacacatccatcctcacaagatcagtttccccaagtgctggttccaaaaacaggctcaggattggcaaaaatcattcaggaagcttcttgaagaccctctctttatttctcagtctttcagcttgtctcagctactgtaagcagttttggcttcccaaggtcactagcaacttctgcttttgctaatatccttggttttccatggcagtggttgtgaccgtctgttagactagtggcctcccaattaactgcacctctacttcacacccttttttaaaatctggtctgggcatgtgacttgtttagtaagtagagggcatactccagctctcttctggtgagacgaaatcatcatcatcatcatcatcatcatcatcatcatcatcatcaatagagggcagtagaagggaagctgcgacaattctggacttaagtcttcagaaggcctggccacttctgcttttgagctcttgggagstctgagcttcatgtcagaggtctagctacctgccagccaggccactgaaagagactacacgaagaaggagagactcaggactgcaggcagaaagagaagcccagacatcccagtctctccgccaacctgctgaccatatgagtggccacctgcaggctggcagaagaacagcccagctgagcccaactcaaattgaagaacagttgggggtgggttttttttttgttgttgttttttttttttgacacggagtcttgcactgtcgcccaggctggagtgtagtggcgaggtctcagctcactgcaagctccgcctcctgggttcacaccgttctcctgcctcagcctcccaagtagctgggactacaggcgcccgccaccacgccctgctaattttttgtatttttagtagagatggggtttcaccgtgttaaccaggatggtctcgatctcctgacctcatgatccgccagcctcrgcctcccaaagtgctgggattacaggcgtgagccaccgcgcccagccggggatgggtttttttttttaagccactaaagttttagggtaagtttgtcagcaacatttgacaaccaaaaacactggtcattcatagatgccttttttctgagtagaagacagttactcaaatgcaaagaaaatatggcaaacgttttcccaccacaaccttctcagtcaaaagccaaactgtaattggtcatcggctggaaaaaaaaaaagctacacctcttaattcataaatatccatgattccttttctatgactcttyaatgccaatgcaaaggtagaccagtcagcttctgacagtctcaggccctagcttaattctcatttggccaaaaatagaagccatcaaaatgaattatccactattggatacatgatggtaaatgagattgttctcacttttctaagatgttgttacttaatcttcccaaatcatttcttcttatccccgacaatgaggaaaaaaaaattaaaactggttaaggttataaaaagaaaaaaaaaaaaaagcctgtaactagaatttgaatccccataatctgcaaaatatagcacacaatttaactgcttcctcaatttaaaacaaaattctataaaatataatgtctacatagtagagatgatttcttcttatctgaggaaatgagtaattgggaagcaggtattgttgagttaaaatacagtgatctttaaatggtttcaaattttgcttatcaaaaggtagtcaaccacaatgcaagccttccaaatccaaatttggtcttcacataaactttcttgcgaaagtttgatctttttagggagagagtgaagtccacatctatttttgtgctgaagttttggcagattttctcatctgaaactcttctgctgttgcatcaggcccacgttttcatacactctagcactgtctgctctcatttctgcacagcrtggagttggagtacaaggcggggsggggggctctgatctccactcgtctggtccgctagagaatacttaatatttgtatattcatgacctttcctcttgcttttctgctcttcttcaatcctgcgctgtagtgtttcagtataatgctggaccgccatatagataaatcggtactgtgtttctgtctggaccatccctgacctctgagactgcaccatctggatagttttgagaacgtcaatgttgcagtcaacacctttctcagaatatcaatcacaacgtatgtccctgtccggccaattccagcactgccgtgcaccacgactggccttgcatgcatgatgcgttcctgcttatggtgcacctcctccaggaagtccagcacacccctggggtcaatgggcactccgtggtccggccaggtccaaaagtggtattgccagaccattctctccatattcccttgcccaacctttgaaagtttaagttctcttagcatatagttgtgagcggtgctttctctgatattcctaacacgcatgatgccatattcttttagagcatactcatcaggccagtatttgacacatttactctatcctctctccacttctttcgttgtcatgacaatcactcaggagttttcttggaataccatccgccaaaagtcgttcaccatgttttgcaggcagccttgtgtggcaatgtaactcttcttgggctttgaattgttacacttggtttcaaatttgggcatgatgatatttgcattgatgtcatctgaaacaggctcgttgggatcaccatcgtgtaggacaaccctggtatgatcaaagggcaggttatttttatatctatttttgtttttgttttcttgccttttaccctcttttcggccgtagagaagtatgcactcctgttgttgtagtgtctcaaattcttccgaaaagccttgtttgactttattgtggtctcagctaatttgcttagttctcgaattctgctatttcagcaacatttatacgagtcgtgttaaggggctacgtgagttgtagtactgtaccccatgtttccatcataggattcttcttgtaatgttccacaagatctgtcaaagaatcataccgttctcctccaccaacatcgtatttcagttcctgacagcaaatcataacatgggccactttagacttgccgttattgttctcccctttgtcatcactggtgcgcacagagagaacaaaatctccaaggtggctctggctctctcatacaagaaaactaccatgttttcctttttcagttaataatttctctgcttctttcccagagaggtgtccctgaaaccacctttcagaggcaggatctgcacagttcagaggatatttaagctcaataacatctccattcttctcttttmattgcccgtgatgttctgtgtaatgccggaccaactcagccaaagtggaaaatttctcccctccacacagatcacagtaatcaccagtgttctgaatcttttttttttttttttttttttgagacagagtctcgctctgtcacccaggctggagtgcagtggcatgatctcggctcactgtaagctccgcctcctgggttcatgccattctcctgcctcagcctcctgagtagctgggactacaggtgcctgccaccatgcccggctaatttttttgtattttttagtagagacggggtttcaccatgttagccaggatggtctcaatctcctgactttgtgatccgccctcctcagcctcccaaagtgctgggattacaggtgtgaaccaccgtgaccggcccagtgttctgaatcttgatgtgggtgacagctccatttcttctaacaaaaagtgtgaagtctccagggttacttttactaggccttgccaaaaaactgctgtcagctcctcttatcaacagtgggttttctgcctccaccccagtgatatttgggtgaaaccatctctacaatgtcatgttcctcccacattccggctccgtgacagacccgytccttgctcaggctccactgggctcggtcacgttgggctggcccgagggaggcccgctcgggaccagatgcggggcggagccagccgactgtgcacagacccccctccaggcctggggatcctggagactgtgcagccgccccctaggctggcttgctcctcctccctgtaattttttttttctctgtcttctaataaggttttgccaattggcaagttatttaaactccttcagtcttagttttcttacctgtaaaataggagtaataccattgttaggaggattaactaaacacatagtcatcccttgataaatgttagctattactattcatttaggaaaataggactggcaatactatataaaattaatgaggatggagagaacaggataaagagagaaagaaatcaagacaggaacaattgaggtaaactaaggaatgaggtaataagattttggattcaaggccaaggacggtggctcacgcctgtcatcttagcactttgggaggctgaagcattgcagatcgcttgagctcacgagttcaagaccagcctggttaacagggcttaaaccccatctctacaaaaaaatagccaagcgtggtggtgcacgcctgtagtcccaactgctygggaggctgargtggcaggatagcttgagtccaagaggtggaagttgtagtgagccaagatcacgccactgcactctagcctgggcagtagagccatatgttgtctcaaaaaatatataaataaattttggattgaggtagtgtcaatggaacggagagaaaagggtgaaattaatgcaggatattttmaaggtgttcattgtagaaatgtaatgacatgggatatagggagtaagccagtgggaaagagggaagacttaaatgttttaaatttgggatacaggaaaaagtgtgattgttaatgggagggcttatgtgtagaaatagcttcagttttggagatgaacttgagtgaagtagaactatctagcaggtgcttttaaattcaacactggaccataagtgagtggtaaaagcacatatttcagagtcatctgtataggaagaggttatctttggcagtggataaatattttgatgatgacatgagcttaaatagaggggaattgaagtcaaggatatgggcatatttatgtaagaggaggaggaagaaaactcagtaaaatagagaaggagatgttggatcccattgggcaaagaaacaaacaattttggtatgaaagtccaggagagagttcaactatgaaacagcgaaagggagaagaaggataggctcaaaaggatcaaatgtttcagaaagtgtttaataactgagggaagtcttttgtgtttggcaatgagaagataactcagaacctttgagtattcagtagcaaaccttgagattcagtagcacaatgggagcaaaaatcttaccacagggagtaaatgcacgggaaagatgggtaccagtcgcagataatatgtttaaggtttgggtaatcatcattaggatctaaaaagattgaaaccgctcaactcttctgaagttgggaacattatcagtgggtaacccctatcacaattttcattcaacttgtactggaggttttagtcagcacaatgagattagaaaaacaaaagtatacaaattggaaataaataaagctcattatgtgtaatgacataattgcatacaaagaaaactgtaaaagactgattctttttctgattcctctggtcattttgatgttttcctcctgtgttcctcttcattcctagaattttgtcccttgtcctctgtgcttatctaagtcctaatgtcctaaatccttttaaggcccagctgagtactaattctgtactacagatgcctatcttttattccttttcacttatatttaataagttagtttgaatgagtatagagaattacttcagcaatcaataaatatttttgccccaaacattcatgaagaattaaagttgaggacttacactgctgcatgcaaagacttattgtaaagctgcaatggttaagagagtaagaactgacagtagaccatggaccaaaatacgagaactcaagaatcataggcaacttgatttatgacagtgcagagcagtgaggggcagaatttcattaggtggtactgggacaaatggacatttatgtagagaaaaaatagttcttgtcctctaccttataccacctataaacgtcagttccatatgggttgtggatctaaatatagaaattaaaacaaatttctggaagaaaatagaatatctttatgaccttagagtaggcaaagatttcaaataataaaaaccgttaaccgtaaaggagataggaaatcatttgctatgaccgatttttgcggtaaggtctttctcactaagactgagataaaaaggaatgattattcactttgccagattagagatgtggaaagccttgaaggtgacttccattcctcgtttccagggcactccagagaggggaggagtgttacggcagcagacagctgcagcaggaagtgttgctttgcttttctgtgtttgtcgtcgctccctaaaataatctgcttctaacactaaggcttgtcttaaaagccaactagggcagtgttcaaccttgcttgctactctggacccttgagtgtaagcttgggacaagggcttccataggctcctgctctagataaatttgggcccagtgtacttctccagagcactggcaggatgaagccccacctccaccttctgcagtttgtggggtttagtagggttctcctggtgtctccttgttctccatcctgatggatcttttccttcctttactgcaaagtgagagctggtctgttctttcctctatcttactcagttttgcatattctaatttaggagaaagccttgaaggtgaattccattcctagtctccaaggcagatatcatttccccccattgttttgttctatgtgtcagttcagtgtgaatttggaattggattggagagttataagtattttaacaactgaagtttgattgtcatcttaccytggaagtctccatgttgatacttcattgtttatagtttctgatattcttgatagaaaaaaatcttgaaagataaaagtaggttattaatcttacgtaaaggtaatttttatgtttcctaggaccatttatgaagttggagtcaaagtagaaattggtcgccaaaaaattactgtctaaattatttacttttaacaaacgcaggggcttttaagggagtaggtctcttaaatccaaaaatctctgaaagataaatcctctctagataaccctttagtttagaattagctgtttatactgtctaaatctaaagatctcgtcactaactaggtctctactgagtgtggccttcttagggagaagggactatcttttgactgttgacactgcttttccttctacatcagaagtgctgaattagtgaatgagatktatgtgataagcagttacagaaggctgagggatcagcaagcaagccagttgccgtgctggaggctgaacttgcccttagaatcaatctttgcaaactcagtgagaaagtatatgatttcctatttattatacttttccttaatcccattttaaaaattaaatattctcatagaagtcaaaataatgcctctttttaaataaaatacttttattttcataagactatgtagctttttacttcagtttatgtctgttatcctaagtttttattcatgaactaaaatgtttaaaggttttactcaagtgaacatgaatacagtggattaaatatagttcgaccttcaactgggaaaattgtgaatgaacttttcaaagaggcaagggaacatggggctgtccctctgaatgaagccacaagagcttcaggtgatgataaatctaaggtcagtgctcaattttaaactaaatacattgtttctatattttacctcctcttycatttttctattatttgcaaacattgtttttctaattgtatatttctgttttaaatatttgtttcatttttataaaattataatatttctattaatgattgaaagttgagacaatttcttacatttctgaacaactttttaatttaccttttaattacaaaataattagtagagtcacaggcatttgcaaaaagaatacagggaggtttcatgtacctttcacttcaatggtttcccccaatggttccccccaatggttacgtttcacatgattgtagtataatatgaaagccaggaatttggcatttctctctgtctatgtccttttatcacatgtgtaatcacccaactgaaactctccttcatagcctaccatttgcactcacacccaccccgtctctcatgccatccctaacctctagccaataccagtcgggttttcatctctataattttatcatgttaagagtgttaaaccagccgggtgtggtggctcatgcctgtaatcctagcactttgggaggccgaagcaggcagatcacagttcaagaccagcctggccaacatggtgaaactacagtgttatacaaatggagtcatacaatatgtgaccttttggaatagcttttttcacttggcataatgcccttcagatctgtcagagttattgcttgtatcacaactttgttcctttttaattcccgagtagcattttatatagatataccacagtttaaccattcatttattgagggatattttagttgccagcttttgactattacaaataaagctgctgtgagcaattgggtacaggtttttttactcacttatggttttatttctctgagataaatgctcagaagygcaattggtagatcatacattaagtgtatgtttagtttaagaaacagccaaactattttccagagtggttgtgccattttatattcccacatatatgagagagcaagtttctctgcatccttttcagcacttggtattgtcactatttttaattttagccattttgatgggtgtatagtgataacatgccatggttttattttatttgtctaataactaatgatgttaatttgcattttcttaatagctagtgatgaacatcgtttcatgtgcttccttgccattatctgtattattcttttcaaggaaatatctcttcattactttcccattctctaattggattattttgttactgttgagttttgagaattctttgtatattttaataggtatgggtcctttgtcagatacatggtttgtaaatattttctctcagaatgtcattcatatttttatcctcagcaggatttttcactaaggaaaagctataaacttggataaagtccaatttattccttttttttcttttatggatcatgcttttgctgtattgtctaagaactttttacttaactgtaggtcccaaatattttctcctttgttatctggaaaaatgttacagctttacatttaaagctatgatctatttgaattttttatataaggtgtgaggttgacaccagagtttattgttttgcttatggatgtccagttgctccagcatcacttcttgaaaggcactcctttctccattgaattgcttttgtacctttctaaatttctttttttttttttttttttttttttgagacagggtctcgctctgttgcccaggctggagtgcagtggcaccatctgggctgactgcaagctccgcctcccgggttcacaccattctcctgcctcagcctccagagtagctgggactacaggcacccgccaccacacccagctaattttttgtatttttagtagagacggggtttcaccatgttagccagggtggtctcgatctcctgacctcgtgatccgcctgcctcggcctcccaaagtgctgggattacgagcatgagccacctctatacagcttttataattgttaccaactgacacaatattgatatactaaagacgaacagttacgtgtcttttgtggtatcatttcatacattcttacaagtagcatttctcaacctggaatttctccatcagaatcatttggggaggttatctaaactacctgatggcttcaggtattatggttcaataaatttgggatatgcctagaaacgtgtctttttaaaaaagcctctatgataattttgacatccattgttgagaaccactgctgtaatgaaacttaaattttggttttcatttcattattcgtcaatggtttgaaatgatcttttagtcaagtcttatggtaattttggttcttgaaggctccccagtatgagccactwtggctaattagaattaatctagttttaaaatacatatcacataataactttttgctgaataatcctttgtgaattttaactcacttsctatgtattttagtcatttacaggtggaggatacagattgggtagttctttttgtaagcggtctgaatatatctatggagaaaatcagctgcaagatgtaggtacaataatcaaaatgaaaaagtataaatatttgcttctagttactaaaactgttggttttaaaattaagaattgataatacaaatatatttttgttactttttaaracatgggttaaaaggaccaatgatgtgtgarttttcagtctcgatctttatgttttgtatcacaattatgccttgcacttagagatatggaactatttgttgaaagaatgtgtgattcattttccaaatgaatttgcagccaggcgtggtgacatgcatctggagtcccaactactccagaggctgaggtaggaggatcacttgagcccagaagttcaaggccagcccggaaaacatagccagaccctatctctttaaaaaaaaaaaaaaaaaaaaggtgtttaaaaaaatgaacttgggccaggcacagtggctcacgcctataatcctagcactttgggagactgaggtgggcagattgtttgagcccaggagttcgagaccaccctgggcaacatagtaagaccctggatctttaagataaaaaaatcaattaaaaaaagaaaaatgaacaaatatatagttattattataaatggtatattttcataatctaaaatgaggtgaggtgtaaatgaagaacacctaaagtcattctttgtttctgttgccttttgaaattttggagttttaattttattttagacattgatagtttcttggaaggtcactggaaattctgttccccttaggatgaatatttaagctctgtagcaaagaagagtatgggtgcagatgaaggaaaatgaaggaagtgggaatcatggagtacagctcttctcattgctttcattttcttgtgaaccatccaccaataattgtacttcgaggccagggtccacctgcaggacctttggtatttgcagccattgtcagtttgttaagctgaatgcaaactagctaaacaaacacatgtggtttcattaatgtctttcactatgaataaagaatagtagaaataactccctattttaaattaagtaaatacgttttaggatatcacatttggaacttaaaattatttgggggagatatattcttatgtatatgtgaatatatatatatatatatattwtttttttttctatacccaaaaggttcagattttgcttaaactgtggagcaatggtttcagtttagatgatggagaattgagaccttacaatgaaccaacaaatgctcaatttctggagtctgttaagagagggtaagatgtattatttgtattctatttgttatgtagagtgggacttattttcttaacagactactcattattagtgcactacgggttttcaagaagyagttcctggaatatattaaataartggttgctgggggtgtaggtattcttaagtttataaaggatatactgctatctgtatgtaagtcactggttcttaattttgtgggccaggggcattggacattggcccattttaaaatctgatgaaactatgaacccagctccaagaagaaacatcttaatgtgataatcagtgaattaattagtatgtagctgcccacccactaagccactgtcctgcttactgttgacagggtgactctcattgcatgtatgcctgaaattcagcaacttatgttagaaatcttttaatgtggcattacwgctggcagaagatttcaaaaggttagtttgaagttataatttgtgaaagtaaactcagatattcagtgctctcacccatccaaagaacattgtaacttaccagctcttcttgctaaaggatgaggaatcaagtgattttgctatgataataaaagcttttctgtgttatgattaaactagctgaaagtggagttatttctaagtagatatgcaactaaagacataaagttgagcataaactggggaattaagttgtaggaaaggatcagagttttactgtatataaccagagttatatatacagggttatactccataaaggaatagaaggtggaacatttccaaatgttgaaatatgtccaggatgagtggctgacatggagtggaggttaaattcgtcttttagaagactaattagcatgaattttgaatttaaattatatacagatactgtcaggataccaaacaaaggcaacaaatgccctaagaagtatgctgaaggcattgggaaaggtgggaagctgtcctaggaggcagtatatgggggtggcaaatacaggatataatggtttaagtcaatcctgtggacttggaaacctgcagaatcactgggaagagctgcgagcaactaggtgggggaagttttgattggctaagcgaaaaccaacataactgtagaaattgatactaatttcaagatagtggaaacaaagaacatattgagaatgaatgttctgttatatagataaaaactaatttattgttaaatgaaaataaaccacaaactttgtaggctaatgtttaaacaaatgtggtatattaaaagaattttaaaatttgagccacaccatatctgcaataatgtacaaattatgatcaataagagttttagaaaagactctaaagaaaatgagtaatgtcaggtagtggttctcagctatgtaagacccattgtctcctttttataagaaatattttgtaaaaccatctacactatcctcaaagaagaactcatagataatataatctatgtacatgattctccaaaagaaattaatatatgttctaccttaaatatattgaagaaataaagtaatttattataaaatgatacatgttttagtttataaatgccctggtatgaccacacagcacacctaagaagtagttagtttgtacctctgtgcagtctagcacttcctatgtaaatgtgacaggtataaaaacagaaaaatgaagtatatgaggttgtcagcttaattactacaagtagcattgcattcaaggacttggtaaaggtccaaacaaaacaaagtacaatcttccctcactttacatggtcgtaaagtggactttacttcctggagatttcaaagtatattaatacaatagcctaaaaaatgtgttttgcttgtatatgagacagagttaggttttaggatcagacagtattatccacgtgactccctggagggcacatgatgattctttggaacccaagatgagtctttatcacgtaagacaaatctcctgttgcagtgcatctgacatcccctacctcgacacygaatgacagcagtgctcacagatcacaccatgatgtttagatggtttagatgttttgtcctcctcaaatctcatgttgaaatgtgacctccactgttgggggtgggcctgtgggaggtgtttggatcatggggtggatccctcacaaatggcttggtgccatccccatggtaatgaatgagttcttcttctggcagttcaagtgaaagctgattgtttaaaagagcctggaacctccccttctctcttgcttccactcttgctgtgtcatacaccaggtccccctttgccttctaccatgattgtaagttccctgcggcttcaccagaaggagaatctggtaccatgctacttgtacagcctgcagaaccatgagccaaaataaacctttttgctttataaattacccagcctcaagtattcctttatagcagtacaaacagactaatacagaaaattggtaccaaggagtagggcattgctctaaagatacatgaagatgtggaagcatctttggaactgggtaataggcagtggttggaagactttggacgtccttgaagaagataggaagacaaaggaaaatttggtacttcttagagacttctcaagtggttgtgaccaaagtattgatagaaatatggacagtgaagtccaggctgatgagttctcagatagaaatgaggaagttattgggaactggagtamaggtcagccttgttacaccctagcaaaggacttgtctgcgttgtgtccataccctaaggctttgtggaaggttgaactaaagagtgatgatctagggtacctggtggaagaaatttctttttttttttttttttttttttttttggagacgattcatgctctgtcacccaggctggagtgcagtggcgcgatctaggctcactgcaacctccacctcccaggttcaagcaattctcctgcctcagcctcccaagtaggtggaattacaggtgctcaccaccacgcctggctaatttttgtatttagtagagatgggtttcaccatcttggccaggctgatcttgaacccctgaccttatgatccacctgccttggcctcccaaagtgctgggattacaggcgtaagccaccatgcctggccctggtggaagaaatttctaagcagcagaacattcaagaggctttgtggcaacttctaacaacctgtggtcagacataggagcaaataaatgatttaaagttggaactcatatttaaaagagaagcagagcccgttgaagtttggaaaattctcatcctggctatgtagtagagaaggagaaagtgttttcaggagaagaatacaagcaggctgtggagcaaccacttgatagagagatttgcatgaatagaagagagcctagcctagtgctactaatcaagatgatgggaagaaagccttgaaggcatttcagagacctttaaggcagccccccccccaacccccatcacaggcccagagtcctaggagaaaagtgtagttttggaggccaaacttggggcccagctgccctgtgcagcctctggacactgttcccagcatcccagctgctgcatctccagccgcagctcaaaaagccccaggtatagcttgggcctccactcgctctgaagggcacaagccactactgtaagccttggtggctttcgcatggtgttaagcctacaggcacacagaatgcacaagtgaaagaggcatgggaggctgcacctagattttagagggccacgccaaagggaaatgtgaggttggagcccccagacagagtccccactggtgcactgcctagtggagctgttggaagggaggtgccacctccagacccaggaatggtggcgccaccagcaacctgagcctggaaaagccacaggtcctcacctccaacccatgagagaagccacagggccagagctgcccaaagccttggaagcccacctcttgcaccartatgccctgtatatgggacgtggcatcaaggattattttggagctttaagatttaatgtctgccctgccgggtttcagacttctgtggggcctgttgcctctttcttttggcagatctctcttttgkaatgggaatgtttacccaatgcctataccaccattctatcttagaagtaaatagttaattttttatcttacaggattataggtagaaagaagatggcttgaatctcagatgagattttggacttttgagttaatgctggaacgagttaaaactttgggggactattgagaagggatgattgtattttgtgatgtgagaaggacatgagatttggggggccagtggtggaatgatatggtttggatgttttgtcccctccaaatctcatgttgaagtgtgacctccattactgaggtggggctggtgggaggttttggatcatggaggcagatccctcatgaatgacttggtgccatccccatggtaatgagttctcaccccggtagttcactcaagagctggttgtttaatagcctggaacctcccatctccctcttgcttctgctcttgccatgtgatatgctgggtccccttttgccttccactgtgattgtaagtttcccgaggtctcaccagaagcagattctggtgccttgttgcttttacagcctgcagaaccatgagccaaagtaaacctctttgctttataaattacccagcctcggatatttccttatagcaatgcaaatggactagtacacccaacaagcaaaaacacccatatcaattttcagaactttctccgaggagtttattaataaatatccacattacctttttatcctcataggaattttctagtgctgatttacatataaattgctgtcttaaaatttaactttctaaataccagaagctctccaagataattgtgacaaccaaagcatccctatgttgagaaccagtaaggagtaatgtgaagtgactttaaaaaagatctacaaggactgatcagtcattatggaaatttttgtgttataatttaagcaaaaaattctgttttccagtgtagctcatgaaataattacagtaatctcaacagtgtagtttaattcttggaaaacttaatgataacttttttcccccctttttaaaagagagattcccctggagcttcagcgccttgttcatggtggccaagtgaatttggatatggaggatcatcaggatcaagaatacataaaacctagattgaggttcaaggcttttagtggagaagggcaaaaacttggaaggtaaaaatcctaaaatgagaaaaatacctttgttgaacatgaatttttctttgagaataagaaaagcaaaatgacctatgaagtaaaaaacaaaaatatgaaccatgcacattagatatatacatctgttaatattatatcataatattatatcatgtgataccattatatcataatattaattgtgatattaataatactgtaattaatacttagattgcagttaccatgtttgtggccctctaagccgtatacatgtgttatctcacttaatctttacaacagctctttgatgtagatactgttattacttcattttgcagatgcagtaatttgcccaagattgttgagctaagaaatgactagcatgtgggattcaaacccaggcactctgactacagagtttgtgcttttcaccactatattatatgcctctttcagattacctggtttcaaaggagagaattgtaaagggttgtcgatgagataaaataatggataccttacatcacaacttaagcatgcatgtctgccatcagtaatgaccaaactcttgcagcaggagcaaygtgcttagctttgtgattttcaatagtttttaaacagccaaacccttttttcaagtcatggaagtgcaatatgtaaaacctgagctcctctgattgtcggtgaaagaaggcattgtatctgagacatttccaaagaaccttaggactttgaagagcacaatttaaaaaccaacgcacatggcagaatgtatgagtggtttcctttataatacccatggcttaatgtaatcttagaaatttaaaatatgttggtaaaagttaccctctactcgtccacatattgttgcaggtgatatggaattgccacattggcaatgtttccagtgtattctttggtgcatcctttgcttctcttcatgtgattccttcccttccaagcccccttcagttgcctcgtgtacactggttgtctattctccccttatttttcaagataggaaaaaattcaatattgcttctttatgctttgctatctctagtctccctttctgtattctcttctcctgatagagactggcactggggacataaaggaaatacaggaatttatgttgacctgtttttcttaggacacaaactctttaattttaggtcacaggtttacttggaaattttctccctcgtctctctttacacgtcaggcttctctttctttctctttttttttttttgagatggggtcttgctctgttgcccagactggagtacagtggtgtagtcatagttcactgcagccttgacctcctgggctcaggcaagcttcctaccccactctcctgactgggactataggcactgccgagcgcagctcattttttttcatttttaggttttgtagagacacgtgtcttactatgttgcccaggctggtcttgaattcctggcctcaagctgttcttctgccttggcctgccaaagtgcctgggttacaggcatgagccactatgcctggccaggcttctctcaaattgtataatattatgtttttactcctcttgttgtgatcaactatatatatatatatatatgtatgtgtatatatatgtatgtatgtgtatatatagtatgtatgtatgttcttaattttgtatcacttcccatttttacttaatatttattgagattacgatttttaattagaatgcagataaaatgcctagtcatctcttcaatatatacatattccttctctattatttaaatgtatgaccaagaattaatgttggaccgcacatccttgttagtagacctacagtaaatctagacttggaattgaagaaggtagcataaagggaaggcagctaagaagagccagtgattattaaactcatgaaaataacgatattatctgatgatagtattcacaaaggccagtcattttccttataaggcaaatagagaaaataacagaaaagaaaggagaaactgatggaagaaagtgacagagatcagtggtaataatgccatgttaatttactagccatattgatcaagattttgattatggaaaacagaatctacttgctggtagtaataggtttcttacaggatcttgtgtagtttatagaatatctggaagaggcaagcaaaccaagctttccttagccaggagaaacaaacacagtggaagagtgttccagagaaaacaactatgtcccctagtcaggtgcttggtgcccatgaaactagggactagatactagaacattccatcatcgaagaaataaatgcctccaccaccttagtaaccacaagagctacagagtttccactttgyagtgcttacttccaccaaacaagtgtatgtttgtttggtggaagggtagaatcatgaaatcctagctgcaagagagtctgggagatggagtctttagaattttcagcttctagtagaaggagatagcatgatgatgtgagcctatgtgttcacaaacccaaatgttgaataagcaaatatcatatattctaaagtgaagaattacatagaacattttatattaaagatttacattaagaaatatattaaaagtttaatagttaaccttcatttagaaagtaactttctaaaatggcttggttctcaagagttcaagacaattatttactgagcaggaaataaaaagaagcaagtaaaacagaaatgaaaataatctattgtcttccatagatggcagtctaattacacacagaatgttacatagatgggaactaaatcttttcatgtgatatacaattatggtgcaaaccaaaatgctgtaaaaatgttacatagtaccctcacataatagaagaaagcaaaccatagatataaaactgcaaatttgcaatggtagaacaaactgtattattgagtaaaaattagcttggtgagctagagtagtgcctaacaaaatcacagagtcatttttaatagggaggactagcgagtaggcattcttggtaggcttttgagctggcgtgtataatgataaaaatcatgatttgaagctgatgtttctgcagaagaacagtcactgcctgtttgtcctactgttctcttcaaaagattgtgcttgccactctcacttacctgagatttgacttcatctggggccctagaccctgagggctgtcttctctaaaacttcaaagccttactttatctcagctcctcaacagctgtgagctgactgaagcctgactgggttgtcagccctgtgtgactcagtacttctggggacagcctcagctgtgctgagcaggcagtgctgtgcctcgccagtctcacaggcctgagctgctttcctaaaccccctcctcgacccctgcccctcactctcagcaaatttctttgcttccagcttcattgagaaaatagaacctgacgggaattcacattcttattatgtttccctccagccttcaagctggtcatttccatcctcctctccctccataagtttgaagaagagggtgtttctcctgtctctgagggaattacaacctacatcctttcctgccatttgcctacaaaccttgttgtaccaattaatttctcttttctttcttaaaaaattttctttttaatgtaaaagttttactatggcttgatcaattgaatgatagggagaaagttttaaatagcaaacagatgtgattttgacagctaaatattagaattaacataacttgcatgggcacagtggctcacacctgtaatcccagcactttgggaggccgaggcaggcagatgacttgagattaggaattcaagaccagcctggccaacatggcgaaaccccatctctactaaaaatacaaaaaaaaaaaaaaaaaaaattarccgcatgtggtgacaggcacctgtaatcccagctacttgggaggctgaggcaggagaatcacttgaactcaggaggcagaggttgcagtgagctgagatcacaccactgcactccagcctgggcaacagagcaacactgcatcccagaaaaataaataaataaaataaattaattaacataactttttaggctggttttttaataccacactaccagcttgtccagctatctgtctgtgtggttctgagcatgtcttttagtctctctgtgactcggtttcttttagataaaatgatatggttggcctaaattatgttggaagtccatccattccagttctcaaatgttattattccatatacaatagtttcattgtgacatacacacattttcttacctagcttccccatcctccattttctgttttgagaaaaagcatacctggtcagaatctgccttaaaacagaaagcagtagattacaaaaataatagggaggcaacttggtgtgtagaaagagcccaatataaacctcagctctctcacttaccaataggaatattgggggtaactttttttttccagagttgttgttaggataattataatgctaatagccaacttttagtagtgccaactatataaaagcaccatttgaagtgcttatgtgtcctaattaatttaatctttacagcactgctgctgttggctctcaggcacaataagggtaagtgacttgcctggtgttacagaataagtgcagagttgggattgaaaccaggtaatccagctctgagaaccatgctgttaacactgcttcccaggctgatgtaaatgaaataatgcatgtggcagaggtggtaatggtggtagtgacgatgataatgtgtatacctggttatcagtgaggcggaggtaaagaggacctttgcattcagtgtctcatgtyttttctcttggattttcatccccctcccttgtgtaaggaacgctggactcttggcacagtaaaccagattggcagtgcaattacttaggccctcaattccaaattaaaaagaaattccttaatatctgatcatttattgtaagtcataattttaaccttatgtatatttttatgtatcctcaaatcagttctaaaattagcatcaggaaatagctaaagaaagagaaagtgtcagcagttagtaccaggtaattttatcactttactgtgtactctgagagagaagytttttgaatggaagtaagagtcatgatgatttagattggactaaagcccaaatgctcatagaacttttatactagtaatatgtagatacatgcgtgtctttcttccagaagaaaataatctataggaaaccatctaaatctcagagttcaagagaaaaaacttcaagactatcaaaaattccttaagatgactgagaaaattgagctaaatttatttgaattatttaaccaaaagagcactcctctatttttgacattcacttttggcatatactggctgatcatcctgctagtgttagaaggggctaagacagcaatgccagggtcactagtaaccaagttctaatggtaagatattctatcaagcttcattatgaatttattgtcatgtaataacattttattcctcaatggtacttagaagttatttctcttttgcaaagcagtgcttgaatcagatgtgtttaaatgatattaaccaagtccaaattaaatgaatttagtgctgataatatgttcacaatagctggcacccgttgaaacactgtgttctaggcacaatattaaggacttactggtataatataccttcataacatagtattattccctcactttataaatgatagaactgggattcaaaatgattgatgtacttactcaactttacacagttgacatggctgggatgtgaaaccatgtctgtctgtgctcttaatgattctttgaccctaactcagagttgctcgtatttctaaataaaactggtttgctaaacagtgatgaagttgcaaacagttaaatgaggaaaggatgcaaagttaggcttttatgagagattagataaaccaaataagaatcgtaggatccaaaataactttaatataatgaaagaggttgaaagaagtataggagactcaaatgaagccatgttctaagtgtttatcgctgtcttcagtttgtcatatattttacacattcagatttgtgtttaattcctcttttttagccttacacctgaaatagtcagtacaccttcctctccagaagaggaggataaatcaatacttaatgcagttgttcttattgatgattcagtgccaacaacaaaaattcaaatcaggttagcagatgggagtcgtttgatacaaagattcaatagtacacacaggtaagcttctttaccaacagtgtcctgtttgctgttatatacactggattgcttatctaagtagaactgtatgtgacttgagtaatgaagaatatgatattctttaggtttacttttgaagtaagtttttgacagaagaaacatttttaaaaggacaatagctgtgtttaagaaatgaaatatgtggtatktaaacagtctctataaactatccaaatactaatgtgatctcagatatcacacaaaaataaattaagaactatagttttacgttgttactaaaactatatgaagtcgaatcagatttaatttaacatagtaaaaccttttggggactttattcatttaaaaatttgtgataattttgattgggattaattttctgtatagcaaatacttcataatataaatgtgtattgtaaatcaagtttaattgtacttttgtcaagaacttcagatagttttaaatgtttctttaatattgacttgtacatcaacatttgatttgtccattgaagtaagaccctaatagatatatttatgattttggttgaattactatgtttatgtgagagtaattttttaaaattattcctatgatagcacatttcatagttttagactcaccttgccacaggccaatcatagttacctttttctgggtcatatgctgctaacacattttatactccgaaaaaagtacaacctgcattttttttttttttttttttttttttttttttttttgagacagagtcttactctgtctcccaggctggagtgcagtggcggaatctcagcccactacaaactccgccttccagattcaagcaattctcatgctcagcctcttgagtagctgggattacagacagccaccaccatgcccagctaattttttctggttttagtagagacggggttttcaccgtgttagccaggctaatcttgaactcctggcctcaagtgatctgcccacctctgcctcccaaagtgctggaattacaggcgtaagccaccgtgcccagctggacctgcacttttaaaataacaacattagtacacttactttattcataacttacctgaagattgtttccattttacaggaaaagtaaatgttaagtacacactaaagttactttacattttaactgaagcctaagataaatccttcaattgaaatactatatattaaagaaagttacaacacctttatataaagattaaaattttgtgatttttattatgattcagttttaagtttacatgaaaatatgattttttatattacaaattatttttgtcttatttcttcaggatcctggatgtccggaactttattgtacagtctcgtcctgaatttgcggctcttgactttattcttgtgacttcatttccgaataaagagctaacagatgaaagcctgacactgctagaagcagatattcttaacactgtgttactccagcaactaaaataatattgttcctgtccatgcagtagcatgtgggaatagatgatgtgccgtattaataaggacaatacttcagcattaaaaacagccaaattatttttattayttttacagataaattttggttttattgttattctgtcttccartctgaatatagacaaatttggattaggaatagaccttgagataagtatgtttgagtttttagttgaaggactggcttatgttgatagtttttggatttctaggcaaatgagttgttacatgcttagtgttaatgtaacaacatttgtttgcagagaaaaatgaacaaaacccctttttgataaatgcatttggtaaaatttgcactaaagtttcttgatgcagcattgaccaacagccattaagaaatcttttgatcaaataagttgaaaatttgtctataatatatactgaaacgtgtcttttgattttgaaattgtttgatcatacaataattatttctcctattaagattttacacatcctttttacttactgatttagatatattactagtatcagaaactacagttttgccttgtattttacagaattatgactgttgtgaacttaaacagaaacacataaaggtcagcaattctttttttttttttttttgatatggagttttgctcttgttgcccaggctggagtgcaatggcataatttctgctcaccgcaacctccgcctcccaggttcaaaagattctcctgccttagcctcccaagtagctgggattacaggcatgcgccaccatgcctggctaatttttgtacttttgctagagacagcgtttctctgtgttgatcaggctggtctcgaactccgaacctcaggtgatccacccacctcagcctcccaaagtgctgggattacaggcatgagccaccacgcccagcctaaaggtcagcagttcttaagaagatatggtaaacagcaacaatattttaaaatcaagtaattacagttcctcccagagcttgcgttgatcacattcatttattcattcaacacatttttctaggaaactcactgtatacactaaacactattctgtgtgctcaacctagaatgtcttctccagaacaagactagtgtagaaatacaggaatgtaaattctgtcagacggactagatctaaagaattaccagcataaatgtttgcatttctgctgaagccagaagcttttccttcttcctagacaccatttcatccttaattattacttctggttagttttccattgccaccataacaagttacaaaatgtggcttaaaatagcacaaatttattatcttcacaattctgtaggttaggagtccaggttaagagtttcgcggtgccaagatcaatttgttggcagggttgcattctgttaggaggctctacaggagaatcatttccttgtcattccaccttctacaggacatcctcattccttggcttgtgacctccttcttccatcttaaaaaccagtgctgtttcatctctatgacccttctgttaccacatctctctgacaccagtgtggagaggttctctgcaggactcatgattaaatgaggcccaccggatatccaatctaggcttatctccttgtcttgaaatccatagtaaccttaattacatctgcaaaatctcttttaccatctaaggttacatacaggtttggagattaggacattaacattttacatggaacattattcttgcctactacagttcccacccaccccccgctccactcctgtgttaaagattcagattcatcacaaataaatttacatcactcataggtgctcaaaagtcacaatccattattacagcatcaactctaaatccaaaatcttatctgagtctcaccaactcaaaagtctcaaatctcacattgaagccatctaaattaagtttgggagaggatctgtgtgtgatttctgggacataattccaactgtgcacttgtgaacctagaaaacaagttatctgttcccaagtatgatggcatgacaggcagacaataatagttacacacgttcctgttcaaaaagcagaaacagatggaaaaaggagccatcagcaccaatcaatttacaaaaccagcgaggcacccttctttaagtttcaaggcctgggagtaatcttcagctcactgctgttctctgggcttgttgactgtctcagagtcatctttactttttcacaaaaggtagcacacgtttgcagctgagtatcaacttatcagtttgttcttcttttatattctctaaagctttctgttaaaaatggtggtgcttctgctgctataacgttgtcaagaaacttgtgggtcttttacatatgtcacagggatgcactcatttagataggaggctcctcacgtatctttcctggaaaatcctgtctctgtttttggctttttctgaaatagctgagaggatctatgattcacacccttaatatcttcaaagagtcttgtgtgtgacctgatattcagaccttttgatgtttctgaagtattagcaaaaggttatacagccatatcttcatcactttctctagagtaaaggctgtcctgacggtgaatcttagttttagtggcttttgccatttgaataggccgcgaatttcccaaatcatcaagtcctggtttctttatatttaacaggtcttccctcaatctacctctttccacattttactataatcagcaagaagacagcaggctgtaccttccacagcttgcttggaaatatcctcagctaaatattgaagtcatcacttaaaagttctgctttacacataacggcaggacacaactcagcttagcttttcgccactatgtaacaaggactcctttcctccacttctccagtaacatattcctcattttttaccaacagtctattcatgatgatttagatattctatggcaatcgaggtattctctattatgctcctttcttcaaggccgccctagcattaacattccatatttctactaacagtctgtttaaggcagtttagcttcttttctggcatgctcctcagaattcttccagcctccacctactgcccaattccagagccacttttctacttttaggtatttgttacagcagcacctcaagtacctagaaaactcttttatgcctgcttctctgccagatgacttgaatatggtactagatttggaattcacctttctccagggtcactgtttatttcaaagaggtgaatttacctgtgctagggttttcacactgggagtgctaccagaactaccacaggatgaaagtggtgagcccaccactgcagagaagttttctcagtgccgtaatatagaggaattctcaaaataagccctactccttttcacttactgaaaacaacttggataatgtgtaacagccagccccatttcaaaaagattaccaggggtaaaacaactttttcatgggtcaaaatcatcttccgaagaaaatgatttcttaaaagaattgaacattgtaaatcaaagggcattgtcctgttttggattaacaaaacaggaaaaataaccaatccttgtaaaattatttgaaattttcttgtttttatcagttgagtgcctatagatgcacatacaaaaacaactgccatttttgtatataatagtcttccaagatagagatttacattaggagagaattaaacatccaggagggatgaacagtatttcatgtgtgctatgtagtgttttgcttcattgagagtcattttcatgaattatttttactactgcagtcatcttaaatttataatcatctcaaaaaagatgtcacaatgaacagacaaccatctgtgaggtcagtcattttgcatgatgtatgtaatcaaaaagtttgaaatgtctgcttactaataaagaatgttttcactgaaacttattggaaaggtttttcaaattttctttgatttgtagttttgagtcctgaatagattgttttaacatgaataacatttcctgtggtttaatttcccttggcgcacctttgtcagggacagggaaggaactggttgtagcatattatctgaatatcctgttactgtttctgtttttattctacccaaataaaaaggttcaggtgcttcttttttgccacaatggatttctgaaaaccttgtcacaactgtgaaaggaaagcaaatcttgggaccccagaatcactaagctaaagggaaaagtcaagctggaaactgcttagtgcaaacctgcctcccattcattctattcagttatctctgctcactgagataaaggcctgtctgattgcctcctttggaagggctcatcagaaactcaaaagaatgcaaccatttgtctcttacctacctgtgccctggaagtcctctcccacacttcgagttgtcctacctttccatattgatccaatgtccatcttacatatattgattgatgtcttatgtctccctaaaatgtataaaaccaagctgtgccccaaccaccttgggctcatgtcatcaggacgtcctgaggctgtgtcacacctgtgcatccttaaccttggcaaaataaacttcctaaatcgagacctgtctcaggtatttggggttcatgcaacgtctattgttaaaaagtgcatcatgttgaagcggccttgtctggggcgacacccgaggttcgttgtctcacagccacagagatcaaaaatgcggacacacaggttaagagctgaagtttagtaggcaaaagaaagagaagatctctgctaccaagaggggtcctggaaaaattggttgctgatccgcagtgaaatgtagggagttttatagatcagctagtggggcgggagtagtgctgatgtacatagggtgcaaaaagccagttaggaacaggtgtgccatctgcatagggtataaatctctggcagcccccaccccaatcttctattatgcaggtgggttctctgcctgagcttctccatgttgcccatttctttcttactgtacacatgctaacaaaaaagggaagatggagtttccatggtggacatgtctggcccccaggtaacccttttctattggcacagctgcaggcctcctcccgtgcaatcttccagcttccttacctatgtttgcagctcgatctttcaggctgctctttgttggaaaagaaatgatttctagggctgctttttgttaaaagggaagttctgttgaggactcttttgccctcactatctgcctaaataatttatttctatatcctgtattagtgtttgccccttaagagtgtccctgatcaatgatgtgaatatatatgtgaccaatattgtcataaaggctaataatttctataatcctctgtaaagtttttaattaaagtatcttctaactcaaatagtttataaaaagccctagtacacatgtgtaaccatgtatatgtatgtgtgtgtgtgtgtgttatagcacatgaaaatagcatgtgtgtcctagaactaataattagctctaatccacttagcttaacagttttgcctctttggaatttatagctatgacctggggatctgtgcaggggaaaatgctcttttacaaagtttgaacttcatgattcattttcctttagataaatctttctatattaagagaggagaccacccctcatattgtcttatgcccaatttctgcctccaaagaagtaaaaactaaaaggcagaaatgaaacccacaggcagagagcctggcgccacgccctgggcctggttaaagatcgacccctgacctaactggttatgtgatctatagattccagacattgtatggaaaagcattgtgaaaatctccgtcctgttctgttccgttctgattacaggtgcatgcagcccccagtcaggtaccccctgcttgctcaatcgatcatgaccctctcatgcagacctccttagagttgtaagcccttaaaagggacagaaattgctcacagggagctcggtatttggagacgtgagtcttgccgaagctcccggccaaataaagcccttccttctttaactcggtgtctgaggggttttgtctgcggcttatcctgctacaatataaagcagagacattcagaatcatcctcggcagtggctaccttaaaatttcctttgagtcctatagtttgatttcatatggcttcactggcacaattccaagtgcacctactcaaaggaaagctacagggaaagagaatgctgataaaccactgttttgttgattgtatcacaacacttcttgctttctttggagggcgtaacagttaactaacttattcgcatggacttaaagacttcacacataattagcaatacaatgttttctaatggcttatcattattgttgaattaaggtgtgtatgataattaggcaacattaaaagaggactaagaaaggtttttcctcacaggattctctttactgtcctttacctccttcagtttacactggcttggaaatagtgttgaaaatggctcacaattagtgtcaatatttgagccagtgccttttctcactttaaccttggagatagaagaatatttaaaatgagtacatgtcctttctgttgtatgcctttgtattgatttttggtttgtgttttccttacatagtgtacctttcaatgtactttttagaacattcttaattataa

SEQ ID NO: 96613 - DNA, 57424 bp, Homo sapiens
tcaatatctccagctgtagttttcaataaaacctgtagaaagaatattacattttattaaattattattttgcttaataatcagttgaataactatttgacttgtagcaatcactagtgagttttcaattttaaaagaaatattaaaaattgtgtttggcttttgttgatatactcaacaaaatgtcaaatattcactacaactcattgtacatttagatctttcaaaataccatttcagaaaaagtttgggatttaagaaaacaatagcatatatcttttttaatcacagaaaaaaacttcattcatttagaaaacggtaatatctaaagtgagttcacttgaggctaggagttcaagaacagcttcggcaacacagacagaccctgtctctaagaaaatttgttttaattagccaggcatggtggtgttccatgctatttgggaggccgagttgagaggatcacttgagcctgggaatctgaagtaatagtgagctatgatcatgccactatattccagcctggatgacagagcaagaccctgtctcaaaataaaataaaacatgacaaaaccccaataatgcaaatttgttataattgagtttcccattgcatcaattccaataaaactgtgtagcaaattaagaaattaaagaataatgaacccattaaattgtgacattataggacaattttataattaccctttttaattaccttttactctctctgctcatttaacatcatgctattcctaatttacaaaggaacattcttaatctaattctggcttgtgatttactaaaatactatgtcttaaaatcaccttctatagtaaatagaatcccgtgatagcctttccaccagctcataacagcagatactccttggtagaaccagaaactttgcaactagaacccctccctgctgggcccacaggaaacagtttataactgtcttatttataaccacaaataaccaaaaagaatgttaggctctaaatttgaacattgtggcatagctggaaaccaatttctccagtattacttcttcttttttctcccctagtataccaaagtagatcagtgtcaataatttgtgaccatcacaatcttttagaatgctctttcaagtaaagagtatgcaatataactgttcaaaaacatgaggctgtttctcataggtcagtatcatcaatgctaagtcacatttcaccaccctaaaaagaaaccctgtactcattagcagtcactccctatttacccctactcctactctctggcagccactaatctactttctgtctgtgtagatttgcctattaaacatttcatataaacagaatcatacaatatgtggccttttgtgtctggcttcttttacttagcataatgttgctttcaaattatataggggtctttcagttctacacatctagtttttaaatgtcttgaaaatcacaatgactttatactcttactggtaaatatttcaagacacaatatatatttaaggcaaagttcaccattgaaaacaataaatagaaatccatatttccaatggtcttcataataatttctgatttttttgacagacttcccatgctgaggtatcagctctatcatgttcttatgatttgcttgtttatattattaataatatcttcaataagaaatttgtgatggctggtttagttaatctaaatactatggtctataaatctatttggctagtcgttatgaaaaattacaccacaatgccaaaaaagtgcctttttttttttttgagacagagtctcaccccgttgcgcaggctggagtgcaacggcacgatctcggctcactgcaacctctgcttcccgggttcaagcaattctcctgcctcagcctcccgagtagctgggactacaggcacccaccgccacacccagctaattttttgtatctttagtagagacggggtttcaccatgttggccaggctggtctcgagctcctgatctcatgatccgcccgcctcagcctcccaaagtgctgggattacaggcatgagccactgcgcctggactttttttttttttttttttttttttttttttgagacagagtctcactgtctcccagacccgagtgcagtggtgtgatctcagttcactgcaacctccacttccttggttcaagcaattcccctgccttagcctcctgagtagctgggattacaggctcacaacatcatgcccggctactttttttgcattttttttagtagagacagggtttcaccctgttggccagattggtcttgaactcctgacctcaggcaatctgccatagtctcccaaagtgctgggattataggcatgagccactgcacccagtcatcatctttttatatatattaaataatgaatttaaacaaaggaaaaaaatacaaatatatatagattttctccccacagctcatggatggttttgcacacccactgaagtatgcactcactggtttagaaaccactgctctaatgaacacactaattacatcatccctccctccacaggctctggaatcaggatgcccaaattcaaatactggcccttccatttactagctttgttaccttgcgcacactatctgacatctctgtcacttaatttcctaatctaaaaacgggataataatatcttttaggatttctgtgaggacaaaatgagctgtaatacatagactgcttagaaaagtaaatgacaaataataagtgctcaaaaaatgatagtcattattacgtggttttttggccacaggcaacttacacctagtaaaaagaatgcatatataatcgggccactttgctcaccagggtttcttaatcttttcattaataagctactgaattaataaagaaggtatatggctccttcctcctctggccatacattctctttggtcatcactactttgtaggcctccttggctctttctcttaaaattcccaattaataccttgataatatcatgtttcttataaacatatatgcaaatataaagccattttgattttcaagatatttaaaaactaagtgtgtacaacaggaagacagacccctatcatttgaaagcaacattacactaagtgaagaagccagacacaatttagaataagtgatcataatatgtggaaatttcatcttcagggaattacctcttatgcttaaaaactttctgtcaagtactacatttctttgcctcatcttcaggggctagggttacagcaaaacacagaacatttatggacaaccagggaccaagcactggtatcatgtatcaattacttcccaagctgatactaagttctttgaagggaggaattttgtcccatttactctgaatgtctctgtacgctttcagcacctaatgtaccattagatagtaaaggcaataaacattcgttgaacagacttattacatgtgcttcaaattcttcacagaccaaatttttgtccacactcttaaccttacagaacttagaagctttaatatctttgatgagccttatgctggaaaaagtcccaagctgtttttggatgaaaacttgggcccttatgttatcattcagcctatttctgttcagaagatagtatttatcacattttgtaattaaacatttatttgcatgattattcagtcaatgtatacttcactcaactaactcatgacaactgagtcaatgctgtgttttctttccattgtctccctaaaacctagcatagagcctggcaattgatttgctcaatcattatttgttgaatgaataatctattcaggaatgtatccttgttaaagcttttcatctatatgaccatgtcaaatcttgctttagaataaagcaattaagtctgtccttgaccagcagtataacctcaaactcactgatgcttaatacttctcaaaaactaagaaaaatatagtattaattcatccatccattcatttattcaatacctatctgaactccttctatcatgtatcaagtactgttccagatgcttgtctctgcccttatgttccttacattctatagggggaaggtaggaggaaggatacagtaatactaaataattaataaataccatgaaaaaaactaaaaaggttaagggggccagagactgctgggatgcaaggcatgattgaagtttgctatttcatagaaagtagataagaaagggctctttgctaaggtcaacacttgattagacagaggaacagcaagtgtgaaggccctgtctggcaggatggtaaatctattcaatctctaccagtgtttattaactgggggtgatattgccctcaagaaacatttggaaataggaggaggtaggtattttgggttttcacattgatattaaataagataggtgaggggtgggatggacatactaatctacaatgcccaggagaagttcaaacaaagaattgaaagaattggtctgcccataaaatatccattacatttttgctgggaattacagcatttttggtttcacttttaaattgctctcattacattatcaaatgtcaatgaataaaagactgtataaattatttatgatgcaatcatgtaacaaacaggatggtatgttgtgtaaatttagcttatcttaattcaactatatacttccaatctcattttctccaatatgctgattcatcaaatttcatatgtgatataagctaggtctcaatttaagaattcaggtgacacttattccacaacagactcttctgccttgtacagcatacaaacatcttggatgggaattggcatacattagccatcaaatcaatcagagaaacctttccccattctaatgtggtaatagtccccatttcccactttctctgactgacagtcatctcaggttttaaaaccagctcaaaagatatcttttccatgaggcttttcctaacttccccagttgttcactactcagtaccgccatagcaacctggtctcttctccacaagcacgcttatcagacatacaggcttttgtttacctgtctgtctcacaaactaaactataagcttttccgggaaaacaactaccttacccatccatctttgtatctccggcgcctagtacagtgcccagtgcctcgcaggcgttcaattaatgattgtagaagaaatggagaatgaatgaccttagttaagcaaagaatatatcaaactcaaaaatgtctgtttaaaaacctaagaccccagaaatcggctgcatgagttgggttaaagcattaaataggaccggaatgctggtaggtagagaaatctccacttgacttcttcaagtacatcctgaaaagtaccaacatcagtgtttcgatgcaacattgtccacatgcaggagtaaagacaacacttctcgtggtctcttcctaccacgagatcctgaaacccactccccaccccaaatccgggaaatctcactttggggatcccaggaccccaagttccctagatgaggctctcaccttcccattcgtgggaggctcctggatgtagatgttgctcatcttggtcagtacaaaggactctgctccttacgggggatgagagcggccggccggccactaaagctgtccgcctacgagtacactcttccttaagtccagtggtgcaggaaagcttcagtttgtcaatatcacgcaagacagggacaccaaacactacccctgcccaaaggagcccctcacggacgccgccatgttgttaccggacccgagcaccgctaaccctgagaagggttattccaatgtactccagggaacgagaaaagtccgtaaagttaccatagcttaatgttatttatgttatttgtattacaatattagaagggacacttcataagtgttggcggtgtttacactactctcgtgtgcagatcaaactaactccccctccaaaactatcagtaatggttcggaccatgtgtcttctgcaatatgactcgtccggaaactgcatccgcatctactggttctgccgtcgctagaggcgtacaggcccttcccgaccgtagcgagggtgctgctgcgctggggraaggaaaacgccgctttgactgtgccttgttctsacagctggcgggaagcaagcgccttttcgaaagccagaggctcgagttacccctcttaccaccgtcatggcagtcccaggtaaggagcaattacagggcctctgcgtccgagctccgaagggagcgcaagggagggtagggtagggtgcggcgtgtacggagcagcgmccatggggatttaggcggaggccttaaaattcacaggtttgttttgtktacatgaaaaagtttacactccaaacataaactctgaaggaaagaaaataactrtcttccccccaggagccaagccccagctgcttgggattacagggaaagtgtattgtggaagggagggaggagggagagactgtaactgtaggcctaagggggcaagcggccgagaaaaactaccttaactgtggtatggcttaaaactaaaacttgaagtgggaacacttggccgacccaggtaaccggaggcatcgtttgtcttagaagtcgctaggacccaccgggtgtgcgggttctactcctagctcttcctgttgtatgtagctgctccgtggccatagattggtcgctttgtgcttctgggcctcagtttccttataaaaagmaggagctttgttgaattatatataagatttcttctaactctcaaattctatgtccagaagttactgacctaaaaacggtgaactctgcagaataattacttaaaagattttctcgtcctcaactaccagcttacttggaagttctagtagcggaaagcatctcctcaaaccagctttgccactgcagaacactgattgcaggagacattttcagaaatacacacttctccaccccacctcccaacttggaaattcccagcgcactttagtaatagaaaagattctattctattagaatagaatactatgaattgctatagaattactatgaactatagaattactatggttcagaaccctaactttgtttaaacctgcacttcccagtattatttgaccaggttctttattctgtggcagcctttttgaacctccttctacagatagctgttattggaacactgtgcttttgtactaactgaagtttgcggaggagtacatctggagctgtgagagaggaaatgtacactctttattaagcctactgtgtgccaggcactggtactgggcattggaaatacagtggtgagcaaggtagacatggttacgcttcacacagaacttagaatttagcagtgaagagagagaaatttacagaaagtgggacaagtgccatggcaaggaaaatacaagaccttagcacaaagtaagggcaccaaacacatacaggatgggcagaaggactttccaaaggaggtagcacttaggaggagatctgaattgtaggaggggtggcttgaagggagaggagactgcagtcggaggaactggatacgtaaaggaagaggaaataygtgaaaagaggaaatgaaagatgttttctatggatggaactcaaatacagatgggagataagtgagaaattaagtacagaggtagtagctgtagctaatattgactaatatttatgtgtcaaatatgtcagaatgaaagatgttttctgtggatagaactcaaatacaaatgggaggtaagtgagaaattaagtagatagtaactgtagctaatattgactaatatttataagtcaaatatgtcagatactatatcaaacattgtattctatctcatttaatattcacaactgcactgtgaaatgagtattaatattcccattttacagatgaggacactgagggacaaagaaatcaagtaatttgcctattatgagacagctggaaagcaagaagtcagtctggttcctctrgactgtgtacttcattcattttgccatcgtataggataacttacaaggtagtttccagctctttaaggacctgtaggccatgacaagaggtttggcattatcctacagatggcaggaagccatttaaggattttaaagcagattcacattttggaaagataattctggctagaaagtagattggagacaaagtttaccagttaggagtaattctggtgagttataatgatgtgtggctgagatgtggtctcaataggtaaggagagaagtggataaattgaagatacatttttggtggtagagtcactaggagttggtgattgattcagtgtgggtaggtaaaagaggaaatgaggtttacctgggttttactgttaagcaattgggtggggctgtttactgacatgacaacacctcacaaggggcaggggttaaggggatgatgatgacatccagtctggggcttgttgtgttgaggttagtcagacataggaatgcaaatagttaatagtaagagatataatttgtagcttaggaaagaagtcagagtcaaagacaatgatttgggtgttacccacacacataataggaggtaaggctatgggagtggagcactctgcttagatggtgtgtagaatgtgaagggaaggtctgtggctgaagcctggtcaacatctaagaggccagcagcgaaagataaacctacacagtagattgcctaggcatcctgataggccgagtcagctctagtgatctttataccacacagctgcacccaaagttgacctgttatcactgctcatttcattacttgagcaagccttttgggcacctgtgtgatatgggcacactggaggacacagtgtcatagtctgtgccctcataaaactttaagcagtacatgaaaatgtgctacttaagaaaggggacaaaagtgattttttaaggcctcattaaaattctcttaaacttagaccagtgttatagatatgttaaccttctttcaattcaaaatagtgcttcaaagtataataatgttaaattgtgccrttaagctagatggcaagctataaactgtttaaacccagcaataattgagataataggtgtgacagtgctgtaaaagtacaatgcaagtgtcattagaaaatacagatacagaaaatcrtaagataatttcttagatgatcgatccagacagggtattaaaggaaaatagggctaatctaaacttttcaaggttatcatcaaggaggacaagtattatgttaggctctttaattttaggtttaatggattcagtttggcatttcttggggtggtcctgctagtgattatgacaaggtatgattataaagtaacaaggctgctttctgcaaaccacacataaaaatcagccttgtctgttttatgatcatgtgcttcacccgtgtttccatagcattgtgtataagcgtataccattatgtaggtaatgcaatgaaatgtaggcatttaggaaaatcttactcttagttgttattatagaaataatatttgatcacaggtttcagtgaaatttactttctttgaaaaaactgcttttcccattcacagttgttgaaattacctccaacattcatgtcagtgattcaccactctccatgaagagctgaactggcacaagtggcaacgtatgttactgatgtaattggcacaaaactgttttcttattatctccttcactgaagccctatagccaaggtagggaatttttctgtggccaagctaacatttcagtctggcacatcacagtgaataagatttttaaaacacattatgatagtatcttagtaatagaagaattctcaattacatccaatttttctttattcctaaactagactataggtaatttgttttctctctagtctatattgcacattgctgctaaaataattttcctgaatcayatatctgatcctatcattggtgggaggcatgaacttagttcttgacccctatctgtgaattttgtagttctcttcaagccacttaaccttttggaggttcagtttttgtgtctccataatggagttgaaggctaaggtttcttaagcttctaaagtgttaaaaatgccaagtctccccatctctctctgcgagaatgcagtgcacactcccaagcatgaccaaatcactctttctactctttccttccaccactcccctcatgcattctacaatcctgcaaaaatctgacttggccaattattctgtgaacctctcaagtgctttcctacctacgagcctttgttattacctcctatattgcctgtaactacctatgggaagctttcctgatctcttggctgaaactcttccctgccacttcttcatgcttattaaatagagctctgtgtcttttatggaacctggcacattctatcatggattacagctgtggttgcattaccatagataaactagtatagtgtcgcttcccatgggctgcatgcagctcaggacgactgaatgcagcccaacacagactcgtaaactttcttaaaacattatgagtttttttgtgatttttttttaaagctcatcagctattattagtgttagtgtatttcagtgtattctatagtttatgccctcataaaactttaagcaatacatgaaaatactacttaagaaaggggacaaaagtgatttttaagcccttattaaaattctcttaaactcacaccactgttatgttaacctyctttcaattcaaaataatgcttyaaagtataataatgttaaattgtgccattaagttggatggcaaggtatagataaactgtttaaacccagcaaaaattgagataataggtgtgacagtgctgtaaaagtacagtgcaagtgtggcccaaaacagtgtggcccagcaaagccagaagattggatatccctgtaggggcttgattcatccctatggcttctctaacattgagttcaaagttatacccatcataggtaaataatgaataattagagggttgattactataactgctgctgagcagaaatagtactaaacagattaagctaatacagtcttcattctgtttcattaggtaattaaatttctgtctcttcttaaacaaatttctctgtctcttctattttttttttctttttttgggggagggggtgacggagtctcgctctgtcgcccaggctggagtgcagtggcactgtctcggctcactgcagcctccgcctcccgggttcaagtgattcttctgcctcagcctcccaagtaactgggactacaggcacatgccactatacccgggtaattttttgtatttttagtagaggcaggtttcaccatgttagccaggatggtctagatctcctgaccctgtgacccgcctgcctcagcctcccaaagttctgggattacaggcatgagccaccgcgcccagcctctctgtctcttcttacaccttttttcttcacggattaattgtactttgtgaggcatgtagactaaagagttttatacatttcatatcagtataaatctcatatcagtaaacagctctttgattggtttgctagttctccttttggagtcaaatgattatgaagcctttttttaatttttatttgtttatatatatatttatttggagacagagtctcgctctgtcacccaggctggagtgcagtgatgcaatttcagctcactgcaacctccgcctcctgggttcaagtgattctcatgcctcagcctcctgagcagctgagattgcaggcatccaccaccacgcctggctaatttttggaattttagtagagatggagtttcaccatattgcccaggttggtcttgaactcctggcctcaagtgatccacccacctcagcctcccaaagtgctgagattacaggtgtgagccaccacacctggcctatgaaggcatttttaatggactattaagacatctgctatttcagaatacttgcattgagaaactcatttagcctattttttaaattatcttattaattaacgaagtattaatgttttagtaaaaaatgactaatttctactgctttgtctactttgactttagtacagtatttggggtcccaaagaaaggagtgtgtctatgaatttttaatataaatggtagaaaaataaaatacttggaattttactttgcatcaacttaagcagaacatatatattatataaatagatattaccacttataaaatatggctgcagtttgaattttaaaagcagaagtaattgaaattgtctttataggttccccgattgtaactaaaaccataatggagtaaccaaatataaaacttgttactaaacaaaattaatctaattgactctaatccaattaaaaatgaaaagaatgggtcctgtgacagaagtaattgcaatttctaattacttagtactaaaaaacttagttacttaagctgtatatgtttaaatttaagcgattctaggaaatattttaatgtaatgaaaatgtcaggcttccctaaattccaaaatagacaataggaaaaatatattaagttctaagcatcactgttaaaattcccagtgactaagttgttgcctttggaaagataggtgatgtaaaatttcaaggaaataaatttaaatcgaatatgacattcctttgcggaccactgaccaacctgaagcaagtgttgaggactcgccatctttctctcaatttttctcagtccttttatttttgtcccttctttttggttttctcaatattttctgtttcttcgttgtctactgttaactttaaaattttttttcttttgtgctaactgctaagacataatttacatgttttaaaaacagcacagatcacaaatgtttggcttgaagaattttgacaaataaattgagtgtgtgtgtatacgcacacgcgtatttcttagctggcaactggggtctagagaagttgccagtttccaacttctgaagtatagtcatgcaccacaaaatgatgttttggtcaataactgactgcatatacaatggtggtcccataagattataatactcttatttttactgtaccttttcaatgtttaggtatgtttagatacacaagtactcaccattgtgttacaactgcttgtagtatcaatacagtgacatacggtacaagtttgtagcttaggagcagtaggctataccatatagcctaggtgtatagcaggctatatcacccagatttatgtacaccatgatgttgccacaaggacaaaatttctgtgttrtgcctaacaacacatttctcagaatgtatccctgtcattaaatgaaacatgactgtattttcttaagcttataacctcaaatcaataagtatttgttgagcacctcttagcaactctccatcatggtaagcactgagttggattcaaaattatatggctactttaagttactggaagaaaaaggaccagcccaattacctgattcctcccactatcacccaagttgtttaacagaatactagattcagagtaagcccttaatatttagcaagtataagaatgaagactctgacatcatgaattaataaaattttattgaaagtctgcaatgtaacctctctgaagaatttacaaatgcaataattgccttttgtcagataatgtttacttgacagttacttttcttagtgttacagttttgtttgtttgagggagattttccagattggtttttgaaagggtaatttaatcacctttcacattttaaaactgccaaaaggtatatagtgacatgtctcttactcaagtccttctctgtctggacttagttttctttcttcaagtaaccaatctatatccttacagaggtatgtctaatatcttctgtaagaattaaagaaagaggtaagaaacatgaaaagatggctcgccagtcaggacagatttatttagagaaaacaaacgtgagaggcgccttctggccaagttaggtcagaggcacactcacttacaaactaagagtttttaaagattcagggtgggagagtttatcagaggcttggactgcttctctgactctttgttgtgcttatctgggagggagagttgtgtgtctgttcccatacatctttctgcagctgcaggcctatcagtctgcatgtagcttttctatcctagtgcacctgaagggaaaggaatgtgcttattaaggcccactattttactggggcccattgtatgagggtgaagtttggcagttgctcaagagactttccccccacctccctttgtgcccagctgtcttatctgtatgttattgtctgttctttctggctgcttacaattagaagagaagtaatttccttgaaatgcatgaggctagaaagggagctggaatttaaagtggtggtgtttgtcccagatgacagtgctcctgctctatcatcttcttttttttatacgaatggcagcatgccataaacactgttctgcaccttgctttttttctttttacagtatatcttagcgatcatgacatcattaaataaaaaccatccccattatttcataccgtaattgatttagccagttccgtattgatatttaaattatttctactctgtccctattaaaaacaatgctatagtgaataacattgtacataagtcagtatgcatttgtgcacataaattgggagaactaattcccaaatgtgagattgttgtgtcagagaggtatgtacacttgtaattctgacaggttttgtcagcctgctttccataasagatagtactaatttatgctcctgccagcaatgtatgagagtatgcccccctacacttccttcaacctttcaatctttgcgattctgataagtgaaaatggaatcccagtatagtttttagtgtacattttacctgttttaartaagactgagcatatctccacatgtttgagagtcatttctatttccgtttctgtgaacatcctttgcccatttttttcctgttggttactgatctttttcttaatgatttgctgagatatatacatagggataattgctcttttttggtcctatgaggcgcaaatattttttcctcaagtttccacgtgtcttttgagtttgcttttggtggtttttgccattcagtttttttccaatgtcaaatttataagtttttatataatgccttttggattgcaggtcatgattagaaaggaaaattttgaggtgggcacactgtattactctgaacagccttagcaaacttcaaaaaggaatggagccaagaactgcacgggagcccaaggcagggaagtaggtaacttagctgagtaaggacctcacaatatagctctactatagtcactttgacatggattttgagtaccgttatatcagccagggttcttattccaaacgatagaaactgactagttaacttaagcagaaaaggaaagatatcagctagctcagtgaatctaagcaaagcctgcataataagggtcagaaaatagaaatgacccagggaacccatatccaagatcctgcacaagcccaaacctggttagggctgctactgccagtgacatcagtgccyctggaaactggatcctgacagcagaatgaattaactttccccactttattgtgtcacttgcctcagatctattaagtcagttgcctcagattcaaactcttgggtagaagcattcagttgcccagacaatcacgaaaattaaagactaatgaagctgaaataataatttaaccaaagactggtgaggaactagctgatgtaaagtactttatttagagttctggttatatttccctgtcatgtaaaagtttcaactttagtaaagatgatgatctgccaagaaaaagtttcatagtttgtttactctaaaactgtgggatacttgagtgatgaatttatcagtgccttttgtcatgagttcaattctaatacatgcagagataagattatttcagatctattacaacatttttattctgttgtagtaatagtaatgatgcatttagcataattttattcagtatttttttagcatctacagtttctatggaaacagatttaacgctgaccccaattctctgagcttttctcaacatgcagttgttttcaaaatgaaagaccctcagattatattattcatttgattttattccagtcaaattctgctacaacatatttgtttttaactatgacagggtttacagggaaacaatgggattagagtacaatgctcaaaagcttcaatgacatattaaaaaaagataggaaccaacatggtgaaaccccgtctctactaaaaatacaaaaattagccgggtgtggtggcaggcacctgcaatcccacctactcaggaggctgaggcaggagaatcacttaaacctgggaggcagaggttgcagtttgctgagatcactccactgcactccagcttgggtgatagagcaagactcagtctcaaaaaaagaagggccaggagcagtggctcacacctgtaatcccagcactttgggaggccaaggcaggtggattacgaggtcaggagatcgagaccatcctggctaacatggtgaaaccccatctgtactaaaaaaaaatacaaaaaattagcctggcgtggtggcgggcgcctgtagtcccagctactcaggaggaggctgaggcaggagaatggtgtgaacccagaaggccaagcttgcagtgagctgagatcacgccmctgcactccagcctgggcgacagaggcagactccgtctcaaaaaaaaaaaaaaaaaaaaaaaaaaaagataggaacctaatagaaacagtagcacagttttacacgttaattggttaaaaaaatgcataaatactacaataagtatgacattttacctcttaaaagacctggagtttgctgtgcaagtgagcttcagaagagttgcagtttgtgagttgtgaagtgacmgtaaaagggcaataagaaatccatgaaaagttgtaacaccagatgttgatggatgttcacaacatttgcggtgaactgaggtcactagaaatgttttgagatgtatgtgcttgtgtattttgtatactcctgtgtggttcagatcagctggatgcaatgttctgcatttacttagtgttttatgtggatgaaaatcacattatgctcaaatttttccccaatgtatcaattacattagaacaatacttgcatttttaaaacaagtattgtagtagaacagactgtacttttactagaataattagagacagagtctccctctgtcacctaggctggagtgcagtggcgcagtcatagctcactgtaaccgtgaattcctgggctygagcgatcctcctacctcagcctcccaggtagctaagactaaaagcacatgccaggaccagctaattaaaacaaagaatttgtagagatgtggtctcactatgttgcccaggctggccccaaattcctggcctcaaggaatcttctcaaactgctgggattacaggcgtacgccatgatgccccacctcaataatgtatactttaaaataatattaaaatttaaggggaaaataactaatgttttaacttcataacaccaaagaaatagttttaaaattatatttgtttttaaattagcactgttttatgtttggactgtatatatttaaatatattatttagttaggattatatctccatttcaagggtttgggaattatatgccctttaccaggaaaatggaataatacctgtaatcccagcactttgggaagctaaggcaggcggatcatgaggtcaggagatcgagaccatcctggctaacatggtgaaaccccatctctactaaaaatacaaaaaattagctgggcgtggtggtgggtgcctgtagtcccagctactcaggaggctgaggcaggagaatggcgtgaacctgggaggcagagctggcagtgagccgagatacgcaccactgcactccagcatgggtgacagagtgagactctctcttaaaaaaaaaaggaaaaggaaaaaagaagaaaatggaataatactatactggggctttcattggttgattgaagccactattggaggataaaattagttttaactatatrtgcatacaatggaatattattcagccataaaagggaataaaattctaatacatgctataatatggatgaactttgaaaacattctgctaagtaaaataatccaggcccaaaagacaaatattgtatgatttccctatatatgaagtacctagaatagacaaactcatagagacagaaagtagaatagagactactaggggctagagggaagagggaatagtcagttttttaatgaatgcagttagtatttgggatgatgaaagagtttttgaaatgaatagtgatgatggttgtacaatattgtgaatgtacttaatacacctaaattgtatactttaaaatggttaagatggtaaattgtatgttatttatattttatcacaataaaaagaaatcagttttaatttgtctctggtatctatatctttagcattgcctgcatgtactactaattatacaggattactgtatttgtaaatatttatcagaactgggtgaatatatgactagtttgttttctcttgtcaaaatttgagtgttgaatttagatatttcttataatacctagcaattatagtaaatgttctggaatttcaccaattcctataagaaattagatattttttccttctaatggaaaacaggagaatatttgttaaccttaatgtatgtatgtgtgtgtatatatatacatatatatataaattattttacatttgagggacaggccagagtaccctggaatttcttcctcaatgctrtagaattcttggaatatttaaactcttaactgtttactagatttttttttttactttcttttatttttcaacttttattttagacagagtggatacatgtgcaagtttgttacctgaacatattgcataatggtgaggtttggggtacaaatcccatcactaaggtactgagcatagtacccaacagtttttcaacccttgtcctccctcctctcccaatggtccccagtatctgttattgtcatctttatgtccatgagtacccaatgtttcagctcccacttataaatgagaacatgtggtatttggttttctgttcctgtgttaattcacttaggataatggcctccacctgcatccatgttgctgcaaaggatgtaatttcgttcttttttatggcttcatagtattccatagtgtatatgtagtgcattttctttaatccaccattgatgggcacctcagttgattccatgtctttgctgttgtaaataatgctgcaatgaagatgtgagtgcatgtttctttttggtaaaatgattttttttttttttggatatatacccagtaatggaattgctgggtcgaatgatagtgctgttttaagttctttaagaaatctccaaactgctttccacagtggctgaactaatttacattcccaccaacagtctataagcattaccatttctccacagcctcaccaatatctgttgttttttgactttttaataatagctattctgactggtgtgagttggtatctcactgtggttttgatttgcatttctctgatgattagtgatgtggagcttttttttatgtttgttagccatatgtgtttgtcttattttattatattgaattagaaaaaaatgttattgatgtatttgtcaaataatttgagtaaattggcctttctgttgatttataagagtcatataattgagtaggtcattaagctgggtcagagatgattttttgttgttgctgtttcttaaagaaataaattctactgggtgcggtggctcttacctacaatcccagcaccttgagaggccagaggaggatcgcttgaggccagaagtttgagatcgcctgggcaacaaagcacaacctcatctctgcaaaaaaatttaaaagttagccaggtgtggtggcacatgcctgtagtctcagctgcttgggaggctaaggtaggaggatcgcctgagccaggagctggaggctgtagtgagctgtgatcatgtcagtgtactctagccttggtgacagagtgacaccttgtctcaacaacaaaaaaaaagaaattctataacaaatggtttttcttagcttttttcatacaataaagtttttaagttttcgcatatttatttacttcctaaaattctatccaattgtatttcaggttgcaacaaggacagtgtcagagcaggctgtaaaaaatgtggctaccgtaagtattctaaaagatgacatgctttgcattattcatactggaatcatggcctctttgggcaatataatgtagcaccctgatttcaggggcccagttgcatagtcctttagccctaagctaacatctagttacagaaattcctctgttagcactaaatattcacttttcttccctgctttagacccagtaacaggtagctatgtatctgatgactaccaaaagtarcatgaagatacaggtggttagtagtagattaaggagtttggagaaagtatattttttaaaaactatatacatacttattcttttccccctttccacatactaggagaaaaagtgaaggcaatgcaaactatttatgaagattttttgtgtttattacatttactttaaagattcaattggtctcagaatttctgctcatgggcgaaaacttgatttaaacaattattaatctccattatgattaagtgagtgaaaaggtaaacttaagcatgtgtaattataaatataaatttgtaattttatactgtaagtaaatattctttagttaaatatagtaatgcctaaagctttagtaacagctatagcaacaacatttgctattttctaagttgtttgcagaccgtgtgaattagcctggattgttaatacattccaattcattgaagagttattaagttttaccaactaagaatgatttgacaaaaagatgttcatgcaagaacatgtgataagagagtactcggcataaatctccatcagaagggcacattaaaagaatgctgagagaacaagtcgcatacttccaagcaaagctaaaactggctcaagggaagcttgctcaagtagcaaaattgcatatataactatatatatcactcacataaatgaaaactgaagaatgtacttgcacgcaagaaatgagtgcaatgaaatcttttctatttttaaatttgtttatatttctrcttgtttgctttctttcaagcattgctaactttgtttactttcttttaatcattgctgacttacctgcctcatttctttattcaagaattaagaacctacaaatgcttcatttacttcaaaatctggaatggatttcccagtctgtctactaatatcagtctctatacttggacttcttttaacctaacactttgaggaaagcaattaaattcattttctggaaataaaatatttgttgatgtagtctcctcattgttattttatttaagacaacaatggaagtatctgcagtaattagaattctttaggagaagccaagtcagcaaatcgttttgtcaatatttccgtatttagttatttttgctttattatttagatctttgattttagtgatttagttgttaaacaatttctgatttgtctcctgtggaaaaatttagtcatatttcccttctgtgttaaatttacatctccacagctattaaagatgaaggtcttctcaatttacaagtctttctaatagaaatttcatttacaaattagcttatcttttatttgggggccagaatttttgtattgcttgtataaaggtaagagaaaggtcaagaagatgatttgaaatacttttaattcccaaaaatatgggtatttttcaattgtttacaaaagaatattctctctcttttgttgcaaaaatagttgttcagattgtacartttaaagaatttcaatacttgatagaaaaagagcttatttctcagtatatttcaatagtgaatatattgttttttaaagttttgagttaagtttgaatatattattaaataacatgggtctctctttctgtggcagaatttccttagcaaaattaacttaaaagaaattcacaggccaggcatggtggctcacgcctgtaatcccagcactttgggaggccaaggtgggtggatcacgaggtcaggagatcgagaccatcctaggtaacccgatgaaaccccgtctctactaaaaatacaaaaaattagccggacgtggtggcgggcgcctgtagtcccagctacttgggaggctgagacaggagaatggcgtgaacccgggaggtggagtttgcagtgagccgagattgygccactgcactccagcctgggcgatggagcgagactccatctaaaaaaaaaaaaaaaaaaaaaaaaaacacaaaaaaaattcacagaaaaagagttattttgataatgagtttttattagaatttatttttaagttggtaacttcggaatatttaaaaacagcaaggacactaggccttgggattatttatgggataaatgtctcaaataatcatgatagttttcagaaagtatgattaaaagattagtatagtagacccagtggttgatcacagcagcaggaaataaaaacaaatatataaatacctttaacattttacataaatataaatttgtcacttttttattgcctgtttatatgtctgtttattggtgttcagtcttgtgtgtgtaaaccacatctgaaatgcattttctattttttatagtttgcttcttcaaaggtaggcaagaagttaagatacttgtaaagaaatttatcattaattctcaaccacaggtggtactgcctccctagaaatctgtagaagtgttttttattgtcagcaacaggatggagggtgcagcactatgacgcttactatgtagagcccaaagattataaacgtcctacaatggtaggacagtcctggacagtgaagaacattctggccccaaatgccaatggcattccctttgagaagcaggtaccttgtcccattattttagattatttttttccttttacagtcttattgccattgctgaatttgtcaattgctttttaaaagcaacttaattacatctttctaaaggtacagcttttgtttcctagaaacaaccaagctttttttctccacatttatattttgttgacctatatgatatttaattaaacatattttagaataataacagactcctcatagagtacaatatcagatggtggagtaaaataatataggcataaaccgagggaaaagtgaccgggaaaatatggcagaagaaacaagagcatgtagcatcacattagccaaaggatgtgggggaaattgtcaggtgcaacagataagagttataagaaatgaactgaaaaatgttctttgggtttggcaggtaggatgctttgcttcccttagcaagatcagtttaagtagatttgtaggtcatgaaacaaagtgtgtagattcaggcctgagtggtgggggatgaaatagagaaagccaatgtagtctccattttcaagaaatttccatgagagaggtacaaaacattgagtaatttctggaagaaactgggataaatggagagggtttttttcttttttcttttttaaggtataaaatgttggtatagactgagggaaacattagaggacatattacaaatactggaggataaggaaagattaagcaagttcctctaagaggtatgacaaggatacctctgaagtttggaagaaactagatgagaatagatatagatgttttcaggtggtgatagaaagtaggagatccagcctggtaatctcaattttgtttgtaaattagaagacaggattgcctccttaggtagggagtttgagtaggacaggacagtgagtgatgaatgttttgagacaggtaccagtttgagaaagtcattgagggaagtaggagaggaagttgactaaggacaaataaaaaatgctaatatgcatgaacaggtggttgttacactcaagcattgcctgactactctgtgaggtggtgggggagtggtgggtaacaacccagagaaatagtaactttgagtcagattcatttgtctgcaatgaggatgaacaagggtatataaaagagtcagacttgtaaaaggttgttcatattgtcagtaataagagatttgagactgggagaaaatgaaggcattaagggaatgaagatcataatgagaatcaaaaacagatctatgcatgagtgtaaatgaatgaaaaagctagaaggatgaaagacacagtcagagtttaatattggagtttaaaatttcagagataaaacagttgcagatgataacaaggaccatagtgtgaccatggaatctagaatgtcagggaacccagaaaagctatccaacaacctaggctgtccattcaatctcgtggcagggcttggggtaaagagttagagtatgagccacattcaaaaaatttcaatgaatggggctgttaacctgcagcagggagctgagtggacagttaaggattactacttggaaacaatattgagaagcctggagaatactaataatactgaggtaaaggataattaactatagagaaatgccctcaaggaagagccaaatatcccttaagtgtggtggcaacactatgtgagcgcataggacagttacatgtttaagaatctatcgaaaaagactaggaaaggggcaatgatcagctaggtcagtggggaaataaaagataaatatgaggataagacttccaaggaagttggccaggtgcagtggctcatgcctgtaatcctagcactttgggaggctgagacaggcagattgcttgagcccaggaatttgaaaccagcctgggcaacatggcgaaacctcatctctacaaaaaacaaacaaaaaaactagccaggcacggtggcgtgcacctgttgtttcagctactttggaggctaaggtaggaggttggcttgagcccaggatgcagaggttgtagtgagctaagattgtgccactgcactcctgcctgggtaacagagccagaccctctctcaaaggaaaaaaaaaaaagacttcaagaaagaatatatgactacagaagaggccggcatttttaggggtggaaccaaaatgttagggatgtggaagcttggtggaatgaactgggtttaggaatttaaaagcttataaaatagcttgtgtgttctcaaatctgaggattttaggtagagctaaagcctggttaaattagtagctgttagcatagtctatatattctgtaagcccagaagtagacatttgggtaccctatttataaaacaagagggtttttgtgtgtgtgtatagattgacagatttttatctgtacagtcaaaatgaaacatgaaactggagggtttttattattattattattattattattattattattattattattattatgtggcatagctactcctggaaggaggaaaggggagaatatacttgtccttgtattagtaaaataaatggtcataacctggtaccgtgtattaaatacctatttagtgctagtctctgtactaactgcatgaaagatattattttattcttaaaataactctgaaataggtttcatgatctccagttttattaacattcaagacaagtggttctggcacccgattacttaggtacaaacctctgctggcacttactagctatgtgacattaggcaaattgcttgatcactgtgtttcagtttcctgtctgtaaagtgggatcattgtagtacctaatcccatagagttgtgtaaattaaatgaattcatgcaagtgtttggatcaatgactggcttcagtaaatcctcaatacttgttatttttgttattgttccaaatcagaaaactgaggcccagggttactgtgttagtcagtgggaaaactgagatatgaactctggttatctgtaagatttaatactatgccatgctccttttcatttgcttttttaaaaaattgtgttaaaatatatataacacaaaatttgccattataaccattttttaaatatacaattcagtggcagtaaatacattcacaatgttgtaaagccatcgttactatttattgcaaaactttttcattgccccaaatctgtaaccattaaccagtaactctccactccctcctttccccagcccttattaacctatccctgtgaatttgcctattctagatatttcatataagtagaatcatacatatttgtccttttgtgtctgacttatttcccttagcataatgttttcatagttcatccatgttgtagcatgtattataacatcattcgttttaatggctggattatttctctatatgtatataccacattttgtttatccattccactgtggatagacacttgattgtttccacattttagctattatgacaagtgctgcaatgaatgttgatgtacgagtatctgtttgagtccctgttttcaattctttggggtatgtacataggagcagaattactatgttgatttttttgaaaaactgccaaactggttttctttttttttgaggtggagtctcgctctgtcacccaggctggagtgcagtggcgccatctcggctcactgcaacctaacctctgcctcccagattcaagcaattctcttgcttcagcctcccaagtagctgggactacaggtgtgtgccaccatgcccggctacttttttatatttttagtatagacgaggttacaccgtgctagccaggatggtctcaatctcctgacctcgtgatccacccacctctacctcccaaagtgctgggattacaggcgtgagccaccgcgcccggccgaaaaactgccaaactggttttcgtaacagctataccattttacattcccactagaaatatacaagggctctaatttctctacctttttgccaacactcgtattttcccttttaaaaaatagccatttatgatcataagaaatgtatatttggtcattgtccctggttcttgacacagagcttctaaaactcttggaatttcctgagtgatacgggtgataggagcatcttttattattcatagcatgcccctttcaaccatgcctgagtttatactaataaggcgattcttgggaggctcctagataatttcaggatggaggccatttgccagaggaacaatccatgtgattagaaagttggagctttcagccccacttccagacctctagaaaggggagaaggatgaggagctagagattgaatttaatcaccagtggtcagtgattgaatcaatcacgcctatctaatggggccttcataaaaacccctaaactacagggtacagagagctgctgggtttgtgaacacacagaagtgccacgattgtggcacacagagagcacatggaagctctatgccccttcttttccctatgccccttctttgccctacgcatctcctccatttggctgttctgagttccgtgctatataataaacaggtaatagtaagtaaactgttttgctgagttctgtgagcctttctagcaaattttcgaatttgagaatggggttatgggaaccccctgaccttataaagctggctggtcagaagtatgggtggcctagactcgctataggcatcagaaatgggaatagtcttgtgggtctgagcccttaacttgtgctaaccctgggtagtaacagaattgaattgaattgttgaacacccagttagtgtccagaaagttggagaactggctgttggtgtggaaaaaacccacacatttgatgtcagaagcgttgtgagtagaaacaattcagatcatcctcataggtatgaagtggtacctcattgtggttttgatttgcatttctttaatgactaatgatgttaagtatcttttcatgtgcttattcaccatttgtatttcttctatagacaaatgtctattcaaggcctttgctcattttttaactaggttgtgtttttgttgagttatagttgttctttatgtattctggatattaagctctaccagatagatgatttgcaaatatattctcccttttcactttcctgataattttgcacaaaagtttttaattctgacgaccattttatcaatttttttcttttgttgcttgtgcttttggtgttagatctaagaatccattgccaaatccaaggtaatgaacatttactcctatgctttcttctaagagctttatggttttatattttattttatttgacccatttttagttaatttttacatatagtctgaggtgaggggtccaactacattctttcccatgtggaaaagttgtctctgtaccatctgttgaaaagacaattctttccacactggatggactttcactcttgctaaaactcagttcgctatgtatatgtgggtttatttctggactttcaattctattccattggtctgtgtgtctattcttatgccagtaccaactgctttgattgctatagatttataataaattttaaaatccagaagggtgaatcctccacctttttttttcttctacattgtttgctrtaagaacatttagattgctagccataagaactgtaatttgcaacacagttattacctaggcttcactaacttattccccaatagaaaaaaaaatcagtaagaaactttatttgtagttttgcaattaatttgtcttatcaccttagggtygctttgcttgaagcaaagctaaaatggatgtggggcagagactgctaccagtatggtcattatttaagcattttatttatttttaatattcatttcaatgagaggatgagaggtatttgggtacaaagctagcttaagtactgtaaagattgagcatcaggagttttttttttttttgaggcagttttactctgctgcccaggctggagtgcagtggcacaatctcagctcactgcaacctccacctcccaggttcaagcaattcttgtgccttaacctcctgagtagctggaattacaggcatgcaccaccatgccgttaatttttgtatttttagtagagacaggatttcgccatgttggccaagctggtcttgaactcttggactcaagtgatccacctgcctcagcctccctaagtgctggtattacaggcrtgagccaccatgcccagcctgtatcatcaggagttctgatcaaagaggcaagccaaaccaacctagaaagcccaccattctgctccaaacrtgtaacaatgcaggaggaaaaaagtgttatgtcaacagcaaccacaacaacaaaaaaacccaactcaaaagaatgaaagggaaatccccaggtgctagacaagaaaatgagctcaaagtcagagcagggaatcttactgaaaacagtggatccacaggcctactgggtaggtgtttaagagctgtggagtgacactttcaagccctggggatggcagtatggcaagggtggagcccctcamgtaaagtcagactccttaaaaaggctgtgaagcagggattagaaaaaatttcactcactgaaagaagcaagaatgcgtatagtgtgtttgagttcccataagataattagaagaaaacaaataagaattggcaacctcagcctataccttgtaagtatatgtaagtatgaggagtgaatttacacggcttcctgtgaagcaggaactatttttcccatgctaagaaattaatgttaaaaattgtgctgatatcaaatcaaatttaaaaaattaagtccaactacgtgttgtgattaataaaactacacataaaactaaaaactacacagaaattttcaaaataaagggacaaggaaaaaacacatatttgattgaacattgctgatattccactattttacctacaaaaatggcaatttcatattacccaacgaataataaacaaaagagcactagtggaactgttagcggtggtgggtatcctagttaccggtggcgaatccgtccaggtctgcagcaacctctattcttgccacctcagaagaaagaattctactgagggtcatgagacagaagaagagactgaggcaagtttcagagcaggagtagacatttattaaaaagctttaaagcaggaacgaaagaaaggaaaatatacttggaagaggcccagacaggcaccttgaggttaagtgccccaattaacattgaacctagcattttacatgctggcttacttccagcgtcttgcacccctttcccttcattgttctcttatgcatggtgccctacctgcgcttgggaggtgagcatgcacagtgtgtttactggagttgtacacatgttcacctgaggctttttcttcccttttctggtggaatgcccccagaaggtcatactccttcatttttgcctcttaatgcacatgcttgtgtccacttgcccggttcctgagatcttattggaagctgctgattatcaatttcaggtatttttatctgttcagaaactgcttctccctggcactggctgtgaccaattatcattttagagagacagtgtgacagctgctggaccatcacttgatggttgcctgatgttcctttgtgagtgggggagccctctcctgctccactcatgcctgactagctacctactataacagaaccattataatttcagacttttgaggcaaaagcactactggtgataagtggaaactcacgaacaataaactaaaaagataaagtaatgatcttcaaagcatttactaatgtctcaaaatatatagcaaaatctgtgttacaaggagaaattgacaaatctaccctagagaaaacctggtgcatgcccacagagaygtctacagctgctcatttcaacattatttataatagcaattattgacaaatcaatacttgtataattttaagtacttctatcagaagttattagacaaaaaaattaagatggagaagagttgaacaagcaaacagatatagaacccttttcaacaaataacaatatatggttgtgttgtttaacaacagggatacattctgagaagtgtgtcattaggcaatttcatctttgtgtggaaattatagagtgtactttcacaaacttggatgtatagtctactacacacctaggctacatggtatagcctattgttgctaggctatgaacctgtatagcatgttactgtactgaatagtgtaggcagttgtaacacagtagtaagtatttgtgtgtctaaacatatctaaacattgacaaggaacagtattattatcttatgggacctgtgttgtctatgtggtccatcattgacctaaacaccattatgcagtatatgactgtgttttcaaaatacataacaaatctttcctaaatttactacatcctaggccacaaaagaagtctcatcaaataccaaagaactaatatcatacagatcccattctctgataacagtgtagtaaatttagagattgacaataaacacaaagcctgaaaactccatatgtttggaagctaaaaagagtgcttctgaatgattcatttgttaggaaatcacagtgaggaaaacttgttccaataatatggcagactagactaagaaacaactaagaaacttgtataaaatgtgcaatacatattttagatacattaatatactagaaaaaaataaagaactaagaatattcaaaggccaacaaccaaaggaaaggagaagttccaggaattaagccttgaggatatttgatgaaccctaggctcttgaacttctattttttatgggctggcaggatgtgggggataaaaataaggcccagggccctgcccaagccaaattggaactctatttagagagtctctggtataaacctaggactcccaaaggacttcacccacaaaataagagacaactggaaacaacccctagcatagatttgtagtgaatcattagtggatcgtgaaatgaattatttgatcaccattagccttggttgttttgaacattgaatatagaaatctttcaattaacttttgtttcagtttttgtgtgttagggtgtatttatccatgaatgtgtgtatgagtgcacttgtttgcattattttttactgttctcggttgttaagaaaacttgaaagctgctaccctaaagaaaacctagtacatgtgcacaaagagacatgtacaactgcccatttaaacactttttataatagcaaactactggaagcaacctacgtttctatcaatagtacagcaaataaatataattttcatacagtagaacattatcgattagataaaatgagcaaattacacctgttatgttaacatagataaatcacaaaatattgggtggcaggaaaaaattgcaggtataggtataattgagtttatttttttaagaatacatatcacaatatgttgtttgggaatgatagagaccaacttcagtgcagttgcttcagaggacaaaaaaaaaaaatggaatgagattgagaaagtgttccaaaagttgatacaagctctccagctgtgtgtgtgtgtgcgcacaggcatgcgagtgagctttttccttaaatgaattgaaagtgagcatgacaaaatgttaacatttggatgataggtatttaggtattggttatattattttctttacttttatagtgtttgtaatatttgactttctaaaacatatacataagtagataactgttgtagttttcttatagggtagagtctttagggaaatgatgcaagaattaaatgtttaggtattctttagtaaagcacattcagttatattaatgcttgtatattattatgccaactttaattagatgaaaggtatataattgcatgagtacatttgtcaaactgggaaagaaaaggtatgggaaaggaatataatataaaatcccaagtatgatggtattttttatttacttagtttagttaaagatattactgtatttttagaaagggaaatagaataactcaatactttgaaatccataagaagtggcccccaaaaatgcttattgaataaggagttctgaggaagaaaggaaaaagttctttctgagtattgcattcatggaaaagtatagggaaaataaccaaactactaccaactgaataaaagttaaagctttctacattatattattgaaattgtaacttactggttaccgtgaggcagcaaaacatacaaaaatacataatgtatctatagttttatcactcacattttttttgtttgtttcacttagctggtcacctgacttttgaatgccgcaattttctccgagtagaccctaaaagggacatagttttggatgtcagcagtacaagtagtgaagatagcgatgaagagaatgaagaactgaataaaytgcaggcattacaggaaaaaagtaagcaatatttttttccattctttagaaatgtttgtaaatgttctgtcatattatatcatgctttccattatacttactaagatctcttttatagtttatgtaagagctactgcataggaaataggttttaaatattgtaagttatttgcctaagattgaacagctaagcaattacagatccaggaggcaagtctatttctgacacacagcttatgttttttgttgttgtttttcccccatcacattaggatatgtgtcaaatggctgaaaaagtgtgatttaagatttggtttctagtcctatttggcaatttgttttagcacatgactttcaccaagtsacttaaccatcctgaggctcagctgccttgtgggataacacaaaatgttggattgtcaaatgatgctcatgcagatcagtgatcttagccagtatcaagcttcactaataatttcaagtatacaagtgatcgtgaggcataggcaaagcagagagttctgggcatgccaatacagctccccaggtatttcctttctacttcataacccactgtgatcaatattaacataagaagtttctttattacttataccaaagaaagttgatttggtcatgaaacatactcattttatgcttggatagttacattttccagggagctatgccccataaatctatagattccaggtttgtttaccataagcaatctcagttacatcctactaaaaggatgtaaatgataattatataaataggggttctatggctaacagatatcatttattttttttccaggagatctattgttagtgtgtttcagagagatttctccaggtcactctctgtctttcctggacacatcctcctctctccctagagagagagtggatagcggacctgttatttaaccctttctttcccacgttgtgtataaaatagctcatccttgcagtggggtttttagggattaaacgtgatgccataaattaaactactttgtaaactacaaaatgcactatggtaaatatcactctgaaataaaatataacttatttgaatataatcttagacaaggaatgagagagttacaaattttaaattcattttagtttagattgtcgatgaacattaaacagtaaactttgtttttaatatcaagctttccatattatgtccagttaaggtaagtgaagaagtcaaatgtaaggtgctaraacaagctgaaaaggaaaaagagggagagaatcccaaagagggcaaacaagagtcatatcatatatgagtatatacagcttcagggtaaagacagttgattgaatacacacacttttgttctctactgaaataccactaaaatgccagaagtagaaaaaaatttaaagacgtaaactcacaagggcaaagaaactgagttaggagggaatagcagtaaaattttggaaactgaaaagcagaagagtgataactgattacactcttgaaaaagctaaattcttcagcagtgtggaaagctgtgaagtaacccgacatatattctagaatcccctaaagacatgataattagtatccttgggtacctctggctgaatataaggctaaaaacaggaggattggtttgaagtctccacgagttagaccctcagttcccttcccctatgaagtcagatgacttcccttcatcaccccagcagactactggaggtttattttctagagagggtaaaacataggttctttagactgggacacactaaccatagctgaaagcagggaggaagttaaaggctgagaactttcttcacctatttggttcccagacatatatcacaattagtctaggaaatacttcactcaaatgagtcccagaaagaaaatttcgaagaactgaaggacattagttttacagttgaaaaggtgtcacaagtaccaaacacagagctaaaaatagacccacacaaaggcacaccattataaaacttcatatcacagggaacaaggaaaatataatccaggcttccaggatcagggattaaacaggtcatctgtcaaagatcaggagtcagaatagctttccacttctctaaagcagtcctgaaagctaatagatgtggggaatgccttcacattttggaagggaaattatatccaagtcagaataatattttcaaccaaattattagccaagcgtgaaaatagaataaagttgttttcagatatcttcattttaggttgatttttatatatggcatgaggtgagggtacagttttattcttttgtatgtggatatacacttgacccaagaccatttgctgaagacatccttttcccattgtgtgttcttaacacccctcatggtcagttcatcatatatgcatgggtttattcctggayttcctattctgttacattggtctatgtgtctgtctttatgtcagtacaatactattttaattactatagctgtgtaatatattttgaaatcaaggaatgtgatgcctacagctttgttcttaagattgctttggctgtatggggtcttttgtggttccgtatacatttttggattatgttttatatatctgtcaaaagagccattgggattttggtagggattccattgaattcatagattgctttagataatgtaggcattttaacaatattctttcaatccatgagcacatatattgtcaaatgctctttctgcatctattgaaatattcatttgatttttagccttcctttcttaatgtgatgtttcacatttatggatttgcatatattgagccatccttgtgtcccatggatgaatcccacttgatcatagtgtatgatccttttaatgtgctgctaagtttggtttgctagaattttgctgaagattgttgcatatatgttcatcaggtgtattggtctgtaattttattttcttaaggtacctttgtctggctttggtatcagggtgataccagccttgtaaaataagtttggaagtgatctcttctctccagttctttagaagtgctttggaagaattggcttaattgctctttaaatgtttggttgacttcaccagcaaagccatctagtcctgggcttttctctgctgggaggattactgacccagtgtctttacttgttactggtctgttcctattttcgatttcttcatgattcactcctgatacattttatgtttcaaggagtgtattcttgtaagttacccaatttgttgacatataaatgttccttgtattctcttatatagttatatatttatataacacccctttatatttctgtgacatcacttatactctcttttttcagttctaattttggccctgtcttttttctgagttagtctagttaaagatatgtcagttttatctttttattaaaaagctcttagtttctttgggcttttctgttgtttttctagtctctatttcatttattgtgttttttttttctagtttcttaaaggtataatgtttggttgtgtttttttgagatccttcttttcttttttttttttttttgacagtatgaaccacttcacttggccctcttctttcttaataaaatcatttatcatataaatttcccttttagtactgcttttgcagaatcccataaattgtggtgtgttgtaatttcatttatctcaagttttttttaatttctcttttgatttcttctttgacccaatggttggtcaggtgtgtgtggtttaatttctacatatatgtgaattttccagtttttctttcattactgatttacattttcataccattgtggtcagaaaagatactcaatatgattccaatcttcttaaatttgtgaagacttattttgtcacctaacatgctctgttctggagaatgttctgtgtgcttgagaagaatgtattctgctggtgttggacagcatattctgtatatttkgtttttattagaaccaatttctctataaaacctagtaagtaaactcctaatccatcattgctaagtagaagaggaaattattcccatagctactgttttatttccttagttcctcataactttttgggggcatgtttgcagtagttattctgaaattactataactccaaaaaaaaaaaaaaaagaagagagacaactactaaaaggaaagctaaagtgacaattttaatgtcagaccaagtagatttcaaagcaaagaataccaggaatgaagaggttttttttcctaatgataaaagggtcatttggtcaagagaatataaaaattctaagtgttggcctggcatgatggctcacacctataatcccagcattttgggaggccgaggtaggcggatcacctaaggtcaggagttcaagaccagcctggtcaacatggcaaaaccccatctctactaaaaatacaaaaaagtagcygggcatggtggcgcatgcctgtaacatcagctactcgggaggctcaggcaggagaatcacttgaacccgggaggcagaggttgcagtgagccgagatcatgccactgcattccagcctgagcaacagagtgaaactccatctcaaaaaaaaaaaaaaattctaagtgtttatgcacctactaacaaatatctgaaacaaatcctggtataaccgtaaataaaaattcttatggatagacaaatttgcaattatagccagcgatctcaacacctttctcattaactaatggcacaagtagacagtaaatctgtgaggacatggaagacttgagtaacactatcaaccaacttgacctatttaacctttatgtaacacctcacccaacaacagcaaaatacacattttttttttaagtgtacctatcaagatagacctgattctgggccatagcagaaagctacttagaaaatgcccaaatgtttataatttaatgtaattgtaaatagtctattgggtcaacaaaaaaagagcaaaagaaaattagaaggtaattttaactgaatgaaaataaaaacacatttgtggtatgcctccaaagaagtacttagagacaaacttatagtactaattacctgtattagaaaaaaagaagaaatgtctcaaatctatgacttcaacttccaccttaacaaactagaagaaagaacaaattaaacccacagtaagcagaagaaagagaataataaagatcagaggtgaatcaatgaaatggaaaacaaaactayagaaaatcaataaaaccaaaaactggttatttgagaaggtccataaactgaaaaatcactatccaaactaatgagattttaaaaagagagagaaaaagcatatattactgatatcagaaatgagagaatcgataacactacagatcatgtggacataaaagggagaagataaagttttaaagaactttatgccaataaattggataacttagataaaatggacaaattacttgaaagatacaaaccagcagaagtttgaagaagaaatctaaaatatgaagagtacccccgcatctcttaagttaaatgtttagtttaaaaactttcagcaaacttcatgcccaatggcttctcttatgagaaaacatttaaaggagaaataatacaatttgtatgtaaaatctttttaaaaattgaagggaggagagtatttctcaactcaatttataagaccagcattacccttataacaaaaccagattaagatattacaagaaaagaaagttagagacttattaatacagatgtaaaaattcttaagagaattttagcaaattgaatccagcagtatataaaaagtataatatgactaagttggttttatttcaggaatacatttgttttatattcagaagtcagtgtaattcatggtatttaagagactaaaaaaaaaacattgtcacaatattttaagaaaaattattcagcaagtccatcatatacttctgataaaaaattctgagccaattagaaatagaagagaacttcattaacttcatacaaaatctataaaaaaccaaaatgttacatcatacttaatgataaaagactgaaggccttccataacataagaaacaaggcaaatatgtccactcataccacttctactcaacattctgctggagattctagcgagtgcaataaggtatgaaaaataaaggcatccagatttcaggaaagagtttaaaactgtctttttttgcagatgaaatgatcatctatgtagaagtatctacagaatctttcaaaaaagcttctagaactaataactgagtttagcaaagttgcaagagtctacaagatcagttagcagaaatcaattgtatttctgtacactggcaatgaacaatcagaagttaaaattttacagatatcttttatggtagcataaagaatgaaatactaagaatataaatctgacaaggtatgcaagactgaaacatattttacaaaatattgttgagggacattaaagaaataagtaaagatacgctatattcattgagtggaagtttcaattttaaaagaaatgtmacttctccccaagcagatctattaaaaaaaaaggaatcacaatcaaaattccagcaggccatttgagaaaccgacaagccaagcaagaccttatctctaaaaataaaaataaaaaaaattgacaagccaattctaaagtacttgtggaaatgtaaagaacctagaaaagccaaaacactttcaaaaggattagtaaaattaaaaaactaacacaacctcatttcaagatttattgtaaagccacaggtaatcatgaaagtgtagtatcgatgtaaagatagatcaacggaacagaatagacccatacatatgtgacaattgattttttaatcgaaatttttattttgagaatattgtagattaacatgtagctgtaagaaatcacatagagacccttttgtcccttacctggtttccctcaatggtaacatcttcgaaaactacagtttcaaagcaggataatgtctttgatacagtctacacagaacatttccatcaccacaacgaccattcatactgtcttttgatacctacatccacttttctcttgccctcaccacgttcctaagccctataaaccaaaactttgctctctatttttataatattgtcatttcaataatgttttgtaaatagaatcttacagtatgtaacccttctgatgagcttttttcactaattataattctctacagactgactaattcgttattttttatttctgaatagtagtgtatgttatggatatactactgtttgtttaagtattaagtatttatccactggattgtcagtttggggttattattaataaaactgctataaacaggatttgggtgaacgtaagtctttatttctatgagacatatgccccacagtaaaattgctgggttgttatggtagttgtatattttgtttcctaataaactgtcaaactctacagtggctataccattttacgtccctacgagaagcgtgtgagtgactagcatttggtgttgtcaccagcatttttgtgcttagcattctaacatgtgtagttawagcccattgttgctttatttacattttcctaatggctaatgatgttatacatcttttcattactgttgaatgttgagttctgaacatacatatatgtgtgtgtgtatatatatgtgggtacatgtgtatattttgtatgttctttatacatgttgatattctttataccattctagacactagtcctttgtcagatacctgttttgaaaatagttactcccagtatggcatttgtcttttttatcctcttaccaggtctttcacaaagcagtagtttttaattttgatgaagtccaattgatcagttttccttttatagactgtgcttttggtgtcaaatataagaacctttgcctatgcatagatctgaaaaatgctcttttttttttctaaaagttttgtggttttaattttacatttaagtccatgataaattttgagttgatttttatgtaagcagtgaggcttgatctattttgcctatgggtgttcagttgttccaacaccatttcttaaaaagtgtctttcctgcattaaattgctttgcttttttttttttttccccaaaaaatcagttggttctatttgtgwgtgcttgtttctggattctctgtgctgtttcattgattaatgtgtctttgcctccactaataccacatagtctttattcatatagctataaaataagtcttgaatggggatactaattcttcccactttattcttcatcaaaattgttcaagctattttagttccttttcatttccgtaaaaattttaaacttatgactatatttacagaaagctttgctaggattttgaataggaattgcattaaatgtgtatatcagtttggggagaatggacgtcattactttgttgagtcttctgatccattaacatggtatgtctctttatttagaacttcttggatttctttcatcagcactgtgtagttttcagcatataagtcctatacatcttttatatacttttttggaaaattataaatgatactgtatctttaattttgttctctgcatgttcgttgctaataaaaataaattgatttttgtatgtttattttttcttcttgctgagctgattctggatttttgtagactccttgggaatatctgtgtaaattgtcaggtcatttgcaaatacgaacctgagctgatagagtgttttgttatttccaagtatttcatgtaattgaaataggtgagcttcaaaaatcatttattcattctgcttgaatagtatagaatctctcccagcatttcatcacttgcattgttttagtacttctctcataatggagagaagtttttcaggacaaatggcattgaccagttttctaaaaagctgttggcataactgacaaaatcgtggatactagaaatagagataagtagcctatagcactgatttgtacaatttctgagtctccagatgtacattgtcattggatgtgactttttaaaaaatgccttatttcccccatcctgttttcttcactttgcctttaatcattttttccaacttagtatgccaaccattgacaccttagctgatagcatgcaagaaagaggtggccagcaccacaaccagaaaggaagagagagaactgagagctggaaggcattaaaaatagttcttggaatttcaagactgctttccttcttaatacattttatctttggtctggccattwtttttttccttaattacatttttagttctctaaactacatacttctcactgattgtctttaataactcacattttttatatgttcaagacatcatcaacatattgtcttagcaaaatgcccttttgaggctcctgtcatttggctttcctgcttcttcccatttttattgtcgtcctatatctagttcaggccattcctcacaattattttaagattcctgtcctctttttttttttttttttgagacaagggcccactctgttgtctaggctggagttcagtaatgcaatcatggcttctggaatcactgcagcctcaaactcctgggcccaagcagtcctccgcctcagcctccagtgtagctgagactacaggcatgtgccaccatgcctggctaattttttttttcttttataaagacatgatgtcactatgttgaccaggctggtttcgaactctgagtcttatgcgatcctccagcctcaaactctcaattgtcttatttttcatctcaagtcctctcattgttcttagagacattcttagatgacctgtgaatgacctgacaacaccctaactcatcttctccaccttatcattgaaaatgatcttttctgtctcttcaccttagccacacatttccatgattgcaccctggaccttgttctcagcctccaaaattaatggcatacactgtacgctttttactccaagttcttatctttccagtttatttaatgtaaagaccctcaggctattgacccaccactttcattcagttagtcttccccttatctagcttagattccatcatagttatcaccattattcttttgcaaatatctgtaactgccttactcctttctttatcttttacccttatctagcaaaaccccaaatatggatgaacctctttgccttctctatgctgatccccttacagcagtgcaaaggtgaagaggcagactggtgtttctataaattcatgatccctaatctcagcttgcatttatttttgcaagttcactccacatacttattttatacctttcccacttctcccttcctccttcggctaatgactccctctttcattgacaaaatagaagacaccaaatgagagcatcttagcttccaattactgaatccacaaatttgcatatatatatatccatctttcttttctttccttcagttaaaatggaaggactgtccttcctttcraaggcatgtcctaccataattgctatgaattcttttcttcaagaattttattccttcagttatcccctctctgcgtcatcatttcaatcagcatcaattttttttcgtttttcccattgttcttccctagatcctttgcatccctgtagctaacattccatttctctgctgctttctagctaaacttctcatcaaagttatttattcttactttctctacctttttatttccatttgtttttcagtccacttgtcaaggtctttaaatactttttgccaaatttatttggcgtttttatatccacattctacttggcctttaggtactatttgataggtagcccctctcttcaacattcctacttcttggttctggtattcttccaaccccgtggcccttctttgtcagtctttttgacagctcttcttcttgctcttctcagcccgtaaatgttggagttcctcaagatgcagataatcttcctgggctttactccctgtatttttttctcatcattctcttactaaatgattttatttattccccatagttttaaatactatctataagctgatcagtgtgtgtgtccagactaatctctaaacttcagaatcacataccaaactacctacttcagttacctacttggatgtcaaacaggtcttttagatctcaaatgtctaaaattgaaatctttacttcccacccacaattgtccttcaggctcctacccacttcccaccaatccacattttaatcagtggcactgctaaaaacctggtggtcatccttgattcctttcgttccatcatccttcccacacacatatcacctcaggacaccatctctggcctgcactactccagttactttattattcccctgccttttccccttagccctttccaattcatttaccttgtaagtctgccgatcacacagtccgtctcacttagaatgtaaaatccttactgttgccttcatggtcttgaataagcaagttcctgcttacctctctggcctctcatttcatggtattctacatgtatttatgatattgttcatctgttctcattcatgttcattcttattcatagttgcccctccccttctatccgcaacaacctcttcttagtttctagaacgcaccaaactctttttgccttggagctttggcactaatttcctcttcctgacatgcactacccttgctgttcacttagaatgctatctttgcctgttaattttctttctcaccacttaactataagttccctgtgggcaaggatcatgcacagcaaagacccagtacatagcacagtacttgacacataagcatttagtaaatatttgttgaataaatgaaagcgtggtcaataaaaatctcctaggattttatgagacaaactgatgtctattctttaccttgccaaataaccccaaggcttcctcccgagtagctgggagtacaggctcctgccgccacgcctggctaattttttgtatttttagtagaaatggggtttcaccatgttgtccagcctagtctcgaatttctgacctcatgatccacccgcctcgcctcccaaagtgctgggattacaggcatgagccaccgcgcccagcctgctttttctttaaatatacacaagttctgtcacccagaaatacttcttatatgtacaaagatttccattgcttattgtttctaacaatgaaagtagaaattgataaaatatggttaatgggaacacttctgtgtttaataatgatatatatttaatgacaaagataaatatctgctatgttaagtgaaaaaaaagctgcaaaatatatgtgacagtacatttttcaaaggcaaaaaatacttggaacttatatgcaactatgtgtgtatgagtaaatgtgtgtgtatttggttttatataaagaatgcctacaagaatacacaccaaatagtgtatttaaaaaacaagttagagaataatacatattgcatgatcctaattttgttgcaaaataaaattttaaaactgtgcactgttgtagtgttctgctttttaagggccaaacaatacccatcaaaccactggccttgatttcctatgggaattagaggtggggtacttgcatttttttacttgatggacttagtatttgaaatgtttataaaaaacatttaatacttttatgagttttttaatggataaagataattaagaaaggggaaaattattacaaaaattatcctaaccagtgaaattcaccaacagctaaaattttaacatatatacatgccatattaatatatagaatcatatattaaccagatttttttcttctcacctctcccccacaggaataaatgaagaagaggaaaagaaraaagaaaaaagcaaagaaaaaatcaaattgaaaaaaaaaaggaaaaggtattttttkaacaacattttaaaaaacaaagcaggcctatgagtttaggatggattataaaattttattttttgtgtataatagttaatttaatattttttcttcaacaactaagcttttcattgagcttaagtttaaactcttaatatatattttgtcttcatatacatgaaattgactaaaatatttgtattcttgtaatattaccatggctaataaattaacttattaatagaatttaatagaacttgtcatgctgtccaggtgcgatggctcatgcctataatcccagcactttgagaggtcaaggcaggagaatggcttgagcccagaagtttgagacaggcttgggcaacatagggagacctcatctctgcaaaaagtaaaagaaaaattatccaagtgtggtggcatgtacctgtgttcccagctatgtggaaggctgaggtgagaggattgcttgagcccaggagacatgatcacaccactgtactccagcctgggcaacacagcaagaccctatctgccccccgcccaccaaaaaaaaaaaaatatatatatatatatatatatatgtaattatatgcacatacacacacctttgtatttatatgtatttagcctgacagtttcatatatatatatatatatggtggctgatgagggttgtgaaagacctgaaggaatttttagcatcacaacttccttccagtcttcggccacctgtgcatttttactattaactcttttaaaaactaactggttaaagaagttattgaaagtagtaagtggccacttctcttgttaatgcgtgcagtttcattcatactagcataaatttgcacatacaggcattttttaaaagcacttaaccataattatttctagtttagacccagttctcatacagaataggttgtagaaaccaggggctgccactttgtagtttttatagagcatttaatacatgtattttaatatttcaggtatcttataaattggaaaagtagcccactttcaagcgttaggagttaactaataatctttaatataaaaacaaataggaatttagagctcagggttttctgttaatgtattattaaatcatttattctagcacaggaagatggattgctcacaggaaatgatatctgatagtcttccaaattctaatacagatagttcccaatttatgtggtttgatatgatctttcaactttatgatggtgcagtagaaatgtacttcaagtacccatacaaccattctatttttcactttcaggacagtattcaataaattacatgagatattcaatgctttattataaaataggctttgtgttagatgattttgcccaactagaggctaatgtaagtgttctgagcatatttaagggcagccacgttaagctatgatgttcagtaggttagctgtattttgtgtattttcagcttcagatagatttatcaaggcgtaactccatcataagttgaagtacatctgtatatttcttttttttttttttttttgagacagagtctcgctctgttgcccaggctggagtccagtggcacagtctcagctcacttcaagctccgcctcccgggttcactccattctcctgcctcagcctccccagtagctgggactacaggtgcccaccaccatgcccgactaatttttttgtatttttagtacagacagggtttcaccgtgttagccaggatggtctcaatctcctgaccttgtgatccgcctgcctcagcctcccaaatattttttatagtaacagattatttatttgggcctctttaccttgagcatcacaaacctgaaattaaattaacttttctgtgcacacttagcagagatagtgccccctgaaagtgttgctatgccacagcctgaaattttgccttaaaaaggagacttcaggccaggcacggtggctcactcctataatcccagcactttgggaggctaaggtgggtcgatcacctgaggtctggagtttgagaccagcctggccaacacagtgaaaccccatctctactaaaaatacaaaaaaaattagctggtggattacaggtgggtacctgtaatcccagctacttgggaggctgaggcaggagaattgcttgaactcgggggagcggaggttgcagtgagccgagatcacgccattgcactccagcctgggcaacaagagtgaaactctgtctcagaaaaaaaaaaaaaaaaaagaaacaaacaaaaaaaaaaacttcaggaccaaaaagctaaagaaaaaagtgcaggcagggaagaagctttagtcagaatccagaggtcaagtcaaacagggtctttaaaagaggaaaatagacaagatttgagaataacaactgaagaggcaagggtgcaggagaatacatgagaaaataagctttaacagatgattggaagtctaagtaagtagacaaacaaggaggaaaaaggaacacaacattacaaaaataagggaaaactcggagtcactaaaggaggaaggcagtcaaggaattcacacactatacagacacaaaatagccttggagccctgtagtctcctgaatttacattggcacctcctttatatccgtctcagattttcttagtttgagttttaactcctaatatttagatcactaaactaactctttagatacctttgtttacattttaaattaactcagtttctgtcttgtcactcatattttgagtttgagtataggtagaatgttgcacatctctttaagtaagatcttaaaagatagggttttctgtttttttctttttcttttccttttttttatgaatattagaggaaggaattgaaccaattttttcaatttagtattagagtaatatttttcaaaagcacaatgataacccatcctttttcatttatatatagcataaaagcatccttttgtaactaatgaaaattattttgtaatgcaagtattcatctgtatcactctcygtctagagggatcaagtatttgaaaaatcagaagaattaccaaaagtgcttttattttgctaactttcagctttcattcattcatatgaacgtacaattatagccctttaaaatagagaattgcaacttttgagacacttttaagaaaatatgcgaagttattgtatacacaagtgaatataataaggcttggtgaatgcccctttgtttgccttttaggattttgaatgatatgactgcatgaaaaaccaaaaatcacagaaaaataatttcatccttattgactttaaaactcattacattagtattgagtggaatagatactagttttgttggtttctgtgaccaagcagcaaaaattctaaattcatcgttttaagggaatgcaaatatatgaagcattttttaagtttatgtttatactccctaccttactccaagaagaatttaaggcagttcaaatcccacttaaatttatctatcagtcataaatgcaattctcagtcagtatgtattattatccataggtcttactcatccagttccactgaagaggacacttcaaaacaaaagaaacaaaaatatcagaagaaagaaaagaaaaaagaaaamaagagtaaatcaaaaaaagggaaacatcacaaaaaggaaaaaaagaagagaaaaaaggaaaagcattcttctacrcctaatagttctgaattctccagaaagtaactgagactttggcttaagccgttaaatttaaaaatttgtttttaaaacgtgtttgcccttccttggaatttgctatatattatgctttgcaataaatcacagccttttccatatagacatttttcgtatttgggaccattatccctctggcaatatatttttaatgtgctgtaactgtaaagtattaaatcagtcttgttacttgatagccatgccccaagtatagctatttgtgtatactaaacacatcatttttggtatttgtgtctctgtgtgtttggctagtgttactacttcataagttcattgtaaaatggctttactgccatcaacatgggtcatctacctagcagttaatgagtattgctgaatcaggtgtccaccttccaatgatgaagcaaggtaaggggtaatgttttgctcttgacacagagaaatttaatagctttatgtactaaaatataatatcttttaaagatagtgaaattcttcagttttttaaatctctagggattttttttcaatgttgtagaagatgcagctgcttaatggtcttgactaggactttttaaatgaatggtgtctgcaggtagatgatcatgaaaatatctctaacaaagttttactcttctatgaaatgcagaatttctagtacctgcctcctttgtttttgtaataattaaaatacttcttgtataaagagattagttcagcctgttagtaagtctgcagagatgatgctgagttggttgtgatttttagaatagactcctgggttgttttacaaatgtgccatattggcatgtcttacagtgatacctcaaacacagaaatttttatttaggaagatagctaaatctttattagaactgatttttattgtattcagtataaattttatgaagcttgtttctatgagtactgtggaaaattttataaatgtgagcatatatatttattttgtctgacataatttgtagttttaaagcaagtttcacactgaacttaacgttttcataaatgaccagtttgggatgtttctctcttttactttagtggcaaactcaagagtaaaaagtgtcaaaaaaagaattgagaattttattctgtactttttaaaatttaagagccagggagttgcatcatgaaagcctttgtataataatggaaattttatatgggtaagcattttcaaacacatattagtagatacgttttttaaatttctattttcacattgatcagtgttactttgcttaatacttaggtagcccttatgtccactaaagtaaatgcttatgttgtagaagcatcgaacatcaaccaatgtcatggcacagcaccaaagattgcaaatacctcactatggtgcgcttagaaattttcaaattgataacctatagatacagctgcaggtgaattcatgatagtgaaatcagctaagtatacttaacctcacaggctagaaaggtttactgattcttgtttcacctggcacccaatgtggataccctcagtaagactcagggagccttataactcctcttaacatatgcttacccatgcttaaattctagggaagctgtatccacagccctctgcattgcagccatgagagctctcacgctttcaacccttccataacctaatttagtcatttgggcctctcaaaaggaaatgcttttgtttaaataggtcagtcagttactgggagaaaaaatacagagccagtaggtttttagggatttgttttgcctttgctgctagttttttgaaaatattcttcgattatcaagattttaaaaatcggtttttaatataaagcttttttaaaaacgaggctggcacaagtgcagtggtgtttctttactcccactgcttgacttgactagccttgaaaaaataacagtaaaataaaatattaaaaaataattagaaaatgctacaaaggcaatgaccttattccattgagtaagatagttaaaaatgatagtaattgtagtgaaatagttaattacttgtaagttttattactgttaattgtagagattataaattggctcattaggtttctgaatggtgacacaataatgactgagaagagcaaaagtcagtcctcgttaactaatgtagtatgcaaattaaaatattttaatgatcagtaattttccccccagaaatgatgttggtatttctaagtaaatttcccataattttagcatagtttatgaaattgaataaaaatttattttcactgaagtaattttcttctaatatgatattattattgagattggatgcaaatctcatgaatatgttttagaagaaaattaatgaaattccctcccaggcagtatgtaccagaaggaaaactgaatttagcagtaaaacagtcctggtcattctaactacctgtatgatcttgaacaaagtcacttagtttccctgggccttggtgtctttcgtctataaaatattgtaccagattatctctgaaatcacttcaaggtttaatatatataattatcaatattttaaaattcaagcaatattcactttagaaattattataacattctataatagtaaaggttgaatttattaatataataaacacgttcaacttcttcaagcagataattgatatttggttcatattcttacaacctaatgcatgtcattttcaccaaatgcaggcagaatttatatttaggtttgcatctggaactagattatctggcactttatggccattatttttgggttgatggaccttctcaccacacaatttcccccttttttttttttgcatatcatatgttggttgatatttctcagaggtatccctatttcttcatacttaatatacatctccatttacatctttgactctctgaggtcaaaacaacaataaatgagaagtaaaacaactatatgtgtttgtatttacaactgtatctaaaattatataaccctagtttaccttcagagtaaactaggctgaagagttgttaataatgttgataaaaatgccattgaatcctttcttcaacaaatatttattgagtacctaacgtggcaaacgctgtgctaagtactggggatacagagataagtaagacacatttgcctccctgaaggacttcacagtgtagttggtaggagaaacaccagagcatacaccgttatataattagtgcagtaattgacatgaacatgagtttatagaaactcggggttacctaaagtagtctggataaattagaagaggctacctagagaaagtagtgactgaattgcaatttgattaaggataagaatgagggttatggcagttcctgacagagtgggtactgtgaacaaacaccagaggtagaacaagctgtgttatgtgtttgtcaagaattacaagcaatctggtgttgctggtgtatcataggcgaggcaggaagtggtaagaattgagactaccattttaagttcttaggaacaggaggaaggagtcgtgtgttccgtgtttgggagcttgaactgtaatgtgtaagcaatgagacaccattaaagagttttaaggggggccgggcacagtggctcacgcctgtaatcccagcactttgggaggctgaggcgggcggatcacctgaggtcaggagttcaagaccagcctggccaacttggcgaaaccctgtctctactaaaaatagaaaaattagccggacgtggtgacaggcacctgtattcccagctactctggagtctggggcaggagaatcgctcaaacccaggaggtggaagttgcagtaagctgagatcacaccactgtactccagcctgggcgacagagcgagactctatctcaaaaaaaaaaaaaagattttaaggaaggaaatgacttttattagggtttggttttatcaatttcataatccgattaatcccaccatttttaaaagatgaaattgctttcattagaaggctacataaaatataatttgattattttaggctctattattagactcacatttctttctacagtctcattattatttccaaaaattacacagtaacctaaatcatctgaaaacacataaagctactgtattctttattagatccatccccagagttatatgtacatgtacatactttgagatgtgttttgttcttaattgtattttaggttatttttgactgacttaaattctatcactattttaatatttgttaggtccgaataaaccatttagaatatttttcagtgtacaaaatgtgctgtaatttaataaggccccttgcttttaaaatttggcttaacctgtgaagcacaactgcttcagagttacagagaaacataccagttggtccactggatgagccctgtggttctacctcaggtaacctagtgataagctagctcagcagggagtgcttcaaggactccagctgatcctagtgctgagaccaaaacttcctggacattgggtgcccaagaacagtaggtttcttataccagtgtgacaataatcccagttgcgaaggccagtcttctgatctcagtatctcctcccaactcctctaaaaataggtagagtggcagagaattggggtgcctcttctatagcacaacccatgatgcatccagtcatgcctgaccccactatgcctttcccacaaattgggaggagttggggcagtgagcattttgctagctctgtctgtttcttgcttcttgtgccatttatagtccttggccatgagcaacaaaagtagaatggtgccagtgccttaactaaatttttctcaacctagattttcacctgagacaatatggtaatattattaaattactgtaaagatagcaaattttctgggatactttaaaatcaaagttgtatcaaagatcaagaagcacccataaaagctttataaactttcacaaaaaataagtgaaaattctttgtttttatggccgtgtaaaatgtcatttttataatggaaatgtcttaattttcaaacttaacatatactttaagcaattttagtatttaaacctttgcaaaattgtatttttgaatgtgaagttcaactttggcagtaggttgttgcaatagtgatctggcactatggtgccagtatagccacatagggttatttaaattaattaaataaatgaaaaattttattttttcagttgcattagccacatcttaagtgttcagtagccacatgtgactggtggctaccatattagtgcagatatagaaagaacatttccatcatcacagaaacttctcttaattctggtctagaagataaccttagtacttggtagaaattttgacaggctaatgacgaaaagtttgtaaccctgagctttgcatgcccaagaaaaataaggtattcttttttatatatcagaccagagaagctgtattcagcacattttgaaatgctagtttttggctatggccataccaccctaaatgtgccagatcttgtctgaaatgctagtttctgactacaaaaactacaggacatagtagatatgctcagtagagctgcttaaaataattccctttttttttctgttgaattctgttacaaaaccaggtctgtgttataatagaaaacacacttatgaataaaaatctttaaaaattataatttgcagaaattagttttatttctagatttctaggtggtattaatgtgatagcattaggtgggaccagagaactcatttgttttgtagctttcattatacagattatttaggaaatatatcagcaaaggattttttgttatgcttatctcttgaaacaaaatatttattgtacagattatacattgtgatttttttgttactgagtatattgtttgtgcccagaaaaatctaaaaagatgtgggttgacttctaagagatttaagaacaagtcacctctagtttttaagacagttcccttgatatttacctatccagtaccatctcataagaataactgcctgtaagtatcagaaagttgagaaatgctggtaatgtgacataaacttctcactgttcttcactgagataggactgcttatcttgttattgataaattatttaatttctcctgaataattagcataatctcatgtgatacagaaacatcttaattagcaaataaatttatacaaaggaaaaccaataaaaccttaatgtgcgtttaataaagtaactgaatgatcaaaaatgcagctgtgtcttgctttgtgagtgacgaatttttgaaaagcaatattacaaaccgtttcaagtgcacgctttatttttattgtcccatctctccagtaagcatttaaaacacagaatttttagttaataagcaatgtggatttgtgttgcatccattgttttttcttgaattatatcatcagcttcatagtatgtttcatttgttgcatttgatgctgcatttgaattgagggctttggtttttccatttgacttgcctgcagatacacaaaacaaaataattatttgaaattatgacatcgtttcacttataaaaatttgcacttaaaaataatttttgtagcaatattgaaaatatgatgtcctgaaaatgctatgtgtatgagtgagaattgagttattttgaagtggtttttgagtatttccttatgaaagtcaaataagggaaataattcagtaataaaaaaatttatttccatgcttaccttttttcctccatgcttccatgaggaaaataactacacatctgataagaaggtaacaatttctgagtgacttaacaaaagtgtgactgtccctctcctatgcataaactacactaaagccaatcatagtaacttgcccaaccttaaggctttgccattataactgatttagatgtggtttattaaaaggacacagtagtgccacaatcccattcactcactccatataaatatgagtccaaaatgagcaaaggtgaaggaatatggatctttgctgatcagaagttagtctaaacaaacatagcaaagaaatggattattcaatgaacagtgttaggaaaagttgaatgattgtagaaataattaat

SEQ ID NO: 96614 - DNA, 63321 bp, Homo sapiens
atagttatctcatgtgtatctaaatttatttcagtaatttagggtgttacaaaataactactcgcttacctcttctctatggtacttccttcattaagaggacaattccataattgaaagatcccttgtttactattctgatgacagaaaaataatgggtaatagtttagtagctgcatatatttttaaaatataatattttaagggtatgaagaataaaatcccacctgtgtacttttttgactatgcaccgacaaattaggttctagcatcagttgctccactggaatttccaaatagttctataaggcagcagaagacttttaaacataatatatctctgttccctattcttgttctaacaatgtatagttcttgttctaatcaaggaatgtatggtaaaactgaatgacactttgtttatatacaaagaaatcatttgtttttactgatttcagcagaaattagtaaaacctatttattataaataccaactaaactgttaactaataagacttgaatatcattaagattgtctttattttgcagtgaaatgttttatgttttgatcaaaaaggataaacaaaaagattaattttccactacttcagaacaagatattggtcatttcaactgcttcaagacattttgttgttgttgagacagggtctcgttctgttgcccaggctggagtacgggggcacgaactcggctcactgaaacctctgtttcccgggctcaagcgattctcctgctgagctcagcctctcgagtagctgggactacagctatgtgccaccatgcctggctaatttttttgtatttttgtagagatggggtttcaccatattgcacaggctggtctcaaactcctgacctcaagtgatccacttgcctcagcctcctaaagtgctgggattacaggcatgagccactgcacccggcctgcttcaagacattttaaaggacaggactacttccctttcggcaatgactaaaaaatactatactcaattttcatttatattattgttatactgaaaaatacttaatataacaaaatattcatttaataaccaacttgaaactctaaaatatttgactttgacttgtgtgaagaactctacagaaatgaaatttaaagtttaactttcaggaagaaaatttttttaaagaacatacttattttaaaatcgtatgttttatgaataccttaaaaccaaacattcatccttaccttgttaattttgcctgaaatgtgtataaaaaatgacaattaatagttacataaaactgattatattcaaaacaaacccccttttaatatgagtgattctttcagtataagtatacacatctaggatttcttaccacctgctgctccatcccttccagctgggaggtttttattttcagaaacaggtacttctgaatccaaattccagtgagataagttctaaaacaatatttgttttaggataaacttaacattaagaaaacataaaaagctcaataatttcacatgttcttggggtaaagtatgacgaaaggcacaaagcttcatgactctcacccctcattataaagaacttatcagcatctttgaggagaaagcaattttctcttaaccaagcccttatcagtttgataatgcctattgttgaggaatcaggcttttacaataatttgtggtttcgttcacattttgttaaatataataacacaggttttcaaaattgatttttaaaatgtaataaaatgtcctgttcagtgtgcctctggaacacaatggtgcattcatcaaactttctatatctgagtatcagatctaaaagtctataaaaagccaggtgtggtggctcatgcctgtactcccagcactttgggaggccggggcaggtcaggatcacctgaggtctggagtttgagaccagcctggccaacatggtgaaaccctgtctccaataaaaacacaaaaatcagccaggtgtggcggcacgcacctgtaatcccagctgttcgggaggctgaggcaggagaatcgcttgaacccaggaggtggaggttgcagtgagctgcaatcacaccactgcactccagcctgggccacagagtgagactctgtctcaaaatacatacataaataaataaaattaaaaaaataaaagcctgtaaaaatctttccatcaaccacaggaagtctctaaccctcatattatattcaacactaaccagcccactactcattctggcttccagatgtggaggaacacttaggaaatattcaaaagaaagccaaaaataaaacgggaaaggtgctaataacaactgagtatttatgttccagacattgtgcagagtgctatgggggaaaatgtgggaggtgtgtagaagattataacaatttattctggaaaacagaaagtgaagaggtgattcgtttataagaaagtaactttttaggaatgaacccaattgttttctgtctcaaaaaagcattgtaaattaaactctaagcaaatgaaatgtgaggtattattagatacaatctcttcactaaggaggaacagagagaaataagcttcaatacagcatgaggattaatttatccacaaagagatatctcctgataggaagggtagttgaacattggaagggagactgcagattatcattctctatagatttatgaaaaatataattaataaaattaattctctgctctctggcatgatatgtacaagggctaatctctacatgagaatcacctggggagctttttaaaaataatagttgcaaaaaaatgctgcaaatcctgattttaaagaatgagggtgagggccgggcgcagtggctcaagtggcagtaatcccagcattttgggaggccgaggcgggcagatcacctcaagtcaggagctctagaccagcctggccaacatgtcgaaaccccatttctactaaaaatacaaaaattagctgggcgtggtggtgggtgcctgtaatcccagctacttgggaggctgaggcaggagaatcacttgaatccgagacgcagaagttgcagtgagccacgatagcaccactgcactccaccctgggtgacagagtgagactccgtctcaaaaaaaaagaaaaaaaaaaaaaagaatgagggtgaggcccagttatttgtattttaaagatccttttgtagttcacagcacgatgactgggtttttatgttcatgtgtgagatgcaccccttcagacttttttacgatgtctggtggatttttaagcttttttcagctatataatcctgatacttttgtatgaaatgcacgtgagagaaatatcctcagctgatgaaactgtgttgttgcaattctaaaataaaattaatgaaaccaggccaggcatggtagctcacacctgtaatcccagcactttggaaagccaaggcgggtggatcacttgaggtcaggagttcaagaccagcctggccaacatgtcgctactaaaaatacaaaaattagccgggcgtggtggcacatgcctgtagtcccagctactcgggaggctgaggcaggagaatcgcttgaacccgggaggtgggggttatagtgagttgagatcgtgccacagcactccagcctgggagacagaggaagactaagtctcgtctccaaaacaaacaaacaaaaaacaccaaaacaacaaaaaattaacataaccaaattgatcaactggtaaagaatgctcattaactaaacatgaagtctgacagtttgcaaatttcttaagagttgggacttgattatgctttgtgatatcccacctgccttaccaatatttttcacaaagggtgtgtgtgtgaaaacaaaagaagtgagcactgcctggttgataacaaggcagcacctttaacaaagccaaattgcaattagaaatgtttgacatttggagaagagctggctaattttccctttgttaaaagaaatagaaaatttccatttgctgttccaaatgtgccaaaaggaaaacacaggataaactgcccacgatgcaaacgcagcaagggcatcactacaagaaaactccatgggagttacgtgttagcaacaggagccgctgcccaaacactcaagttcaacagcgcctgccatacctcctgagagatgtttgacacacgtaggctgttagcacagttctcatttcttctccccattttgttgtagctgttgctctgtttccttaaaatcctacacagattgcgggataggcacatttatgggtaagggtcaacatttataaaaaagaaagtgtgagttttgatttcccatctaaaggaggtaagagaatgcttagaaagcagaagagaggggctaggagagcagggtgggggtgacagtacgaaaccaaccagaagcaaggggcaagcctgactcaaaaggagcacagacaacagcaaactggcagatctcagaacagaagattaggaaattgagatcagaggtgagaaagcaaatatcagctaagaagatgaaatacacattggaacaaactatggtgaattatctggaacttagaaaacaggggcacaaagtctccttttattcattcaaaacaattgctccatttgaaagcagggttgaacccttacaactaggccaggcaagcaccccgtgcatatttcggagacaacaaaatgcccccaggaccaaacaatattttccgcaccaatcaatcaaggtacctaaagggttttaacccactgccgtttaaggtaaaagaattagagaactctaaggtaacaagcaaaacagtcactggattaaggtatggctatctggaaagaatcacttttttttttttttttttttttgagacagagtctcgctctgttgcccagactggagtgcagtggcgcgatctcggttcactgcaacctccgcctcccgggttcaagcgattctcctgcctcagcctcccgagcagctgggattacaggcgagcaccactacgcccagctaatttttatatttttagtagagatggggtttcaccatgttggccaggctggtcttgaactcctgacctcgtgatccacctgcctcagtctcccaaagtgctgggattacaggcgtgatccactgcacccggccaagaatcacaaattaaagccaccgcagtaatcggtctatctgctaatcgtttacaattgattgtctcctacagaaaagtgtatgaagaaataggagatttagtttaggtaggttttcagccaacaccggttattggtccacgagtgtgtgcatgccagacactaggtctgaatgcaggaggaaggcggttgctgagcaggtggcgctgcctggggccaccgggtgtgtgtcaagaaggagggcatccagctcctggaaaaggccaccgcacctgaaggacggccctggggacaaaggacgccttggggactgcgagttgggggacaggagctttaggggccagagtgcttgaaggcgcgtgtctcaagggagccgcaaggcccccgtgaagaggaatccccttttcctcctgagctgtggccggactgggtggggagcccagttccaggggtagcaggagggggctgcgggattccccggggccggggctctcaacccaccgcgcgaaggcccacgtgtcctccccggcgtgctctcccggtgcgccgccccgaggcccgagcgcctccgcgtgcgtggctgacggcttggagggcgccccctctgccgcggccttcctgcagcggggggacaaagagggcggcgggcggctggcggccttgagcgcagcccggtcggcagtgcagggcctgcgaagcccgcgggccggcgcaggggtgggagtcgggcccggggcccagagagacctgccggggccggggctgcggctccgcgggcttccccaccggccgggtctcccggcaactaccagagagcgggggcgcccggggaggcccggcgttccacaaggtccacgcgtattcgcgggccgcggggtcgccgccggccgcccaggcgcggagcctctcgggggtcacccggccgccgggcccgcgggacgcacggggccgccaggggaggacaacaagcctcaggccctgtccctgcgccccgcccggcctcccccscggggctgcgcagcccactcggccatcctggcctgaaggggccgcccccggcctcgcgggaaagcctgagcctcccgggccttctcgggccttctsggactttcccccaggcgtcctggaccttcttcggccttcctgggcctcctcgggcttccttgaccctccccaggccttccccgaggcctccaggcccttccctgggcctctccaggctgagctctccgcgacatggccagtgggcctctgggacccggggcccggcccasccgcctccaccctccaytcccaccgcctgctcacatcaagccaggagcaccgcccggtacgtagtcctccagactaagctacaatatatacgcattgatacatgtgaagttatatctatgcttgtacaatatattaacatagaagaagaggcatccttgttgacaccaagctcatccggtcagtttcaggtccgtcgtcggcctttcaataggaaaaacaaaagatgattttttttcttttttcatgtagaggatacatgtaaatcacacagcccaattttgtaccccgaaatgcrtatctcctattacagcttcatgaaataagtggaggggtgggggaagaatctctctctatctagttagatatatctgcatagctatcatcacccccaccttttgatatagagaaaaatttaaaacaaaattaattatatatttaggtacagcaaatgaatactaaacatttggggggatgagatcacggccatgtccctctgagaatctccccataaaaatgcacttatataccacatgttgaaaacaatgtcaggggtttctcaggttctttgatccctgactcctgactctttcctctgcatttccattttctcctcagaaagaccttccctttaaagaagctcttcccaccttccacctaccttactctatttcatgacaccccgttgttatttacttctttgtactcctcataatcttgctgtttacttgtttgtttttgtattgtctgtctctccccagtagaatatcaaactccatgtgggccggggccttgtctgtctagttcatttctgtatccccaaccctttaaaactgtgctgggcacatagtagaagcacagtggtagaagcacaatcgatgtaagtgaatgaacaagatttgtgcaggcctcattccttgcagcctccttggaggtttcccttctagggccctctcctccttcggctgttttccatactgctgctctaaaatacagacctgctcaactgcctcctaatgcckgaaggaggaaaccctaattctgcagccatcccttaggtatctgctcatcaccttcccagcgcccactacatgtcaagcacatcggacattttacaattttcctaaacactctcctccagggcatacatcattgttactcttcctgtaatagtacctcctttttatctccttttcttttttaacctgcctaaattctagtcattacacttctaactcacaagtcatttttcctgattgttcaggaagtgtaattactagaaaaaatacaaaaaaaaaaaaaaggagagaaaacaaaagttgctgtctcctccaagatccttgcttcgttataatgatttaattacagccccttactcagttacattgtaattattcatttacaacgtctcaatcactttcttttcaacaccttgaaggtgatatctgcccatattctatctaacagagtgcctggcatgtactgtagtaggtaaggcactcaataaatgtttcaattgatttaattattgcaaaaatagtattttctgaaatgtatggtgtggtgactatatgccaggcatagtgctgaacattttatatggattaaccaatgtatatgcctgataatccaatgaagcaggtaccaccagttattcctattttatttcttatttttaatttttatttatttatttttttgagacagagtcttgctctgtcacccaggctagagtgcaatcgtgtgatctcggctcactgcaacctctgcctcccaggttcaagcaattctcctgcctcagcctccctagttccctagtagctgggattacaggcaccagccaccacgcccggctaattttttgtatttttagtagagacgggttttgccatgttggccaggctggtctcgaactcctgacttcaggtgatctgctggcctcagcctcccaaagtgctggaattacaggcatgagtctctgagctcagcctagttattcctattttataattgagtaacctgagccttagatgtattatataaccttttccaccttacaattacgagaaaaattgcgaatgggagtaaatattggggtacatgtatttccagctaatgctttctacaaatgtatatctagctgggaaatgttccccgctcttgagacaaattatgtgtgcttgtgtgtgcacatgcacacgtgtgtgtaaattccaaatatctggcttacacatttcccctcttccttgctttgtgtttctgttcatgcctttttctgttatttcagaactcaaactgattcctgatcccttagagtccttstgagatttgtcatccataaatacatcctctaagattctttttttttcttaacagaacttattcttaaaaatgttcctttcatattatcacccccactcaactggtcttcctttctctggagacttttgaatgctttgacatcagcatcaaaatcatggctggccattccctcattgctaaatgtgcacggctgtggagatgtgaaatatgaaagcgacaacttggaaattgtgccctctccaaacccttgggtctggtctggctctggcccagcgtaggaggttggacagtgggtcattttctacagcagctcagacccagctcaacatcaatcccaaggccaaagaaaatgcaccttccttctgttggggctcggaaaacagtaccccaaaatgaaggcttcggaaatagcctcagaaacacgtttttctctgaccttcttctgccctcctgtctctcagtcccagtctccctccgaggctagcctgagaaactagaatccctcttctccagtgcaggttacagaaatcagaatgcttttttcccaaagccagccataaaacctaaaaatattactccaattttccctttgcctttctgtgtaaaaactggccataaagaaattatctgacccccattccagagagtggcccatacccagaaggaaggaatgctgctcagagaggccaagaagaatctagagagacaggccttgctgggttcccccactcaggctgttagcgttagatcagaccttttttgtcctatcgtatttctacacagctgtccatactttgttgaacctaagcataaaaatggaaactctcccctgtatttctgagttttcattctgtacactcccatgtataaacacatgctaaataaacgtgtatgccttttccccaattactctgccttttgtacttgagtacttctcctgtctcagcctcccaagttgctgggactacaggtgcaggccaccacgcctggctaattttgatttttcagcaaatcttcagagggccaaacccttggcccctacacctccagccatctcatggccatgcccaggattcagattttagtggtagcctyagcttgccttactttaaatctgcacctctttagctgatcctgagtgaaaccattgtttcataaacacagtaggatgaggcagatgctctctatttcaggcatttagcaagctcttasgttaattacaagggaggcaggctaaggaaacaaaggcaagccttgggccagtcacttagtagtccagtaagcacagcttgctgcccacctcagtttctcctcctataacaaaggcgatgacactgactaccacgtaactactttggaaagcaccttgagataacattccttttcattgtcctgaattatgcaaagatatgtcagtagcaacattacttagtttctaattattctggagggaaaagccttctatttcagtctacctccttcagtatctttcaccttttgatattacccatgcatttgtcctcatcttcctttgtttttccctttagaattgccaaggtcatggctggtcacgtacagcagaatctttttgtttctttcttttcttttcttttsttttttttttttgagacagagtcccactctgttgcccagggtggagtgcaatggcacattctcagctcactgcaacctctgtctcccaggttcaagtacttctcctgtctcagtctcccaagttgctgggactacaggcgcatgccaccacgcctggctaatttttttgtatttatagtagagacgaggtttcaccatattggtcaggctggtctcaaactcctgacctcaggtggtccacccgtgtcggcctctcaragtgctaggattacagctgtgagccactgtgccccagcctacagcagaatcttgttcaatataattatgtaacattttctgaaagttaggacactattttctaaataataatatgcatttttgttctcaaataagatgctaagtcagtgggaaacatttcatttcaattatgggcaatctgtatttagcatatggtttagcgatctggtcttatttttgtttttcctttttgagaactgctttgtctttcagtagtggctaatttatcctgatttagaactctattctatgagcattcatcttaaatatactttcttgtgtttgtataattcctttttaagaaatatataygcaaatatttctaatttgaagttttaaaaattaacctttaacactctgctcccatagcaatgtcctatttgggaggccattgttttgttgcaaatagataagaaatattgtttaaaaactattcctggaacgtgtgatagtgatgtatattaacatatttccaaaaggaagcaaaataaacacatcaatcactgaatttcacatctgcgtatgttgcagctagtgcttttgaatacattctcaatcatatattttctcctttattttgatttaagacttgatttctgcaatttgaattgcttcataagcctttctgtttttcagatgcctatactctgtaactctattttcctagccttatatcacaaattcactttaaattttggttaaagtctcagtgtcagaacttactttctggtgccaggaaaggtgtaacttgaagtccctttctggtcgtcagacccctcccacctcatttgttgtgaacagaacactttctttagaatgctttccttaaaaaacttggagctaatcttctctctgtgaacattactgaacaccttgccwtctggaagccagctgatcttgtcacacccaccatggcgagggggaagaagaaggtattcaggagacacagcaaccctcttaggaacagaaaaaggaattgcatttacctaaaagtcatgaataaaagatcagcctaactagaaaaacaacccagagtcatgcagctgctgcgctgcgggatcaattttagttaataatacactgctggcacctacgtgggctgctgcccggcatagcagctctcatcacaacaagaaaaaacttgcgagaaaataatatgttagaagcccagttttgaaaaggtaaatatattatacactgaataatagaattggaaatcagaggaatacaaaacaaaatacacaatgaaagcatttgttccatccaagaatattagcaccatgggctgagacctggttggctcagatcaagatcacacagctggttagcagcagaatatttgccaggcgtcattcatgacgggtctttcccatcctaaacagtgttctttaattacactataattagagaaaatgaatgagattgattcctagaagtgttattcattgtaaaaaaaaatatatatatatatataaaatatgtaaaaatatatatccatctgatagtttatttaaaaacaaaatttaataattgtgacctacttcagatttcaaccaaagtcagcatgcatcagataactataaacattcatcagttgctattgagagcaatgactaagaacatatgagtcaatttacatgaagtataaagaattacattttagtagatcacttccttggcatgttgaatggcttaaaacatggtttgttctttactatttatataaatgaaggtttagaggaatgcactcaactttgcctggaagaaagaagctggggatatgtcttccggctgccagaatattctacccccttctccccaccaaaaacacctgtaaaattatgagaatcacattgaattcaagtggttcttgttagttatataacatattttaaatatgtacttgcatttaaagtatttttttttaagttttactttttgagtttgcaagttgaaagttaagaaaaggaataggccagacatagtggcttgcgcttgtaatcacagcagtctgggaggccgaggcaagaggattgcttgaggtcaggagtttgagaccagccagggtaacatagcgagaccctgtctctacaaaagaaaaataacaaaaattagctgggcgtagtgatgcacacctatagactcagctacttgtgatgctgaggtgggaggattgcttgagcccaggaggtcgaggctacagtgagctgcactgcagcctgggccacagagcaaaattctgtctcaaaaagaaagaaaaaaggaaggaagggaaggaagggaaaaaaggaaaaaagagaaaagaaagaaagctaggcgaggtggctcacacctgtaaacccagcactttgggaggccgaggtgggtggctcacctgaggtcaggagttcaagaccagcctgaccaacatggagaaactttgtctctactaaaaatacaaaattagctgggcatggtggcgcatgcctgtactcccagctactcaggaggccaaggcaggagaatcgcttgaactagggaggcagaggttgcagtgagccgagatcacgccattacactcctgcctgggcaacaagagcaaaactctgtctcaaaaaaaaaaaaaaaaaaaaaaaaatccatctatctatatatatgcatatatgaatggaattttatatctgccactctggccactaatgtatcatatggtataatcatgatgctttaatagtcttagccaaaggtttttaaggttggtgaaaagctagcccacgctcccagatttgccatagcatactaggctcacacgccttctctgcttctcaccagcctgcagtgtggctctctagstggttcatgaagagtagagcaattatggggaacctggctcctggtagagcatgctgaaatctaaaartagctgtaacaaactctattatttgcatttttgttccaaatctgatactagttcttggcagcttctgtcttgctctggactgtgctatcaagtgtggtgatttaagattatttaatacttctattgttttctgctttttggtctgcaatgaagaatggcttcttaccgggaaggctccggttgagcatttgtttactttgttttcttggtattagtttggataagaacataaggagtaactagtttggcttcttacctgtgttaatctgggcatttcctcagttttggacgatgaagctctttcctcagttctgctgaggactgcactgatgtaaccactctctcttggggcctcgtaggtctgtggagccttaattaggtacatactgggagcaaggcttctacaaagtaccagatgggaaaataccactggatacgcgcgcccccgctttcccctcttccttttagcaaagctctcagttttccccagaaatggtccatgtccagacrcaagactggagtttctgccacaaatccccaaatgacttggcaggatattttcaatgggctggttttctctgctttgaaaatgcaggatgaacacgcagggttccggaccaatacctgggccattgtgactctcagaatgccaggcaataagagatcagaaagctggttccacttcatcttggagatggaggaaagcttgccagaacaactgcacaccccatccactcctcatgttctcagtttgttcttctctgtgatacaaccagcatcacgagaacagccagcagcagctccagcgtgataaaattttcactccttgacaagtgtaagaagccggaaaactgtgcccagccagaagttttgtgtcgcccctttgagatgctgtctaacctccacgagctgcttccgaatcacctgatggagacgctttattcccscaagagtgaagagkwcaagaaaaaatgtatgtgggccgagggtggscatgagttcttttcagcaagcatatgctttatcttgatacaaactgcctctactttaagacgcaaggaagaacttttactctttattttacttagtgtatttttattattttttgagacgaggctctcgctttatcccccaggctggagtgcaggagtgcaataatcgtggctcaccacagcttcaaactcctgggctcatgcgatcctcccacctcgacctccccagtagctgggactacaggtgcattgccaccacaatgtctaattttttaattttttgtagagctgcaccccccmccgctccccacatccccatgttgcctgggctggtctcgaactcccaagctcaagcctttgcccgcctttgyctccaaagtgctggaattcgaggtgggatcccctgcacccggccagaacttgctctgtacgttgtaggtgtgatcggtcctctagacacatgtccccatccatgggcttattctggaatttactcatgtgctgattatccattgcttcttcatgttcttttgcataaatagtcttttgtgagccaagttaggcgtgaccctcttctttttttttttttttttgagatgaagtctggctctgtcgcccaggccggagtgcagtggtgcgatctcagctcactgcaagccccgcctcccggtttcatgccattctcctgcctcagcctccccagtagctgggactacaggcgcccgccaccacacccggctaatttgtttgtatttttagtagagatggggtttcactgtgttagccaggatggtctcgatctcctgacctcatgatatgcccgcctcggcctcccaaagtgcgggattacaggcgtgagccaccacacacggccaggcctgactctcttctttaggcaaagcttacctgtgggaatatggaaagggtactgagagggaaatgccgctaaatttacaatttaagctttatatttgattttaagattagtgagagaacttccaagtggaaagtcaggttttgaactttgttcctttgctctgtttcctatgattccttcctcctatggccatgattgcaccaggaagaagctggatattttctttcctcctggcgattataagcaacctgtactgtttgcagtatggagtggcctgacactcctgaaattctgtcagggtcaatgataatagggccgatttgcagcattgggtggagtctgcctcctgaattgttcctgcttaagtggaggagaaagatagaggcagccacctgtgctcatgaacttagaaaacaaaatagcagccgccacagagattaagatgcaattccgaagccaggcgcggtgggctcacgcctgtaatcccagcactttgggaggccaagacgggtggatcacctgaagtcaggagttcaagaccagcctgaccaacatggtgaaaccccatgtttacaaaaagtagctgggcatgatggcgggtgcctgtaatttcagctattcaggaggttgaggcgggagaatcctttgaacccaggaggtggaggttgcactgagccgagatcgcaccactgtactccagcctggcaacagagtgagactctgtctccaaaaaaaaaaaaaaaaaaaaaagggcagactgtctcctgggggtgtttgtgtgggttctttggctatttcccaggctgacagttttcacagcctcctgctgagatttcttctcttcaggtgccttagtctgtttgggctgctataacaaaataccatagactgaggccgggcacagtggctcgcgcctgtaatcccagcactttgggaggctgaagcgggtggatctgaggtcaggagttcgagaccagcctggccaacatggtgacaccccatctctactaaaaatacaaaaatcagccgggcgtggtgatgggtgcctgtaatcccagctacttgggaggctgaggcaggagaatcgcttgaacctcggaagtggaggttgcagtgagccaagattgtgccattacactccagcctgggcgacaagagtgagactccatctcaaaaaaacaaaaacaacaaatactatagactgggtagcttataaacagaaaaatttatttctcatagttctggaggctgggaagtttaaaatcaaggtagataccatgtctggagaaaactttctggttcatagatggcaccttcttgctgtgtcctcacatagtggaagtgagaggtgacagcatgctggtagcccttgcagccctctctcgctctgggcgcttcctcggccttggcgcccactctggccacgcttgacgagcccttcagcctgccgctgcactgtgggagcccctttctgggctggccaaggctggagctgcttccctcagcttgcgggaaggtgtggagggagaggcgcgggtgggaacccgggctgcccgcggcgcttgtgggccagcgccagttccgggtgggcgtgggctcggcaggccctgcactgggagctgcaggccggccccgccgccccgggcagtgaggrgcttagcacctgggccagcagctgctgtgctcgatttctcccggggccttagctgcctccctgcagggcagggctcgggacctgcagcccgccgtgcctgagcctccccgtgggctcctgtgcagccggagactctccaaccattgctgccccctgctccacggcacccagtcccatcgatcacccaagggctgaggagtgtgggcacatggcttgggactggcaggcagcgccacctgcggccccggtatgggatccactgggtgaagccagctgggcttctgagtctggtggggacttggagaatatgtctagctaagtgattgtaaatacaccaatcagcactctgtatctagctcaaggtttgtaaacacaccaatcagcaccctgtgtctagctcagggtttgtgaatgcaccaatcggcactctgtgtctagttaatctggtggggacttggagaacctttatgtctagctaagrgattgtgaatgcatcaattggcactctgtatctagctcaaggtttgtaaatgcaccaatcagcactctgtgtctagctcagggtttgtaaatacaccagttgacactctgtatctagttaatctagtggggaggtrgagaacttttgtgtctcgctcagggattgtaaatgcaccaatcagcaccttgtcaaaacggaccaatcagttctctgtacaacagaccaattggctctctgtaaaatggaccaattagcaggatgtgggtggggccagataagagaataaaagcaggcggcccgagccagctatggcaacttgctggggtccttttgcacgctrtggaagctttgttctttcactctttgcagtaaatcttgctgctgcttgctctttgggtttgcagtccctttaygagctgtaacactggccgcgagggtctgctgctgcattcttgaagccactgaggccagaaacccaccagaggaacaaacaactctggatatgccaccttaagagcttagaacactcaccgtgaagatctacagtttyactcctgagtccgcgagaccgtgaaccccccagaaggaagaaagtacgaacacatccgaacatcagaaggcacaaactctggacgcgctgcctttaagaactgtaacactgactgtgagagtcygcagcttcattcttgaagtcagtgagaccaagaacccaccaattttgaacacaggaagrgggggtggggggcatctctctcacgcctagtttataaggcactgctcccgtgacctgatcacttcttaaagacacacccccaccacrtaatgccatcaccttgggggctaggatttaacatgaattttgagagacataaacattcagaccatagcaccaccctacccagcttttgtaaggttcacttccatccagtttcaatagaaattgcataatcttttgacggaaatgctcctgagatcctsctatattcaagcagactccaaatgactacagctgacccttgaacaacttacttgaactgtgcaggtccacttgtagtgtggcagaaaattaaagaaaaataaaaccaattaaagaaataagctttcctggattaggctgacttgtcccagaggcagcgacaggcacagcccagacacagaaaaagtcttaataatactatctactgtgctctggaaactcttccagcactccctcaacatagcgagaagaaaaaccaattttccttttattcagtttatagatttctgttctctgtaactggtaacttaaaagtattctgttttatctaagcagtagagtgaaggtcatgagcctctgaacaggcctgagttatggccacctgggcgccgtaatgaaggttataggataagcccgtacctgggcaaagtctagataacagacatctgggttgcttagcgatggtcatgtgtaatcctgagttatgaacctgttacaacttaattaactgtctttatcctgcctctgtatccctgctttcacgccagtatacgcttgcttcaagctagcctacccccttttatgaagtatgtataaaaggcaagtactgtctttgttctgcgcccagtctttggacgttaactctgttgggtctaagtgcactcaataataaagatatcctgtatacaccccaaggtctctctctggtcctcttgatccggcaacaataggtggatttttttcagtaaatatattggaaatttttttgaagatgtgccacaatttgaaaaaatttgtagaccaatcatatagtccagaaataacaaaaaattaagaaaaagggtagtgggcgtggtggctcatgcctgtaattccagcactttgggaggctgaggcgggcggatgatttgaggtaaggcattcgagaccagtctgaccaacatggtgaaaccctgtctttactgaaaatacaaaattaggcggtgtggtggtacrtgcctgtaatcccagctacttgggagactgaggcaggagaattgcttgaacctgggagttggaggttgcagcgagctgagattgtgccactgcactccagcctgggcgacaaagtgggactcaagaaaaattaaaagagatgttgtgaatgcatagaatatatgtagatactagtctactttatcatttagtaccataaaatgtacacaaacctattaggaaaagttaaaatttataaaaacttacacacagaaacacttacagactgtacttggtgccattcacagtcaagggaaatgtaaatgagaataaagatgcagtattaggccgagagtggtggctcacacctgtaatcccagcactttgggagtacgaggaggtagatcacctgaggtcaggagttcaagaccagcctggccaacatgttgaaaccccgtctgtactaaaaatacaaaaagtagccagacgtggtggccggcatctgtaatcccagctactcagtaggctgaggcaggagaatcttttgaacacgggagtcagagactgcagtgaactgagatcatgccattgcactccagcttgggcaacaaaagcaaaactccacctcaaaaaaaaaaaaaaattatkcagtattaaatcataactgtagaaaattaactgtagtaatactgtagtgctgtagtaatttcatagccacctcccgttgctcttgctgtgagctcaagtggtgtgaatatccacttaaaatgccatgtgatgctaatcatctctgtgggagcagctcatgtctctagtaaattgcatttcacagtaaagtgatttcacagttctcatgtattttttgtgtttagtgcaataccataaaacttgaataacacyatgggacccacaaaaagtgccattagtgatgctagaagtactcccaagaagcagagaaaagtcatgatgttacaagaaaaagttgagttgcttgatatgtactgtacattgaatagttgcctgccacttcagacagacgatttttcttgtaaacagatggtgtaaacttatagtgttgataaatacagtgctgtcaatgtatttctctttcttatgattttctttttatttttttgagacagagtctcactctgtcttccaggctggagtgcagtggtgctatctccgctcactgcaacctgcacctcccagttgcaagtgattctccatctcagcctcccgagtagttgggattacaggcacccgctaccacacccggctaatttttgtagttttagcagagatggggtttcaccatgttggtcagttattcttgaactcctgacctcaagcaatccacctgccttggcctcccaaagtgctgggattacaggcatgagccatcgtgcccggccatgattttcttaataacatttttttgcttactttactctaaggatgtgatatataatacacataacatatacaatatgtgttaaccatttatgttagcagtaaggcttctggccaacagtaggctattagtaaaagttttgagtgaatcaaaagtcaaaaaagtagctgggtgtagtggcatggtacaggtgctagactaccatgctcaactacttggaagrctgtggcaggaggattgcttgagcccaggagttcgagaccagcctgggcaacatagcaagactttttttttttttttttttttttgcgacagagttttgcacttgttgcccaggctggagtgcaatggcgtgatctccgctcactgcaacctccactcccgcgttcaagcgattctcctgtctcagcctcccaaatagctgggattataggcatgcaccaacacgctcagctttttgtatttttagtagagacagggtttcacaatgttggccagaatggtctcgatctcttgaccttgtgatccacctgccttggcctcccaaagtgctgggattacaggcatgagccaccgagcctggccaagactctttaacaaaagaaacttatgtgtttattttcaactgagcaggggtcagtgcccctaacctccatgttattcaagggtcagttgtattttccaagggatttacatatttatttayttatttatttatttatttatttttgagacagagtctcaatctgtcgcccaggctggagtgcagtggtgcgatctcggctcactgcaacctccacctcccgggttcaagtgattctcctgcgtcagcctcccgagtagctgggattacaggcacgcgccaccacacctggctaatttttgtattgtagtagagacagggttttgccattttggccaggctgctctcaaactcctgacctcaagyggtccacccacctcggcttcccaaagtgctgggattacaggcatgaaccgccaagtccggctggggtttacatttagctcaaagaaaatctgtgcccttgctccccataccttcaccccgttgataaaagcacagttggcttccaacactgccctcttttctctgtggccacaggcagctgtgatcccagccactcaccattgtgtttcaaggtgttacaggctcaacaaaatatatggctatatattggtgattttgcctcaacaacatatattgtccctcaacaagatatattgaagtcctaactcccagcaccccagaatgtgactagatttggaaataggatctttacagggtgcagatgtaattaattaaacttaggtgaacgtaatatgtgtagagagagttcttcatccagtatgactggtgaccttataagaagaaagagacacgcaggagccgatggccttgtgacagtagagacagagatgggagtgatgcatccataggcaaggaataccaaggattgcaggcaaacaccagaaactaggaagagacaaagaaagattttcccctcaaggtttcagcgtggccttgctgacatcttgatatctgacttccagcctcctgaatcgtgagacaataaatttgttgtttcaagtgacccactttgtggcactgttaggacagccctaggagactgagcaccagtgtcaggagacatagtcccattcctcaggtacttctctaaagtccccttaaagccaagggtgggaaggggaatgacatagtacacagcactgtcccaactctgtgcctaaagaaatcctcaagtgccttaaggaatcctgaatgaatcctccgttttttcacatattgatagggatgctgtgcacgcataggtgtccggcacctactcgagttttctcagacttgcggccttggacaaaacaagacaacagaaaaatgtatattttcacatcctgttacatgtatatgtccttcaacttagcaattccacttctagttattatcctacagaaacaacttgtacctgagcccaaagatggataaatatggccgtgcactgaagcattgtttataatagtcaaaaatttaaacaacctatgacattcagtagcagaagaattaaacgaaggcatatatccacatagtggaatactattaaaaagaaagttgacattaacatgtctacaatacagattatagagttttaataagctgcaaaggaagatacacaatatggatccatgtatgccaaaagaaaactatacatttgtacatatatatgtgtatataaatgcatagaaaagagttttgaaggagacttaggaaattcaggacggtggctacmtctggagaaaggatagagcttgaagagggaaaatgaagcaaaactttccctttttgctatgtagacttcgctgagttgtttcattttaattattccaatggaaaccttttacttttgtaattaaaatgcaacattaacactgaaaatgcagtaattatgtgaagttggagaaatgagttttgattttctagagacattctcattctatgttgatttagattttgtctccgtagcctcccagtgtagacggtgatagacgtcggtacacatttagcagccggtaattcctgccatgtacaactgccaagcagcagtggggtgcctttgtttcagaggtatttgggtgcagtgattctttgctatggttggaagccagtttaaggaggttcatgcagctgaggtgaacagcattaaggggtaagaaatgactcctcagagttctgagtttgtgccttcagggaactggcctcaggctgagtccagtcactgggagcacattggcctttgaggtcttaaattcatcactaaaaatgtgctccgttgccaagatgccatttccaaacatatagtgatttccttgcatatgcatcctgaagacatgaccctattgctctgactttcatccgtcagaccaagratttaaaaatagatactgctgtcttgctgctgctgggtctaaagccttccttctagaagaaatttcttttgaccttaaaaataggttttgttcttttcctgtcaatcccctcttcacctgcaagatgctttgcctgtattacactatattggttacccagaaatgattacatgaagaaagaaagaaaaagaactaaacatattttttttaaaaaaacccaggtttttattttatattttaaatataaagttaactttgggaggctgaggcaggaggatcacttgaggctatgaatgagatcagcctaggcaacaaagtaagacgctcatctctgcaaaaaataacaaaaattagccgggtgtagtggtgcatgcctgtagtcccagctgctgaggaggctgaggtcagaggatcgcttgagcccaggaggtcgaggctggagtgagctatgattgcaccactgcactccatcctggagctctcatggaggtgctggctgaccagggagggatgccattccatttctgataacataggatctaagcccctctggtattgacttcatcttctccaagtggctctaccatgcaattgtarctgtaccgctggccatccagagctcctacagtaggccgcaacagtccaaacctcaagtctcagttattggaacacccaaaagaaggaaggcatttcccaccggcatagctgaaaatagacatgcttataacagagcgagaaaaaacagttcatttctggccagaaatgaattttgtggaatcaaaaagaacagtaagtgacactcccacattctaactgacaaagcatgctggaagttcagtcctatgttgtaatccttgctcagacaaaatcatcaataaaacggggccccaagttgtgcggcctgacaataatgttaacattcaccctatttcttctgggaagtttcaaaatgtgcatctccaattaagtatgcaattaaagggaaaatgagaatcacaataataataattgcatggtaacttgccattagtttgagaatcatgcacacataaccaactctatttgtgtggtcccagcatgcctgcttgtttgctcattctttttttttttttttgagacagagtctcactgtcgcccaggctggagtgcagtggygcgatctcggctcactgcaagctccgcctcctgggttcacgccattctcctgcctcagcctcccgagtagctgggactacaggcccccgccaccatgcccggctaatttattgtatttttagtagagacggggtttcaccgtgttagccaggacggtcttgatctcctgacctcatgatccgcccacctcggcctcccaaattttgggaggtgtgagccaccgcacccggccttgttcattcttttatttacttacaatgtatctgctagatgtctaggaccaggctaagatctgaatggtgctcagtaatattgttggaataaaggaatgacaaagctaaataggaattattattattattattttgagatggagtctcgcactgtcacccaggttggagtgcgatggcacgatcttggctcactgcaggctctccctctcgggttcacaccattctcctgcctcagcctcctgagtagctgggactacaggtgcccgccaccatgcctggctaattttttgtatttttagtagagacggggtttcaccatgttagccaggatggtctcgatatcctgaccttgtgatcctcccgcctcagcctcccaaagtgctgggattacaggcgtgagccaccgtacccggcccaataggaattattaagctgcatatatatgttttctcaaatcagtgccttgttactcttgctatgcaaagatggagaggaacattgaatgtattaatgcttattctattaccaggtgagaatcctgaactctctggcttagaaagaatcttagcaagacatcagttgccaaaagagattaatctgaccccaaagccgaacagaatgcccccgtggaaaagaaaaatcatcaacaatgtaactgacgggtggaagaaatgtcacttgttgaagagaaacacgaaagagcctccaatgtccaccatagttgtcaggtagactctaatttctgccttatgtggatatatttagagatacacagggtgatcacaaaatctctatatgccttagctaaaaaatgataagcactgttctatataaaagcacatgggccccatttttacccaccaccaagctgctagaggagccctcactgggagtaaactcatggaaatgggagcaggagtgtgggtcctccatggcccattgcagtctagaatagagagcagaaatctagcaagaacagagtgggattcttggagagaaacccaaccactgagctttggggctttttggctgcgtaagttgggaagcagcttggtttttcacacccaccattggcatgaccaggggctaggataccatagcaggacatggtggacctttggctttatccctggtctgccagactgtacatggagagaactggagcaccattggacagtcttaacaagaggagtgacatcatctgacccaaatcctctctagcctcccaaagaatgcatgggtggaggagagctgttgggagattttacagctctgcaggtaagggatggtggcccaggtggtaacagtggggatgtggaattggttggattccggtgctcaaagtcataagctttggttccttggcaaattatctttttttggtgcacttctttccctgcttatgccagatagatggtgtttctatatttgtttttttcttttcttttcttttcttttctttttttttgagacagagtctcgcactgtcacccaggctggagtgccgtggcgcgatctcagctcaccgcaacctccgactcctgggttccagtgattctcctgcctcagcctcccgagtagctgggattacaggcatgtgccacaacacctggctaattttttttggtatttttagtggaaacggggttttgccatgttggccaggctaatctcaaactcctgacctcaggtgatacaactgcttggcctcccaaagtgctgggattacaggcgtgagccaccgtgcctggtctatatttgtttctttcgtattgctgcatgtatggcaatgatgcctacactttgtacatagtaagtattcaagcaattttgccrggctgtcaggataaatgtagatgttgctacaaagacaggatcatttctgatttgaaggtaacataaccgggagagagttccagctcatgaatttgcctgaactggaagcttcccctgggattattgccctggtgaaacagagtccttgtctgcatttttttcagtgtcctcagtggcataatttgccaatttgatttaaatattggtagccaaagaaggcaaaggtattattataaaagaaggtggtcaatggaaccatggtgttttctggacaaagcaaagacactacattttttgtccagaagtaggtaaaggttatattaagtgatgatatctgattactcaagtgaagattatttgaccatgctttggaagcctgatatgatttggctctgtccccacccaaatcccattttgaatcgtaatccccacatgttggaggaggggcctggtgggaggtgattggatcatgggaacagatttcctccttgctgttctcatgatagtgagtagttctcaagagatctgttggttttaaagtgttgcacttctcccctcgctctccctctctctcctgctccaccacgataagatgtgcctggcttcccctttgctttctgccctgattgtaagtttcctgaggcttcccaatcatgcttcctgttaagcccgtggatctatgattcagttaaacctcttttcttcgtaaattacccagtctcatgtagttctttatagcaatgtgaagacagaataacacaagacctatttttaaacattcaagtttcacaaccatagaaagtttgtacacctcaattttaggtcctgatgtcttcatatgaagttatagatctttatatcctagtttgctttctgaaaatatagctagagtatcagaacataggaaatggtacttttttttaacattttattttacaaacatttatttgctttccttaaaagcagggactgtcagcctatcttatttatttttgtattcctagtgttacaggttggagtctcaagygctgagatagaaataagaatgcaaaaggtttcctgggagtggtgttgcatcaaagtggaagcaggaaaacagtgttgggcagggattcaagaggtggagaaacaggcttcgccccagtggaaggaggtgcaaagtcatgttgcagggggcttcggtacaggacaggtgggaggattaggcccattttgcaatcaatcaatcatgaaccttgtcttggttgctgtgactccagattcctgaaggatctgctgaattaactgttctagttctgatgatgcctcctggcattaatgattcttctcctattacctggtaacatggtaaatattgtcatttgataactgtatcattcttaattctttgtgacttaactgacacccttgagagaattcattctttagccaaagcaagcctgactattattaagaatcatcaataatagctttgtccataaaactagaactaccatatgacccagcaatcccactactaggtgtgaacccaaaggaaagtaaatcagtatgtcaaagagctctctgccctcccatgtgcattgcagcactattcacaayagccaagatatgcaatcaacctaggtttccatcaacagatgaatgaattaaaaatgtggtgtatatacacaagagaatactttttagcataaaaaagaaggaaatcctgtcatatgaggctgcatggatgagcctagaggacattatattaagtgaaataaggcccagaaagacaaacttcaaaaggttctcactcatttgtgggcgctaaaaattaaaacagttgtattcatggaggtagagagtagaagaatggtttctagaggctgggaagggtagtggaggtagtgagaggaagtggggaagaatactgcatgctctcrttcatatgtggaagctgaaaacgctgatctcacagaagtagagagttgagtagtggttgccagaggttgggaagggtaacgggaaggggtggatagccagaggttggttacccgatacaaaagtacagctagacaggaggaataagttctggtgttctataacactgtagggtggttatagccaacaataattttttgtttattttcaaatagctagaagagggcatcttgaatgttcccaacacaaagaaatgaaaattgtttgaggtgatgacatgctcattacctttatttgatcatgacacattgtaaacatgcatcaaaacatcccactgtatcccataaatatgtgcagttattatgtcaatttaatcgaagaatagckttttgtctaagagctattgaacactactgattcgtgtgcccttgaccacctgtaaaatggtgttgctaatacctcatgttgtatcagaaagagttgtgacactgatagaaaaacgactgtgaaattgagttttgacaagtatgaagtactatttgaatgcattgtacagtattttcacgtgttagattgaggcaactgtaggtcctaaccttgaacctgccctggcaaacatttgctcagtttatgctgtgtatccccgctagcacggagaggataaggcccctctctcacatggcaatagcagttttagggccacaaaacaggcagatcatacgtgaggcctgctggctttgacaaagttccttcagtgctgtgctatgtaaacagatcagcaggcacaaaagccaggagtcctgggaccatgccggtaaacagattttctaagtctagagctgcagatggtggtgtcttatccctgttggtgaacctggcaggattccaacccccagctcaataatactgtaaatccctactggatactgcatgtaaattataattacttgtaaactgtgtttactggctcagtatgccatatttatatggactctagggcttaatttttttttctcttgataagtgtgacaaaagcagtacttgaacagaagagagctgtgtgttccatgtgagaactttagtttagattccataatgtttttgttgcatcgatgtggtagcaactgaagacggggcctggtagtcgatgggttttattttgcccacctctctgccatagacatttgcaatttatcctgacttggggccgctcctcctctataccaaaattcatcttttattgtacttaccatgttatagtgtctgtgttgatttgctactccactygtgtgctgtgtaagcatttaagaaaaacgtttaatgttttctttttctttttcttttcttttttttttttttttttttttgagatggagtctcactcttgttgcccaggctggagtgcaatggctcaatcttggctcactgcaacctctggctcccaggttcaagcgattctcctgcctcggcctcctgagtagctgggattacaggcatgcaccaccacacccagctactttttgtatttttggtagagacggggtttcaccatgttagccaggctggtctcgaactcctgacctcaggtgatcctcccrcctcagcctcacaaattgttgggattactggcgtgagccaccgtgcctggccatttttcttttctttttttttttttgagatggagtcttgctctgtcacctgggctagagtgatccccccagaagtgggaccagaaatcctgaagcagtagccgcaagccaatctacatggaaaggcaggaaaacaacgcttgagtgcctgggtacaagggaaccgaggcaggtttggagaaaaagacctggcacgtggtgtggaggctccttctggggacttggcactggattttatgtgggaatgaaggtgactgggctggtcagggcatgtgttatccctctggaatttagaggcaggtcttggcaaatacttgctgacacttcctacacctgctgactttcacgtacccctgctgatttcaatggaagggacatgtgtatgttctgatcttggggagcatcattccatgcccctactagaaaagatgtctcaaacactttctgtgacrtgactggttcacatcttctgcttgctttaaattttctttgccttattaagttgtgagagttcttttcatattttcaatacaaaattctttgataaaagcattgcaaatattttctcccagatggtagcttgcctttcattatttcatgataacacagaagaacaaaggttttacattcccaatgcatcaatttttttctttcacagtttttgcattttatattctaagaatcctttgacaagtccaaagttgcaaagacttgctcctatatttccttactgaagttttgtagttttaagcttcaaatttaggttggtaggccaggcacagcggcttacgcctgtaatcccagcactttgggaggctgaggcgggcggatcacaaggtcaggagttygagaccatcctggctaacacagtgaaaccccatctctactaaaaatacaaaaatttagccgggcgtggtggtgggcgcctgtagtcccagctgctcgggaggctgaggcaggagaatagtgtgaacctgggaggcggagcttgcagtgagccgagattgccccaccgcactccaacctgggcaacagagcaagactctgtctcaaaaaaaaaaaaaaagtttaggttggtaggccattttactttatttttgcatagggtttgatattcattggtttgatgttaatttcttttttctatttggctatctagttgacccattggcatgtgttaaaaagattttcctttccgtattgaattgttttggcactttttttttttttttgagatggagtcttgctctgtcatccagactggagtgcagtggtgcgatcttgactcactgcaacctctgcctcccaggttcaagcaattcttctgcttcagcctccagagtagctgggtttacaggtgcgtaccaccacacccaactaatttttgtatttttagtaaagacggtttcaccatgttggccgggctggtctcaaactcctgacctcaagtgatccacccaccttggcctctcaaagtgctaggattacaggcatgagccactgtacccggcctgttttggcacattcataaaaaatgaatttccacatatatttgagtgtatttctgaatcctattttgctccatttatctacatgtctttgcccaaacaagactttcttaytgtggccaggtcctgaaataaggtagtgttaggcatctgactttgatcttctgctttaaaaattgctttgattattttaggttctttgtattgccataaaaatttagaaccaatttgttagtttctacaaaaggactactagaatttgtttgggattgagttgaatcaagatcagtaggggagaacttccatcttaataacactgagactttcaacgtggacaggatatatttgccctttggttaggtcttctttaatgtctcctaacaatgttttgtagttttcagtgaagaagtcgtggatattttttgttatatttattacyagcacaggggtaaaaggagctttcctttttccctctgaaggttgatgaaaggcgtctgctaaacttgacaacagacagattaacaggagaaaaggcatacagatttattaaggtgcaagtgctgagagtcacacaaggtatgaaaattcaaagaagggccaggtggttgacgattaaatgcctgcttcataggggagaggaaggtgagggatgtaaggaattttagaggaaaagtaaattatatttagggaagatgactgggcctaaacaagagacaatagcctgggacaaagtccctctgaactctgggagagatggcaacaagttatgggaaggtgaggggaggaactgcaccatgaacaaagtttgccttatgcagataaagtccctcagaatagccctcagaagagtacatgaaaagtctgtctagggggttgtggtgacaacctttattttatctttggtgattaatctttcctggttaatgagagttcagacagaatattaaaggcaattgtttttctcggagagtaacttccctcagtcagatatgggaacttcagagagagcccctccctgcacttgtgggaagaaacaagggaaggttagagagaccttggtttggaggcagagtctaagggctttcatttaattcaaagcattcagcgtgccaaagtgccatactctagagtatcgttttctgagcctcaaaactaggtattttatagtttatagcaccactgtaaatgaaaaatattaaatataaggatacaattgatttttgttagttattgtggtatactacaaacttgtaaattaatttattagttctagtagctagtttttagattccctgggatttctcttttattgtgataagaacactttacatgaggtcttaacaaacctctcaacaatttttaagcgtgcaatacattattgtgaacagtgttgtaagcaggtatttagagctgattcatcttgattgcctgaaactttaagcctgttgatcattaattcccatttccccctcccacaacgccctgggatgtaaccatcattacgctctttgattctatgaatttgaytgttttagatgcctcatataaatggaatcatgcattatttctgtgactggcttatttcacttagcatgtcctcaaggtgcatctacgttgtcacatattacagaatttctgtcttttaaaaggctgactagtacttcattgtacgtatataccacattttctttatccacttctctgtcaatgaagatttacatttttcccatactttggctattgtgaatggtgctgcratgaatatagaggtgttaatgtctcttcaagattttgatttcaattcttttggataaatacccagaagtggcattrctggatcatataattccttgggatttttttwaatgtaaatagtcatattatctgcaaatagagaaacatttttacatcttgttttccattctttgtcttttatttcctttctttgccttattgcaatgactaagattttcagtacaatgttgaacagatgtggtaaaagcagacatctttcattttttttctcaatctcagagaaaaaacaattcagtgttttatttactctaggtttctgcagattccttttataagtttgagaagttccctactgtttctagtttgtttttatcacacatgaatgtataattttgtcaaatgctttctctgtatctattaataatatgtttattctattaatatggtgaattgcattgctttttaaaaatatttcttatagtaaaatgtgcataacataagatttaccattttaagtgcttaagtgtaattaagttagtggcattaagtacattcccattgttatgcaaccatcgtcactatccttctccagaacattttcatcatcccataatgaaactgtctctcctttaaacattaattttctacccctttttcttctcagcacctggtaaccattattctattttctgactctatgaatttgcctattgaatcatacaatatttgtccttttgtgtctggcttatttcacttggcataatgtcttcaaggttcatccatgttgtagcatgtatcagaattttattcttttttaaggctgataatatttcattctatgtatagactacattttgttgatccattcatctgttgatggacacttgggttgtttttacttttctatcttgtgaataatgctttgtatgcaaatatctrttcaagtctctgctagtcaattatttgcggtatatactctgctatggtttaaaggtcttctccaaaactcatgttgaaatttaattgccatgtcactttactgtttgagtaacgttggtgtgaagcttcattgatgccttttgctttatgtcctgcttaagtctgtgtgaaggatttgtgtttttctgccttacaaacataatttaatttattggacaggaattcatggatagtaatgctgtctgcccctttacttcagaaaacacagtgactctagtggatttgaataagtgaaactgctctgaaatgctatggaaagccgactccccaaagagtggtttcttctagaagtttgaatttgtagctacagtttccaggaagaaaaatagtagttggataacttggtaaaataataacatcattttcattttcttcccytttcttaactttggtttcctaaaggaagaaaataagtacatagcacataatctatttaaatagatttaaagagagttgcaaaataaatcacccggtctagctcttaartgaataaaacagattttgtttgtgaataaaatctgttgattgccaacactaccactacagtatcccaccragggcttcatgtgtcagctcagtgcgatctcctttaactctgcagcaccgctgcagctgccgacrtagcctcggtaggtggctattagagctctaccatatacagtggtgcatcttcagatttatgcatcaaactaaagacatgtccaagtccattttaatttcctcagtgtttttatgggaagttttatggacctcccccagttgtctttttatttggggttatgacgatcacgtttgataattacagtgataatgtttccacgtgatgcttttgtttgaacctgataaaatttagtgaaactttgtaatgatctatgtgcacttttacttgtaaaatggaatttctgtatgtttatacttgtaaatatattgttgttagtgctcctgttgctcatggtgtcctgcctcgcatttgtgattctgttaatgacttgtatcttaactaagttcttagtggtgttgtaatagggagatggggcaggtggggkgttatttgtaccactgaatcttcattaatttggttctttactgttttgaggggagaaagaatgtgaaatggtttgtgtattattgaattttaagcaatattttagaagctgtgtgactgctttaataactttttcccagtgttatttgaatcatactaccagttttactamagccgaatgacaattgtgtgaaagttactgccttcataagatcaagtcaccactgttacacagctgacatatattgtattacctttgcagctagtaaactataaagtttagatactgaatctcattacagggttatttatataatgtgaygttattcagtactgacagactacatgaagtagttttaaaatctagtgctatttttattttaaaggttagcaatgaggaggaaatgtratctggctgtgtttgtcttctgtacaaagcctgaaatgcttatggttttttggttaacagccacagagggcaaagtttaagactttcttgtaaggactaactgttcttttcaagccactgtttgtttttctaaaagcaggatttgcttccrtagcaggcaagttccttgacgtggaatagtgcaacctgtatatgggctattataataggaaagacatctgtatttgcacagtttaaatcattcttaaattttaaacatgtgaaatgtccccaaaaatctttaattttttggtaatttgtactctttttgtgcacatgttgatttcttaatggtaaatccttcatttaaaggtagtgttttctgttgagaatattttcatggaataaaacaatcttttcgtggcaaaaaaaaaaaaaaaagaaatttaattgccatgtgatgtattgaacggtgagacctttaaggtgtgattaggtcatgagggttctgctctcatgagtggattaatgccattactgtgggagtgggttagtatgtcagaaggtcaatctcctttttctctctgtttcacttgtgtggttccttgacatgctatgcctttgccatgatatgatgcagcaagaagacccttaccacatgtggcccctcaatcttggattcccaggctccagaaccatgagccaaataaatatattttctttataaattactcagtttatggtattctatcatagcaacaaaaatggactaagacatacccagaagtggaattgtgggattgtatggtaattatgcctatttggggtcccttaagattccatatgcattttaraatacattttacatatctgcaaacacattgttgggaccttgatagaattacattaaatctgcaaatcaycttgggtagtattaatatctcaataatactaagtcttttaatccgtgaacatgtgaagtcttcccatttatttatwtgtcttctgtaatttatttcagtaatgttttgtagttttcactaagtattatgcctcaytggataaactcattcctaaatttggttatttttgatgttattataaattgaatggtttttctcaatttcctttttggaattttcattgctagtatttayttatctttaatctttattttttccttctttctgctagttttggatttagtttgttctttttctagtttcttatggtgtaaatctaggctgtttattcaaaatctttcttttttcttaatgtgtttgcagctgcaaatttccatcttagcactgctttcagatcctcccataagttttggtttgtcgtgttttcatttgtgtcaagatattttaaattttttgtgatttttcttgacccattggttatttaaaagtgtgttaatttctacatacttgtgaattgtccaggtttttgctgttaacttctagtttcatttcattgtgatgagaaatgatattttgtatttcaatttttaaatctattaagatgtcctatggcttaacatatggaaaatgctccatgtgcacttaaaaaatacatattctgttgttgttaagtgcagtgtactgtatgtgtctgytgggtccagtgggtctatagtgttttttaagtcctatattcccctatgatcttctacctggttctctatccactgaagaaagtggaggtattgaagttttctactattattgtagrgccatttattcttcaattctgtcaatgtttgcttcatatattttggagctctaatatttagtgcatatgtttataattgtcatatcttcttggtaaattgagacttttagcattatattatgtctgtctttgtctcttttaacagtttttgacttaaagtctattttgtcaattagtatagccatttctgctctctttttattactattggcatggaatatctttttaatccttccactttcaycctactcatatccttagatctaaagtgagactcttttaaacagtatatagttgatcctggttttatacccactctgccaacttatgatttttgatatgttttcaatccaattacatataaattgctgaaaagaaagcaattagttttgccattttgttgttttctctgtcccttacaggtttttttctccctcatttccttgattactgccttccttcatgtttaaagttgttgtaatggcatattttgattctcacttctgcttgcgtatattttcttggtgtttactatgtgcactacatataacatcctagagttatgatgatctatcttaattgataccaacttaacttcaattgcatataaaaactctacttccttaaagcttttctccccttatgttattgatgtcacaaattatayggtttaatattatatattcattaacatakattcataattattttatgcaattgtctcttaaatcctgtagaaaatcaaaagtggagttataaaccaaaattacattaatactgtttttatatttgttcatatatttacctttactggagaactttatattttcatctgtcttccagttactatctagcattatttcatttcaaactggaggacttcctttaacatttcttgtagggcaagtgtagtaataataaattccctcagcttttgtttttatgggaatgtcttaatttctccctcatttttgaagaaacattttaccaggtatagaactctcagttgacagttttttttaaaattttcagcactttaaatatatcaccccactgcctctagtctccaaggttcttgctgaaataatactcggatagtcttatcgcagatctcttgtatatagtcacttttctcttgatgccttccaagattctctttatcttgcacttttgtcagctttgattatgtgtcttcgtatgggtctcttcaggtttgtcctacttggagaccattgagcttggatttgtatatccatgtctttcctcatatttggcaggttttcagctattatttattcaaatagtctctctcctcatttttctcacctccttctgggactcccattatgcatatattggtcagtgtgatggcatctcataagtccctaagcctctgttcactttattttttcttctgtatgcttctcaaattcaataatttcaaatgagctgttttcaaatttgcttattctttcttctacttatttgagtttgctgttgawctcctctaataaaattttcaaattagttattgtacttttcagctcaatatttttttttataatttctttgttgatrttctcattttgttcrtatgttttcttgactttcctttgttctttgttcatgtttttctacagttctgcgagtatatttgacatttgtggttttttkttgttgttgttttgagacagactctcactctgttgcccaggctgaagcrcagtcatgtgatcttggctcactgcaacctctgcctcctgggttccagtgattctcatgcctcagccttctgagtagctgggattacaggtgtgcagcaccatgctctgctaatttttttgtatttttagtagagatggggtttcactatgttggccaggctagtgtcaactcctggcctcaagtgatctgactgccttggcctcccaaagtgctgggattataggcatgagccatcgcacctggctgacagttgttttaaagtctagtaagcctgatgcctgtgtttcttccagaactgtttctggagatgtgttttgttcatttcagtgggccatctttccctggttctttgcatgccttatgatctttttttgaaaattgggtatttaaaaaaaatatggccactctcccagtctttgcagactggcatgtaagacctcactaatttgtaagtccatgaggtcttcactaatctgagattagtccaggtcttctcaggtcttttctaggcatgcttccttcctgtgaatgtgtgtgtgctccctgtccccatcaaaggtgattttaaaggtcttcatttcctaaacagtctcactgcagctttttcttagggccttagatattctattgtattcctctgtaatctcctgccctcagargtccacagggcagcaatccctgtgtagttttcatgtgctgcattgctcaccactgccttctgtggcttccagcctgaaatcaaaactatttgctgtctccagtctgatacctgagttggacattacagacaccatttctgtaggcagcccacagacaggccaggatgttgcaacaagtttcactctgctccttctgtccaagtgttcacatttccatgtttctttttatgtcacatcattttgtaaatattatgtcatatggatcctggatccatatgacarcttcttctcagggccttagatattctattgtatggwtggatccaatattatgtcatatggatcctggatatttactgtatttactatattgtggcattggatggaagttatgtttttgtggatcatgttacaatcatctggaaaatgccatttttgttttagcaagaaatcaatctggttaggttcagactacaagctgtcttgatcttctgtgggtggtggttaaaatcccagtacacttcgcaaagcctttgctatgctggtttgagtctgtctcacttatgaatcagacttatctaggttcatacacagaattagagcttctttctcttggctctgggagtctcttcttgctttcactctttagcccccagagggcccttttccttttcaaagtgtttttgttttcctcaacttctatttggctggccactccatggtcaccgcagcaccaccccacaataggggtgtgcctctgaggcagaagtattaggttggtgcaaaagtaactgcagttttgccttacttctaataccatgctccggagttagattccagcaattgtgtttatttctcrtaatctgggaaacttatccttgtgcagttgcttctctgtattttgacaccctttaacaatccacctgcttttgattaatttcagcatgctcaagtagttctttttcgtatttcttctagagattttagttgtaatttgtggaggaatgggcagtagttggcttgtgctgccattgtgggatgagaactctgcctagatttttatcttcattttgacatttactgggagtttgactctggagaagctagtttaatctycatgcctcgggatgcctacttgaaaatgggtagtagcaacagacctacctcatttttaatttttggcattgtttttggtggataaaatatgataatgggcattaagcactagtaactgctcaattgaaackaatgcttatttctattcttatattttctataaaactgaacatcttggattacaattactggaataaaaaatttagaactaaaaagttaagagatttggtgagttagctaactttgaccttaaaggaaaggtcaaaaggaagactaagaaaagcaaaatatcccatccttttctgtagcccttggaattacaccctcagtccttgtcaagtgatagctatgaaatcaaaacagggtgttacaaggacaatcaaggcagcttgcagggatgcctttcataaagtaccacattaaacaagaatgggactctaacaaataagaaaacaattactcatacagagcattgctttccaatgaaatgacccagttttcccttcatgcctctttattaaattgtgcaaaaaaacccaactaagattcttatttgggttcttattcttattcttgattcttatttgttttctagtaatactattccttccattttgctcccttgctacatggctgaaaaagaacatgcaacccactgaagacctcaagtcagtgatctgtaggctgtcagcatttggcccaattcagtcagycactgtttgtggacgtcaaagtgctatagtggcattcaaagacatgacttcagcctgtaatgctgtgagtgcttttcaaagtaggaccccaggcaccatgttccagtgttcctggcaacaacgattcatgtcaaaagacgtaagactctctactaccaaacacctgtgtgaattcttaagcttgttttacaaaactttttattcatcagagctgtagtgaaatatcatcattgtaattgatattctagcactacaaaaggcacaatgaagcttatttagttccagtactrgaaatcagaggtaacagcacatccttccttggacatgctttactctgctgtagtggtcatcacagttttgattttctggataagaagttcaccacagcatttgtgcattcatctgatagccatcttccctgaaggacattgcattcttcagcattaacagcgtgtagtttttctctctctcttttcctgattacctcttttgaaattctcaagrcctrgaaaaacaaaaccaacaataaggttaagagttgacctaggctggacgtggactcatgcctgtaatcccagcacktggggaggccgaggcgggcagatcagttgaggtcaggagttcaagaccagcctggccaacatggtgaaaccccatctctactaaaaatacaaaaattagctggttgtggtggtacatgcctgtgatcccagctactcaggaggctgagtcaagagaattgcttgaacccgggaggcggaggttgcagtgagctgagatcgcaccattgcactccagcctgggtgacaagtgagactctgtctcaaaaagaaaaaaagagttaatctaataggagtgagattattctatgattctggttcttgtttctcccatgttcatttaataaatcctgttaaatcttttttttttttctgagacatagtctcactctgtcgcccaggctggagtgcagtggtgcaatcttggctcattgcaacctctgcctcccgggttcaagcaattctccctgcctcagcatccagagtagctgggattacaggtgcccaccaccacgcctggctaatttttgtattttttaaatagagatgtggttttgccatgttggccaggctgttcttgaactcctgacctcaggtgatctgcccttcttggcctcccaaagtactgagactacaggtgtgagccactgttctcggccctaatgctgttaaatcttaagctgcatgtgtaatataagacagtgcttctcaaaattcagtgtgcatataaatcgcttcagtaggtgtggggcaggcctgtgataatacatttccaaaaagcctcaggtagctgctcaagcttctggctccaggactacattttgaatagcaagaatataaaagcaatcagtcactcactaccacatacaaaaacaaaagtgctatacaataagactctcaaagtagctaatccatgcttctcacctggattccaaagtaaaagtgctcagcaaatactgcctagcatcctgctcaagtaatccccatacagaattgccctctgtccccacacagaaatggaaggtctatttgataagttttgtaaaaatcagtactgcatttccaacattactacagttattttttaattccaaatttagatgtgcttagaggtaactaaagatgtgtcttgtgctttttatgacttattctctgaaggcaaataaatttttcccttaggaaatcattttcaaggttcttagaagtaaaagatgaatactarcatttgggggaagctttgcaaatgccttcagcctggtccagacttctttctgaaaagtgctatcagrgaaaacttcagtaacaagtccttgagcacatgcctctccygctgttaacttctttccaaaaataagcatctctgttgcctgaaatgaaaagcaagaagcaaggttaagatactaacttaataaaacaaggcttcagttaactgctttcaggaggcttagagagatgtactcatggtcttttgaggttgctggtatttctcagtaagggagaagctgatgacctcaataggcaacggtttgcaaactgtgtgctgagacaggctcctgggaaggtctataagggctgctgcttctgtgtatcgttgttggaggggcaagatcagggggtccagggcagaaatgatctgaagcagatgcttgattctataacccacagcagctatgattttccatttgatacactataaactattattttacagaggaaaaaaggagagaaaaattacggtcattgggtcaacctttagaaactttcaaaattccattctctggaaactacccagtgatctggctctgagagttttctttacctgcattggtactcaaattagttctatttgactaaaggaaagcaaagacttatagttagcttccgaaaaaactgaggacattaagtggatatcctctctccatttgcaatttcttttccagaaaaggaatgctcttcttttttttgagacagagtctcactgtgctgcccaggctggagtgcagaggcacgatcttggctcactgtaacctccacctcctgggttcaaatgattctcctgcctcagcctcttgagtagctgggattacaggtgcccrccaccatgccccggctaatttttgtatttttagtagagacagcatttcactatgttggcccggctggtcttgaactcctgatctcaagtgatccaccagccttggcctcccaaagtgctgggattacaggtgtgagccactgcacccagccaaggaatgctctaatagccaaatgctctaagacttgtagagtcagttctgcccccttcccaagttcaattcagggtatgtgatagcctaatgagagtaaaaacatacayatataagtttttaacaaaatcctaataggcaatgaaaacaagctcaattcccactgccccactttgagatcttgcagcaatatttgctaagccttttcctatagctcagcttctrgtcttgtcacaatccccttcgagtcatgccacagggcgtgggcaactaggaaacacagtgaaagacctgagcagccacttaaccagcctgggagagaatacacccgtgagcaggctgatggaagggctgctgtgattgggggtggctctggcagccgtgagcccccacaaaacctcccatctgttggtacttactgtaactctgaaagtgaagacgtcatcatgtctctccttaggagayactggtcatccataaaggaacygagtggcctccaaactcaggggaccaagggaggctggcacagccctggtccttcaagtgactaatgccacacagctgcaaggctgaggtgctgtgctgcttgcagtgcagctagcactaagcagccagctgaagaggaggatcccagttctgggaactgcagagagaatttctaattttcctgcatagcagatacttcccatagcctgattcctccattggtaaaactcttaaagagttgaaaagcaaatcattagcttctcttttgtccatattaccaagggaaagaagggagagtatatgagattactcttccttctttcttgagatgactcataaaattttatatttaaacattccaaaagttaccttggctgggctcattatcttcggaaaagtgtaagaggagcatccttccggactttggcctaggtgactaaatggtgtatgaaatgttgcctgcagrggcaggagagaaaagaaaaccatcttttcatgtgtgattttttttttttttttgagacaaagggtttcgctcttttgcccaggctgcagtgaagtggcgcgatctcggctcactgcaacctccaccccttgggttcaagcgattctcctgcctcagcctccacagcagctacgattacaggcatgcrctgccatgcctggctaatttttgtatttttcgtagagacggggtttcgccctgttggccaggttggtttcaaacttcttacctcaggtgatccacctgcctcggcctcccaaagtgctaggatcacaggcgtgagccaccatgccwggcttcatgtgttatttttaaaaatcacgatttgcttataacttcacaatacttaataatatttatttaaaaattaagattatgtggttaatatgcacacacaattcaccctttaaaagtgtatagttggatgagtttgaacaaatagagagttacatagccaccaccactactgacatgcggaacatttcagccaccctgaaaggttccgggggcccttctgtagtcagtccctccctcccacccccaagcaactgctaatctgttttctgtccctacagttttgacttttatagaatgctgtataagtggaatcctacattctgtagcmttttgagtctgacttctgagagtcaccatgctgttgtatgtattagtagtttgttcctcgctatttctgagtagtattcctttgtatggatgcacaataatatgtttatcattcaccagttaatgccattggtgttgtttctagcattcaaatggttgtaccatttgacactgccactagcaacgtatgaaaggctactatgaagaaggctgctatgaaaaacaagttgaacaccttaaatatatctagtcgtgtgttgcttaacaatggggatatgttctgagaaatgcataattaggcaattttgtcattgtgccaatatcatggagtatacttacatatacttggatgccacagcctactgcacacctagctatgtggtawtscctactgcttccaggctaccaacttggacagcatgttactatacttaatactctaggcagttataacaaatggcatttgtgtatctaaatatatcaaacatagaaaaggtaggccrggtgtggtggctcatgcctgtaatcccaacactttgggaggcagaggtgggcaaatcacctgaggtcagcagttcgagaccagcctggccaacgtagtgaaaccccatctctactaaaaatacaaaaattagcctggtgtggtggtgtgcacctggagtcccagctactcgggaggctgaggcacaagaattgcttgaacccgggaggaggaggctgcagtgagccgagatcatgccactgtactccagcctggatgacagagtgaaaaaaaaaaaagaaaaggtatagtaagatatggtgttataatcttaggagaccagcgttttacatgcagtctgccattgactaaaatgttgttatgcagcacctgactgtacaattcttatttgtcaagtatacctcaatgaaactgaaaaaaaatttaaaaataaaaatgttcagataatgttaacaaaaaggcagttaggaacacttgtgtacaggtcactgggtgaatctcttttaaattatcataggtaaatacctaagtggtatggctggtctgtgtggtaaatgtatatttagctcaraagctgctagactgttttctagagtggttgtaccatttgacattcccaccagcaatgtatgaaagttccaattgctccayatcctcactaaacctagctattaagtctttttcattttaaccatgctagtatgtatgtagtggggtctcactgtggttttaatttacatgtccctaaccattaatggtattaagtctcttaccatgtacttattagacatacgtatattttctttggtgaagcaactgttaagatattttctccactatttttttaagttaggctgtttaccttcctattatatagttgtaagatacacattcagattgcaagtcttttattagagcgtcaggcaaatcttttctcctggtctatggcttatcttttcattttctcagtggtttctctcatatggttttaatagccctttatatttcattttgtctgacctattcattcctcaccattgcccatttttattttagcttgtggatctatcgctttatagacaaactttaaaaagtatcgtggagagatcagcttttgttacatgagttgaaaaattgtttcctcaatcygtcatttgtcttgattttgccccagtggtttttttggttggctttaactactggaattaattcaatattggttatttagtatatagtcatttttagktttttttttttttacatttaagacatatttttgtgtttcttaatgaataaattatgaaagaatgttaatttaaaattcataatatgtaaaagaatatttagatttcatttcctataatcagacacgctgttgtttttactatataactgttagaagatataaatctataacatatgcagcatatacataaaaataatcacaatatttttaaaagtttctgttaatgtcatgtatcttctttttttatccaaaagaaaacttattcaaaaaaatgtacccagaagacacagcctaaggaatacaagcaggaaactgagaaamctgccaacaacagctaaagggacacaaacaggtacatgcaaagttgccagtaagcagcatttaaaatgctgattttcagaaagagagcagcaggtggagttaagggtttaggctctggcgtcagactacttagggacgttgggaaagtttcttaccctctctgtaccacagttttctcatttgtaaaatgggaaccaatccttctttgctttttttttttttttgagacggagtcttgctcggttgcccagccttgagtgcagtggcgcaatctcaactcgctgcaacctccgcctcccgggttcaagcgattctcctgcctcagcctcccgagcagttgggattataggcgtgcaccaccacacccagctcatttttgtatttttagtagagacggggcttcaccatgttggccaggctggtctcgaattcctgacctcaagtgatccacctgccttggcctcccaaagtgctaagattacaggcatgagccaccatgcccagcctagattgtaaaacttatttttgccacattggaggagaatgtttgtttttatagacagggtctcactctgttgcccagccttactcttgcctcagcctaccaagtagctgggactacaggcgcctgccaccacacctggctaatttttgtatttttagtagagaaggggtttcaccacattggccaggctggtcttgaactcccgacctcaggtgatccacttgccctggcctcccaaagtgccaggattagaggcgtgagccactgtgcctggccaagtccttctttcatcgggctactctgtacattacgtgaatatgtgtgtgtgtatgcgtatatttataatatacataatgcatgtgaatagagtgcctaaacagtgaccactcaaagatttattattgttatgatttctacctttttcttaactcatacaggaaatgtatcatttgctgacagagctaataggcattattaaccattgcccacagtataaaatagattaaatgtactgattaatattttggttatatgggttaaatattaacccatcatttaatatgatatttattcttgaagccaataatggtaaatcttataaaacaattttttctacagccttttcctttagcatatttcctttattttatttattttttacttatatatttttttgagacagagtctcgctctgtcacctaggctggagtgcagtggtacgatctcggctcactgcaacctctacctcctgggttcaagcaattctcctgcctcagcctccaatgtagctgggattacagacacccgccaccaagcccggctaatttttatatttttagtagagatggtgtttcaccatgttggccaggctggtcttgaactcctgacctcaggtgatctgcccacctcaatttcctttattttaaatgatgcttgatttgtttggttgggtaaacttttatcagaagacactatttgacaaataaattttacttttggccaaattttttagcatttaatatatatatgcaatatacatatattataatatatatagaatagatatgttttatatgtattatgtatatatgttttctgatttcaacatttattacaatttatatcataagatggaagtcatcaacatttttaaaaggttgatgcaggccaggctcagtggctcacacctgtactcccagcacttcaggaggccaacgcaggcgaatcacttgaggtcaggagttcgagaccagcctggccgacacagtgaaaccctgtctctactaaaaatacaaaaaaattagctcgatgtggtggcacgcacctgtactactcaggaggctgagtgggagaatcgcttgaacccgggaggtggtggctgcagtgagccaagatcgtgccactgcattccagcttgggtgacagagtgagactcccatctcttaaaaaaaaaaaaataaggatgatgtatattgaaagtaattttcaattcagtgggagaatcagaacaarattcaaatacaatatttgccctccaagtattaaagaatgagatccccaattttaggtcaggaaccattgacccagtccctgttaaaagcaggtcaatgactaatcagtcatctaatacacagactgtgaacaaagacattgatttctgcctttgaacagaaacctctacctacaaaggctgggcagcctggcacctagaatctcatttgctaattttgtgggaaaattattcataagaattaggtctgtcaatacatccaatctggttcaatggaatccagcaaaagaaaattcgaagaattaaggatgctattatatggtcctgtctatcagtggggaaaatacctctgaacaaaactagaaatctcttcagtggtaaaaaccatatgctccctagaaggctgcaatcatcagcacagtttaccatcacataagcataagtcactggacaatctgataccctaaaggtggttattaggtgcttgtaatgataaaaattggaaacagcctagggttccagcagtcagggactggttaaacaagataagttaataacccaaacgttaggactggttatctctagrtggcaagataaggagtgatttttaccttgtagcttttcttggtactttttcatatctttcaaaattttattttccactatgacatatatattactactgtagtaaaaataaaaactaaaatctgtataatgcaatggtgaacacaaggctgaattgtgttctgggcaaggaacttctcagagcttcagttttcttatctgcaaaggagggagtgacagtagataatgctcacaggtccttctccttctaaaattctaaatccatttactcagtaaaaaggatcaactaatcccttgcacaacctgcaaagatgctattcctccctcccataacaaattttcaagtgtctcctgaatctttcagaataacatgaaagctgtatacctattgtggaatttgattagaatccggaacagtcagagttggaacaatgttcacaacaaaatgcaagttaataatgaaggaaaaataaaatcagtcaaatcagcctaatgctttgggaaaaatctaaattcagttaattctaccacaaacaacatgtaacctgcttatgactggcaacgctgaaggaggattcaaaggctctcatctcgcgctgcttgcctgacctcttgctttctaggarctgacttaccctgtcagatgcatacacggcatcgaatagcccaaggagggtgacggagatgcccacagctggaccattgaccactgcaatcagaggcttaggaaaatctataaaacagcccacaaattccctacagaaatggaaacacaaaatcattaaatgtgccaaagcagcatgactraagcatgggcaagacagtctgactctgagataaagccttctgtcaggctgggtgtttccacagccaccaccagcagtgcctccttgtcctgccacttccctggtcttccgcaccagattcatccagggcatccgtctgaatggcagtggatggaagaccaaccagtgagacctatgggtcaaccctggtttgaatcttgtattctggacagtgagttcagggctgtaaaccagccgcagtcttagagattaggttgggtgactgagcacatgctgcaatatcacarcaagtgggaattacagatttggcaggaataaagagaaaagccttcatgacctcctcctgtgtttacaagactcctccgagtctcctaccttcagcgttcatggaaatctcccattcctctggctggatgagaatttgctaaattcctctgcctcartgcaagataattttgtttacaactatagctcacttttatgttttccagtcaaatctcatgagaccagcaggatgaacaggtaacagaggtcaaagagaaagaatgaatgcccacctatggatggaggcagtttagagaaatatgcttgtccaaagtcacaattaactgcactgacacagagaagcagatattgcacttttgctcaactaaataccactttgatgactaagaacgggccctctgggatcagacaaaggtcagtaactcttacctcagtaaaacggcattatttttagctttctcctctactccaccagggggaatatcagtgaagttagtcagatcattcccactactgtaatagtcaccatttcctataagtaagaaaatcaacagatccctcattcaatcatcctataattcttgagtatctactgcatgccaaactctatggttaggcaagggaaatacattggagaacgagcaatggttcctgccctaacttacaaactagtgagtacgctggacactgatctataaaaacacaccgataaatgtagctaatgctactgttgaaatagaggagtggtgcgtcatgaaatgagggtatgtaccaggagggttggtctaatcagggagttcaggaaagaactttcctaaggaagsgacaactgaattgagatctgaaggagaggccaggtgggctagaaaaagagggctgggaagaacagtttacacaaaggaacagcctgtgcaaaggctctttggagaggttatccccactgtagatgaagtaagagccactgtagctgactcagrgaaagccagggggaagtcggtgcaggatgaggactggcagaatagacctgacagtgctttgtagatcccatgaggaagttttttctttattctaagagccactgaaagtatgtttctgagtgtgtgtgtttaattaaagtacaatttatatacaataaaacaaccagtttttaaatgttcatttagatgagttttaataattttaaatacccacaagatcaccatccaaaacaagatacagaacatctccatcaccccaaaagtttcccgtaggctccttcctagctatcccaccccacctgctccaaggcaatcactttctgacttcaatttccayagagaagaacttttgtctactgtagaactttctacaaatggactcatacagtatgtacactcctgtctttattttgctgaactgtgttttaaagatgcatccacattcttgtgtatatcatttattccattttatagctgagtattccattgtacaaatagtcaacaatttgtttattcatccatgtgtttttgaacatttgttttctggttttggccgttataaatcaggttaccatgtctgctcctgtaaaagtcttttggtggacatatgtgtcttaattgatgttgggtaattgcgaaggagtgggtatctgtgtttttttaaacattttttgtatatttataaatcagagtatgacagtactrgaaaagatcttagagccttttttttttttttttttttttttttgagacagagtctcactctgttacccaagctggagtgcagtggcgcgacctcgggtcactgcaamctttgccttccaggttcaagtgattctcctgcctcagcctcctgagtagctgggattacaggtgtgtgccaccatgcccggctaatttttatatttttagcagagatggggtttcaccatgttaatcaggctcatctcaaactcctgacctcgggagccacctgcctcggcctccaggtcttagagctttttaactcaatttcctatctattaagaggcccctcaaaatagaaatttaattaggatgcctgagaaaatgtcttacctgttaaaacagtgatgattgagtcatccttgctggcagctttaagtgcacgcataatttcatgatacatctgtgtaatgggaagacaaggaaaagaaaagaactctgaacacaggaatcatcaatcaatggactcaacaaatgtcaggctgcaagcttgctctcagcaaagtgcctaacatttattttggttgtattttataaccaaaaaggtggaccaacataactgaaggaatttttattcctttcacagttacctggtgcatattatgtacctggtgctatggcaggagctgcaggctataaaccactttttttccaaaagggaccaagaaagaaatagtccttgagcttttggaattaacagaggacttaacatgttcaatttggaattaacatgttcaaatgaggagggggttggaaagtacaaagtagcagggaactcagaggaggtgctgaggcttatctagtgtgggcagagtgggaggtggtcagagaaaactttctacaaagcaacgtctctgttgtgacctcaaggaagcccctggcagtctgggaagtgttagtgactgccaaaaggctggaattttcaagacactgtaatggtattcaaggaaggtggctcaaaattttaaatcagcaacatttctgaaaatcttggacaagcagctatatagcttttaatgcatttaaaacaggtgcaatttcaaccttagatgagatttcagtgtgggaaagaaatgaggaagagggctgatacttatagatacaaatatactggaaaagacacatggactttacataaaacagcctgccctccgtatccacgggttccacatccatggacaaccaatcacagatcaaaaatacctggaaaagaattctgtatctatactgaacatgtacaggctttttctcttatcattagtccctaaacaatacagtataacaacaatttaatatagcatttacattgtattcagtattataataactctagagatgatttaaagtatatgggagtgtatatagaggttatatgcaaatattatgcctttttatgggggacttcaggttccgcggattttgttgtccacacggaggtcctggaaccaatccccatcggataccaagggatgactgtacatgaataagcgtttaagcatttctcctgagggaagtgataaggaactcattctatcattattatagttatgataacaccacacagcagggcgactggtgagaccaggattaggagatggattatcagggttccttccttccaactggtgagaccaggattaagagatggattatcagggtttctccctccctccctcccttcctcccttccttccttccttcttttttgagatggagtctcattgcgaggcccaggctagagtgcaatagcatgatcttggctcaacctccacctccccggttcaaaagattctcctgccccagcctcctgagtagctgggactataggtgcgcaccaccatgcccagctaattttttgtatctttagtagagatggagtttcaccatgttggccaggctggtcttgaactcctgacctcaagtgatctgcccaccttggcctcccaaagtgctgggattacaggggtgagccaccacgactggctatcagggtttcaatttaggttttgctgcttatttgttatgtgaacttgagtaagttacttcttaatctaattattttattgttaagtaatgataacagtaggctccctgtgagaattaaataaacttctgtgtggagagtgctggcactcattagacactctgtacagagtagctattattattatagttgtagagaaatgagtcaggggaaagtggaaataaagtttgagcattaaatgctttattagttgaatgacacatatcctacttcatgaaattctgaagatgattttaaagtgagtatgctctttctgccacaatggaggttattgacccaatggtcatagtcctctgaaattttagtcccagttgagcaccaagcatccaattaattccctataatttttttcaagaagaaggggctaaggtagttattttattatcattctagttcagtgagagattcaaagactaacgttaccgagtgaagcagctactttaaagcggagctgggtgataatttgtttaagatgaagtccttctctcctttctccctatacttataaaaaatgaagcccccgtgcaagcagaaagacttactttcatgtctaagtgacatgaagatacttctgggagcagtctacaccaaccttagatggcttctrtgcaaattctctcatagcaacatgtttcatttatattcatttatttctgcttccattattaggaaaatcacagtgccttctgggtatatcagaacctacctgaaattcacaaactctaaacaatgaatgctcaactctgttgtatgaagtagccacaattaccaaccttcctgcacaaatcaaacaagagatatcttaaaataggaatgatgctgaaactctacagcttttgtgtgaaacacatagaagaagaaagtaaaacaggacaaactccgtgggcaggtaacattacctcagtgtttatggcatttttctttttgggccggttgaacatgatctttgtgatgccatcttcggaggtcaccaccagagtttcaaacccagttgatttcctgtctgttccaggctccacctgactagaggattccaatgaaggactcaaactggacaccaaatccacatagttctgcctggcagcttcctgaacggacgatgacaaacaacctcagcccatggtcaatgaataagcactttgagaaagttactatactaataactaacaccttgcaatgaagaaagaatagaagcacatcaagatcttgaagactccatttacaatggcttaatgagaagcacaaacttctttagaagtacagcaaataaaagcacagtaactagtaaactcaccttgggcaggctgccaagggcattccatgcgtcccatttggccttgttgatcaagtcaaatacacctggtttgggcatgttacaaggtccttcagtggcctgtgaaaaggagaggggcaatatgttcaaatgtccatgtaaactagacccctaaatatttaagatccataaaatctgtaagtacatgaatgcctcccccaaatcctttcacagggtatgtaaattgatctgaattttcccctccagtctctttgatgttgttgccaaaaatgcacaaacagaaaaaagactggaaataaattataactgcctgtctatgaaaataatgcaggataaaggttttggggaagtattttctaaaaaaatctaatggttcattagttttatattggtaatcacattttccacaaacaatcaaaatattcaagcaaacaatctttacaaggaactagtcaacaaatacttgaaaacccacagcatattccaaaagcccatctgaaggtacaaaaaaaaacaccactaattcagtggtggacttttggtacctgggtaacaaaactgtagctgaggggctagggtggggctatcagagctactggttcttaggaaacctaactgaagaacatgtaagtaaaaagcaaaaaggaattaaattttatttttgaggctaggtggagtgggtgttttgagatgaataaaatatcccactcagctacttttcagaaatagcaatttaaaattccagttaaaatttttaaaattttataatacagttagagaggaaagaagaaagagtctttgaaaaacaagccaggtgtggtggctcacacctgtaatctcagcactttgggaggctgaggtgggtggatcacctgaggtcaggagttcgagaccagcctgaccaatatggtaaaaccccatctctactaaaaatacaaaaattagccaggcatggtggcaggttcctgtaattccagctgcttgggaggctgaggcagaaggattgcctgaacctgggaggcagaggttgcagtgagctgagatggtgccgctgcactctaccctgcgtgacagagcaaaactctgtctcaaaaaaacaaaataaaaacaaaagaaaaaagaaaaaagaaaaaggcagtaaaggaggttatgaatttctttagacagagatagtgtcatctggcaagagttggccaacctagaagttagagggaacacagtccacaggataagggcttgcctttgtctcctgactgtcctcaatgctaacaccaattgcaaggctggagggcacccaggaccaccctcaagtgcaacaatttgctagaaagacacccagaactcactgcaagctgttaaacgcacaattaatagtttattaagggaaaggatagagattagaatcatccaagggaggacacacacaggatggagtctggggcagtagcaaatgtggagtttccattgtcctttccccatggagtcagcatagggcacctctaccagaattgatgtgacagtacacagggagtcctgccaaccagagatgctcagctcatccagtctcggtgtccagagtttttaacagggctccatcacctgtgcatgactgtataacctgaagcccccaccctaaatcacatcgttaagacaatccaggcaaataaagactcctaccagtcattagagattcacttcccagaagctgagggcaaagccacacctcttctggggcaaggttaaattttttactatacacacccatatgaaagagaagctcatacccatcataggacagaaaaatagataacacaggagcccagagaggcagacatgccagggaagtctttggcattgaaacttaagagctttagtttttaaattttgttataaaaatttccaaacataccaaagtagaatactataatgaattcccaatacccatcatccaggttcaacaattatcaaactgccttacttgcttcatctctctctctctttattttctttcgtttttggacagagtctcgctctgtcactcaggctggagtgcagtggcgcaatcttggctcattgcaacctgcacctcacaggttcaaacgattctcctgcctcagcttcccaagtagctgggattacaggtgtgcgccaccagtccagctcatttttgagtttttagtagagatgaggtttcaccatgttggccaggctggtctcaaactcctgaccttaagggatctgcccgcctcagcctcccaaagtgctgggattacaggcgtgagccaccatgcctggcctcatctatccttttctttttgtgcttagagaacttcaactatccatgctatttcacccctatatccttagtacacttttcttaaaaatatcaacattttcttatataaccttgacaccattaacgatgatttctaggtatcttctaacactctgtccttactcaaaacttccccaattgtcttaaaaatacctttttcagttgatttattctaatcaagagctaagtaaggtctacaaatgtgaatattatatctcgtaagtctcttttactcgtgtgacactgaggcactttgtgccttaatagtatttcaaggtctaatataaaaaactggcatatatatatatacacacacacactcttcagagaagagggagcaagacaaaccaaaatgttaaggccacattttagtaaacacacagtgtatttatttaagaagtcatttgcccaaaattctttaaataacgttcgaccgtaggcatttacctgcttatatagcgcgtagagttttagcttcacttcgtttcctggatcctttttcaagagtttcacttgattcattgaattttcaaagtccttctgactggctctcattgctgttctattcatgtgcagctgaactaccgggaaactagtgacctgcagagaactacaattaggcagactgatttctatttgttcccaaccctcacatttctgcagcctgatttctaattgttcccagcctatacataacaaaatgccatgtttgtctatagatattttctttatacttgcctcagcaaactggctgcaaataattggctgtaaggattccaagataataagtcaatacagaagctaacagtagtaactttaaataaaaggaaaagtaaccatccagggaggtatctgtaagcaactaaagataaaagcagccagaacaggaatgaccatgtaaattttgccaaaggcaagaagtgaagtgcatgcaagacagtggacagcaggaaaccaaaaggctaaagtgcacagaatttagtgaagtgtcccaaagtcctgaaacagcctctgcactcactgataagccataagctatatcaggtcaattcttgcctctttgctggcgaagctggtgttccaacatacacacaggtggaaggaggggagaatggatgtgaacatacaagaaatattcaaaagaacacacgagcagttgctagcattccagatagagccacagccttctcagcagatgggagggaatctacctgcagtggaagggagtcagtgaagggggctcagcaggcgtgcccctttctatgggtatgtttaaccagccagccaggaacagagcagaaacagcaaccaccgcgggggtgatcagcacgtttttaagcacacatagtgagcgggggtggggtggcaaacttgaatgcacaggactcaggccacaagctaaaaatggagttcacgacgatgacactgaataatagagttaatggcaaaaaagatgattaaaataatacaggttacaaagcccaaacctaacacacaaacacaattatgtaactcgaaaatggtgcaatgaactctaggttcaaactttggactattagtaactgattcagtaagatcagcctagagtaagttttacattaaaatgattttctgtaaagggaaaaactgcatcttatatggcaaattccacgtagaaaacgaaagaaaaatttaaaatatccacagaaagccgaaatgtacaagtttccacaaaatgtggaacaaatttatttttaaataaagcgtgagttttaaaaacaaatagcaaaaacacgaccatttaagaaaatacataaagtcgggaaaatcactcataattctaccacttcaaggccaccaccgtgtttcggttttgttccctatgcacagattcgtgcgggttcccgggaccccagggaggtgcagcgtgcttcttagccgttactctgtacccggccatttcactttatagcatacgtgttctccaagaagcagagtgttaagtccacacgagtgataacggcttgcgtttacctcgcttttagcaagcgacgctttgcaccccagaagcagcccggctgggaagtgcaggcccgggtgctcagctggggcggctcacccgcccggagtccggccccaggaggatgggagcgtgcgcggaggcaggcggagaccttggggactgctgacagggaaccatagccctgacctcccgacgcgcccatcctgaccactccgggcccagcggtgcaggagggcgcgcgtgaggtcgtcactttttagcactacctcaccggaaaaccagcaaagcaaaatcctgttgccacctagacaatagggaaggagggtcttccaacggcggcgaccttcgcctggacagcggtatcctgcgggcgaccatgggccgaacggccgggactccaagcttacctcggacacgaacgccgcgccagtctccaagccaagtacgccatcgccatcccttgggcggctctagggctgcgggggctcgggggtggggccgggtctcgggggcggggcctagctcggtctgcgggggctcgggggtggggccgggtctcgggggtggagccgggactcgggggcggggcctaggctcccgggctgcgggggctcgggggtggggccggggcttgggtgcggggcggggccgagagcagagcccaggcaggagcctggggcatgggcggggccagggttggggcggggccaggctgagagcgtagccacgccgcattcgccatcgctagcccgtggcctcctctggggctgcgggggctcgggggtggggccgggggggtcggtgcgtgggcggggcgggagctctaggcggttaggagtcggggctcagatgcgggggcggggccggagcgaggccgggtatcacccgggagtggaggaagtgcggggggttcgcggcgcggggagggtgatcccgggaggacttgcgcggcgcgtggggcggggcacagatgctccccggcctggctccgagtaactgcgagctggaggcgcggctgctctctcgggcggacctcagctctgcgaaccctgtggctgccggagcactgagcgccctgcccggagtcccgcggagcctggcgaggaggggtcgctgcatcccgagggccagccctgagccgggaggtggggtaacaattgagggcgtatgcttaaaagctgctaggtcatgcatccccaaatcgaaggtttgcagacctggtaggacgcctgggggtcagaagtgatttttggagtacccaagtttttagtgtcagtgaagagtttgtggatatttttgagttctgctgaggcatttgcaaagtattttctttggggaagaattcttaagagttggaagggccttggctgtgtcaccttgtccagttcccagagaaccaaaaaacaaaacagaacaaaacgaaacaaaac

SEQ ID NO: 96615 - DNA, 13833 bp, Homo sapiens
  misc_feature (1)...(13833): n = A,T,C or G
tttccgacgggcttaaaagatggcgcaccgggagactatatcccgcacctggctcggagggtcctacgcccacggagtctcactgattgctagcacagcagtcagatcaaactgcaaggcggcagcaaggctgggggaggggcgcccgccattgcccaggcttgcttaggtaaacaaagcagcagggaagcttgaactgggtggagcccaccacagctcaaggaggcctgcctgcctctataggctccacctctcggggcagggcacagacaaacaaaaagacagcagtaacctctgcagacttaaatgtccctgtctgacagctttgaagagagcagtggttctcccagcacgcagctgcagatctgagaaccggcagactgcctcctcaagtgggtccctgacccctgacccccgagcagcctaactgggaggcaccccccagcaggggcacactgacacttcacacggcctggtactccaacagacctgcagctgagggtcctgtctgttagaaggaaaactaacaaacagaaaggacatccacaccaaaaacccatctgtacatcaccatcgtcaaagaccaaaagtagataaaaccacaaagatggggaaaaaacagagcaaaaaaactggaaactctaaaaagcagagtgcctctcctcctccaaaggaacgcagttcctcaccagcaacggaataaagctggacagagaatgactttgacgagctgagagaagaaggcctcagacgatcaaattactccgagctacgggaggaaattcaaaccaaaggcaaagaagttgaaaactttgaaaaaagtttagaagaatgtataactagaataaccaatacagagaagtgcttaaaggagctgatggagctgaaaaccaaggctctagaactacgtgaagaatgcagaagcctcaggagccaatgtgatcaactggaagaaagggtatcagccatggaagatgaagtgaatgaaatgaagcgagaagggaagtttagagaaaaaagaataaaaagaaacgagcaaagcctccaagaaatatgggactatgtgaaaacaccaaatctacgtctgattggtgtacatgaaagtgacggggagaatggaaccaagttggaaaacactctgcaggatattatccaggagaacttccccaatctagcaaggcaggccaacattcagattcaggaaatacagagaacgccacaaagatactcctcgagaagagcaactccaagacacataattgtcagattcaccaaagtcgaaatgaaggaaaaaatgttaagggcagccagagagaaaggtccggttacccacaaagggaagcccatcagactaacagtggatctctcggcagaaactctacaagccagaagagagtgggggccaatattcaacattcttaaagacaagaattttcaacccagaatttcatatccagccaaaataagcttcataggtgaaggagaaataaaacactttacagacaaacaaatgctgagagattttgtcaccaccaggcctgccctacaagagatccttgaaggaagcgctaaacatggaaaggaacaaccagtaccagccactgcaaaatcatgccaaaatgtaaagaccattgagactaggaagaaactgcatcaactaacgagcaaaataaccagctaacatcataatgacaggatcaaatccacacctaacaatattaactttaaatgtaaatggactaaatgctccaattaaaagacacagactggcaaattggataaagagtcaagacccatcagtgtgctgtattcaggaaacccatctcatgtgcagagacacacataggctcaaaataaaaggatggaggaagatctaccaagcaaatggaaaacaaaaaaaggcacgggttgcaatcctagtctctgataaaacagactttaaaccaacaaagatcaaaagagacaaagaaggtcattacataatggtaaagggatcaattcaacaagaagagctaactatcctaaatatatatgcacctaatacaggagcacccagattcataaagcaagtcctgagtgacctacaaagagacttagactcccacacattaataatgggatactttaacaccccactgtcaacattagacagatcaacgagacagaaagtcaacgaggattcccaggaattgaactcagctctgcaccaagcagaactaatagacatctacagaactctccacccaaaatcaacagaatatacatttttttcagcaccacaccacacctgttccaaaattgaccacatagttggaagtaaagctctcctcagcaaatgtaaaagaacagaaattataacaaactgtctctcagaccacagtgcaatcaaactagaactaaggattaagaatctcactcaaaaccactcaactacatggaaactgaacaacctactcctgaatgactactgggtacataacaaaatgaaggcagaaataaagatgttctttgaaaccaacgagaacaaagacacaacataccagaatctctgggacgcattcaaagcagtgtgttagagggaaatttatagcactaaatgcccacaaaagaaagcaggaaagatccaaaatttacaccttaacatcacaattaaaagaactagaaaagcaagagcaaacacattcaaaagctagcagaaggcaagaaataactaaaatcagagcagaactgaaggaattagagacacaaaaaacccttcaaaaaatcaatgaatccaggagctggttttttgaaaggatcaacaaaattgatagaccactagcaagactaataaagaaaaaaagagagaagaatcaaatagactcaataaaaaatgataaaggggatatccccaccaatcccacagaaatacaaactaccatcagagaacactacaaacacctttacgcaaataaactagaaaatctagaagaaatggataaattcctcgacacatacactctcccaagactaaaccaggaagaagttgaatctctgaatagaccaataacaggagctgaaattgtggcaataatcaatagcttaccaatgaaaaagagtccaggaccagatggattcacagccgatttctaccagaggtacaagaatgaactggtaccattccttctgaaactattcctatcaatagaaaaagagggaatcctccctaactcattttatgaggccagcatcatcctgataccaaagccgggcagagacacaaccaaaaaagagaattttagaccaatatccttgatgaacattgatgcaaaaatcctcaataaaatactggcaaaacgaatccagcagcacatcaaaaagcttatccaccatgatcaagtgggcttcatcccggggatgcaaggctggttcaatatacacaaatcaataaatgtaatccagcatataaacagaaccaaagacaaaaaccacatgattatctcaatagatgcagaaaaggcctttgacaaaattcaacaacgcttcatgctaaaaactctcaataaattaggtattgatgggacgtatttcaaaataataacagctatctatgacaaacccacagccaatatcatactgaatgggcaaaaactggaagcattccctttgaaaacgggcacaagacagggatgccctctctcaccactcctattcaacatagtgttggaagttctggccagggcaattaggcaggagaaggaaataaagggtattcaattaggaaaagaggaagtcaaattgtccctgtttgcagatgacatgattgtatatctagaaaatcccattgtctcagcccaaaatctccttaagctaataagcaacttcagcaaagtctcaggatacaaaatcaatgtacaaaaatcacaagcattcttaaacaccaacaacagataaacggagagccaaatcatgagtgaactcccattcacaattgcttcaaagagaataaaatacctaggaatccaacttacaagggatgtgaaggacctcttcaaggagaactacaaaccactgctcaatgaaataaaagaggatacaaacaaatggaagaacattccatgctcatgggtaggaagaatcaatatcgtgaaaatggccatactgcccaaggtaatttacagattcaatgccatccccatcaagctaccaatgacttcctgcacagaattggaaaaagctactttaaagttcatatggaaccaaaaatagcccgcattgccaagacaatcctaagccaaaagaacaaagctggaggcattacacaacctgacttcaaactatactacaaggctacagtaaccaaaacagcatggtannnnnnnnnnnnnnnnnnnnnnnnnnnnnnnnnnnnnnnnnnnnnnnnnnnnnnnnnnnnnnnnnnnnnnnnnnnnnnnnnnnnnnnnnnnnnnnnnnnnnnnnnnnnnnnnnnnnnnnnnnnnnnnnnnnnnnnnnnnnnnnnnnnnnnnnnnnnnnnnnnnnnnnnnnnnnnnnnnnnnnnnnnnnnnnnnnnnnnnnnnnnnnnnnnnnnnnnnnnnnnnnnnnnnnnnnnnnnnnnnnnnnnnnnnnnnnnnnnnnnnnnnnnnnnnnnnnnnnncctcatcaaaaagtgggcaaaggacatgaacagacacttctcaaaagaagacatttatgcagccaaaaaacacatgaaaaaatgctcaccatcactggccatcagagaaatgcaaatcaaaaccataatgagataccatctcacaccagttagaatggcaatcattaaaaagtcaggaaacaacaggtgctggagaggatgtggagaaataggaacacttttacactgttggtaggactataaactagttcaaccattgtggaagtcagtgtggcgattcctcagggatctagaactagaaataccatttgacccagccatcccattactgggtatatacccaaaggactataaatcatgctgctataaagacacatgcacacgtatgtttattgcggcattattcacaatagcaaagacttggaaccaacccaaatgtccaacaatgatagactggattaagaaaatgtggcacatatacaccatggaatactatgcagccataaaaaatgatgagttcacatcctttgtagggacatggatgaaattggaaatcatcattctcagtaaactatggcaagaacaaaaaaccaaacaccgcatgttctcactcataggtgggcattgaacaatgagaacacatggacacaggaaggggaacatcacactctggggactgttgtggggttggaggaggcagggagggatagcattgggagatatacctaatgctagatgacgagttagtggctgcagcgcaccagcatgacacatgcatacatatgtaactaacctgcacattgtgcacatgtaccctaaaacttaaagtataataataataaattaaaaaaaaaaaggatgagttcatgtcctttgtagggacatggatgaagctggaaacaatcattctgagcaaactgtcacaaggacagataaccaaacaccacatgttctcactcataggtgggaactgaacaaagagaacgcttggacacagggcagggaacatcacacaccagggcctgtcatggggtggggggatgggggagggatagcattaggagaaatacctaatgtaaatgatgatttaatagttgcagcacaccaacatggcacatgtatatacatatgtaacaaacctgcacgttgtgcacatgtacccgagaacttaaagcatcattttttaaaaaagggagaaaaaaaaaacaatactaggtagcaacaataaaatgtatgatccacccaaaattgggcagagaccctgaatagatatttctccaaaaagggcattaaacagcatggaagttcccttcccctggttaggtggctatgactggagggacagaggggacacgtgctgcagaggatggagaaaagtggcccctgtgcagtgggaatccagattttaaaaaaaaaattcaggtcatcgactcgtcggcactgtcatggcggtgtgctgaagaagaccactggccttgtgggattggctgtatgcaatactccacacgagaggctaagaatattgtacacaaggattcttgatgctcttgaggaaatccctaaaaatgcagcatatagaaagtatacagaagagattagaaatgagaagctggctatggttaaagcggaaccagaagttaaaaaattagaagaccaacttcaaggcagtcaattagaagaagtgattctttttttattttttwttttttgagacggagtctcgctctgtcgcccaggctggagtgcagtggcgggatctcggctcactgcaagctccgcctcccgggttcacgccattctcctgcctcagcctcccaagtagctgggactacaggcgcccgccactacacccggctaattttttgtatttttagtagagacggggtttcaccgttttagccgggatggtctcgatctcctgacctcgtgatccgcccgcctcggcctcccaaagtgctgggattacaggcgtgagccaccgcgcccggccgaagtgattctttaggctgaacatgaactaaatctggcaagaaaaatgagggagtggaaaccatgggagtcatcagtggaagagcctcctgctgatcagtggaaatggccaatgtaattattaagtgactttggtgtgttgatgggaaactgatgtaattaaatattctgttatattaagagcatgttcatattactgacattttataatcaagaaaagtgatatagaaaatatgtaggagactgttaaaattggtaattatggtaatatggtcatgtgaatccatttttgatttataaagtgttcacacaagttatttcaaagatgatatttctatgaacagagaggtcatgggaagatttgcaaattattaaagaaaaattcttcaatgcagagaccataatcaaaaagtaaagtttctttagtagtatggtcaatacatcatttaatttttcaagttatcctgaagaagaaaaggtccttaattatcatagtctaaacaaatttatagatcactgtttaaagtaaataatacgagtgaatattttcaaatgtgataaaatagcacaagtggctggtgataaaatttgacattatggttaacctccttagctgtgatcttatgtatgtaaagtaaaatttaaatatgtaattataggttgattacaaatccataatgtcattttattttattcattatttgaattataccatttactctgttttctcatagtcttaattttattatattttgttgttactgtattatatttgaaaaccttcaaattagaatacattgtacagttgaagaaattcacttggtacttaaaagaaagatttcccattgcatagaggttactggagaaacttttccttttgttgcatttgtggaaattagttttctggcccatggcctttaattttcttaatcaacctaattacatcaggatagaggtagagtttctgtaaaagaagagacattaagagttcctgaaatttatatctggcatatggataggcttatattcaaaatatcttagtcatacgactataagttcaaagtggaatcactaaatagtttgcagtacgtttctaatataagtgtaggtgggtatcaaaacaagacaaatgctgttcagggaaagaagttggcaagcttaatgttaaacaaaaataaaattacatgtgttttcgcctttaaaaaaaaaattcagcaggccaggtgcagtagttcacacctataatcccagcactttgggaagccaaggcgggaggactgctttgagttcaggagtttgagaccagcctgggtgccatggcaaaactccatctctacaacaaaataaaaaaaaaaattagctgggcatggtggcacaggcccagtcactcaggaggctgaggctggagaatcccttgattccaggaagtagaggttgcagtgagctgagatccaccactgcactccagcctggccaacagagccagaccctgtctcaaaaaaaataaaaatcagcaaactctggaggtggctgggattcttttccttccacctgaggcttggatgcagcacaatcaagcagggtgtggctccgacacccatcctgggccaggcttccccttcctcccacagacagtttccctctctctcaatctacataggagtttccctcagaaaaagtcctaaagcctaaaattctacagcctcctatgctgccaccctcaaaagccctaggggaatgaatactactgtaaaatacacactaaaatactaacagaaaaagaggaaaatgagtgagaacctgatgggaataacagaacattccacaaaatgaaagcttctatactcacaatgaagaaaaaacagctgaggagctgcgctgaggcgaaactgcaaggaagctccctcctcagcagtcagcacagtggataggagctgtctcttcccaagggcgcagtcccaagtcatcccaaagctgccgcagtgtcccgtccagcaagtcctgagggacctggagtgcttcactttctcctcactgtggacgccacacctgccacacggtgcctgcaggtagaacacccatgtgcaccattaagggcagaaaaggcagtttgaacgcccctgctggtcacagtgtgcaacgcaggatggttccacctcatggtcatggccccagtgctgtgaaattagaactggtgacatacatctgggaaataactgtcttgtaacaagactgttgtcatttaactaccagttttgttatcctgtaacttcttgtgggatgaagaaaattgtgttccaaagaaatgatgtttgccatattattggagatcagttgtaaaacaatgttggatacttcctacgaattaccagtggtttgctttgtgaagaggtttaaattcccatctctggtgcattttggaacaagtggctttgaggtcaacaccttgaaaggtagccctcaaaagaacaagagtcttcagttcccacacaaagtaaaaaatgtgaacttaattttagcattgttaatagggaacaactatccatgaatccctgcatcaaaatgcctatgttataacatcctctcttcctaaggcacaggagcaagtggtacatacttgtctggcaaccagtttcattaatgctgttgttgtatctgtccaaagatgagaagtagtttgttaccagtttcactaccttttggagttttagataacatatatccacactgtgatatttacactttttaatgactcccttttaaataaaattgccactttatgtgaaatccagttcatgcataataaagcttgcctgtacatatatggtgttgggcatacaccatacattcgtacataatgccagccatgccttaatcatgggataagaatggccagacacttcccacatttctgcgacagcaaattgagcgctcacacagggctcctggctggagaacaggtgagacccagacctgcccatgactctcctccctcagtggtccatcattcaattatttaggcacctctggggacagacaccaggctctctgaggcttcagatgccccagaaagcctgctctcctaaaaacagtggccttggatggagacattcttgctgcatttctccttaaatatactcaatttgtgtgtgtgtgtgtgtgtgtgtgtgtttgaatcaacacaattgtcccacagaaacttctaagggcctaataaatatgtgcatagaattttgatgggataattttttaactatataaaaagatataaataatatgtaattttaaaaaaatggtgcagtggctcatacctgtaatcccagcactttgggaggccaaagcaggtggatcacctgagtccaggaattcaagaccaccttgggcaacacggaggaactctgtctctacaaaaaaaaaaaatacaaaaactagctggccatagtagtgcgcacctgtagtcccagctgcttgggaggctgaggtgggaggatgacctgagccagggaggtcaaggttgcagtcagccgaaattgcaccactgcactccagcctagacaacagagacattgtatcaataaaaaataaagaaatgtctgacagataatccttcagcgtttttatctagtagttatctcagcactcccaggactgctgtgagcaatcaatgaaatctgtcacagcagagactctttggggtctcccagccaaggccatgtggagcacatagaggcaggatcagggaatctgagcatctgcctagggcctctccctgcttcctcaccctctgccatattcttctccacatctgactctgtgaagccacatcatctgtttcctgactccttttctaccagtgacaaactcccactctgctggtgtctgggccataaatctccaaatacagaattccctcaagccacatgtgtttccctgaattagaacacaaagtttcagcataactgtcatttatcccatcattctccagagctccccatctccccatccccaggatgctccccaagtctccacagccagccctctcctcattcctccatggagccctggcacaaaatactgacccatactgcccttcccagggcttagaggtgccaagttatgagccaagaccgccaggtgcaacaggaagctccactggagataagcttcccacctcttttgtattatctactgcgcaactcatattttattttatattttactatattttattattttatattttatcttttgagacaaggtctctgttgcccagcctggagcacagtggcatgatcacagctcactgcagcctccatctctttggctcaagcaatcctcctgcctcagcctcctgagtagctgggactacaggcatgcaccaccatgcttggctaatttatcttattttttgaaagacgggagtctcactatgttgctcaggctggccttgaactccttggctcaagtgatcttcccacgttagtctcacaaagtgttgggattagaggcataagccgccgtgcccagccggttgagagtttttatcatgaaggggtgttaagattttatcaaaagatttttctgcgtctattgagataatcatatggtttttgcttttaatctgtttatacagggaatcacacttaccgattgcagatgttgaaccaacatccctggaataaagtctatttgatcaaggtgaattagtttttcaatgtgctgctggattcagtttgctagtattttgttgaggatttcttcttctatgctcattgggatattggcctgaaattttttttctttgtcatgtctctgccagattttagtgttaggctgatgctcgtttcatagaatgaattaaggaggagtctctcctcctcgactttttagagtagtttcagaaaggctttgaattcagaatttggctttgaatccatcaggtccagggacttttttcattgctaggttttatattactgtttcaatcagggttcagtattggtctactcaaggttccaatctcttcctgatttaatcttaggagactgtatatttccaggaatgtatccatttcctccagattttctaatttgtttgtatagaattgttcatagtattctgagggtccctttcatctctgtaagaacagttgtaatgccatctttgtcatttccaattctacttatttggatctttaatccagctagcagtgcatcaatattgtttatttttctcagagaagcaactcttggtttcattaaccttttgtatagatttttgcatctcaatttcattaagttcttctctgattttaggtatttatgtgtttcttacaagctttggggttggttggttcttcggttcccaagttcttttaggtgcccagttaattgtcaatttgagatctttctgactttttgatgaaggcatttagaggtataaacttcctcttcacactgctttacttgtgtgaagagaaatcccagaaatctctggtaagctatgtgcctattttaattaatttcaaagtttttttatttctgccttaatttcaatgttcacccaggatttattcaggaacaagttgtttaatttccatgtatttgtgttgttttaagagatcttaactgctattggtttatatttttattgcactgtggtctcacagtgtgctttgtacaatttcagggtttttttaattatttattgagacttgctttatggctgagcatatggttcatcttaaaatacgttccacatacagataagaagaatgtgtattctgtggttgttgagtggaggattctgtagaagactattaggtctaattggtcaagttttgagtttaagtcccacatttctttgttaattttctgccttaatgatccgactaacgcttccgtggggaggtgaagtctcccactactattgtgtggttgtctatgtcattttgtaggacaagaaaaacttgtgctatgaatttgggtgcttcagtgttgggtgcacatatatttaggatagttaagtcttcttgttagcctttatcattatgtaatactgccttccttgtcctacctaattttattggtttaaagtctgttttatctgatataagaattgcaactcccggccgggcacggtggctcacacctgtaatcccagcactttgggaggccgaggtgggtggatcacttgaggtcaggagttcgaaaccagccttgccagcatggcaaaaccccatctctactaaaaatacaaaaattaactgggcgtggtggcacccacctatagtcccagctactcgagaggctgaggcagaagaatcgcttgaacctgggaggcagaggttgcagtgagccgagatcgcaccactgcactccagcctgggtggcagagcaagactctatctcaaaataaataaatgaataaataaataaataaagaattgcaacttctagtccagatgcagtcactaatgcctataatccaggcagtttgtgaggccaaggcaggtggattgtttgaactcaagagctggagaccagcctgggcaacatggcaaaacaccatctctacaaaaattagccaggcgtggtggcagatgcctatagtcccagctacttggaggctgaggtgggaggatcacttaagcctcagaggttgaggctgcagtgagccataatcacaacactacactcaagcctgggtaacagagaccctatctcaaaaaaaaaaaaaaaaaaaagaacagcgactcttacctggttgacatttctccacccctttactttgagcctgtggatactgttacatgtgagattaatctcttgatgatggttgggtcttgtctttatatctagctttatatctatcttgccactggatcaaagatttaagtgtaagactttaatagttaagtcttcttgttagcctttatcattatgtaataatgcccttccttgtcctacctaattttattggtttaaagtctgttttatctgatataagaattgcaactcccagccgggaaactctagaagaaaacctaggaaataccattcaggacatcagccttgggaaagaatttatgactagaggccgggcacggtggctcacacctgtaatcctagcactttgggagtgctgaggtgggcggatcacctgaggtcaggagttcgagaccagcctgaccaacatggtgaaaccgtctc

SEQ ID NO: 96616 - DNA, 12462 bp, Homo sapiens
gcctcccgggttcaagtgattctcctgcctcagcctcccaagtagctgggattacaggcgcccaccaccacgctcggctgattttttgtatttttagtagagatggggttttgccatgctggccaggctggtcttgaactcctgatctccggtgatccgcccgcctcagcctcccaaagtgctgggattgattacaggcgtgagccaccgcgcccggccatcattctcttttttgttttgttgtggttgttgttgtttgagacagcgtctggctttgtcacccaagctggagtgcagtggcgccatctcagctcactgcgacctctgcctcccgggttcaagcaattctcatacctcagcctcccgagtagctggaaccacaggcatgagccaccatgcccggctagttacagggttttcctatgctctccaggctggagtgcagtggcgcaatcatagttcactgcagtcttcaactcctgggctcaagcaatcctcccacctcagcctcttaaactgctgggattacaggtggtagccatcatgccctgccccagagaagtctttaggcttcagccaggcacggtggctcaggccggtaaacccagcactttgggaggctgaggtgggaggatcgcttgtgcccaggagttgaaggctgcaatcagctatgactgcaccacagcactccagtctgggcaacaaagtgagaccctgtctcaaaaaacaacaccgtaggcccagcacggtggctcctgcctgtaatcccagcactttgggaggccaaggcaggtggatcacttgaggtccagagttcaggaccagcatgaccaacatggtgaaaccccgtctctactaaaaatatacaaattagccaggtgtggtggcagacacctgtaatcccagctacttgggagactgagggaggataattgcttgaacccgggaggcggaggttgcagtgagccaagatcgcgccattgcactccagcctggttgacagagcaagaccctgtctcaaaaagaaaggaaaagaaaaagaatacaccagaaggtacccagagaggccagtgtggatgtacagccagcacataagatgctggttagggacaggtgcagtggctcacgcctgtaatcccagcactctgggaggcccaggcagggggatcacctgaggtcaggagttcaagaccagcctggccaacatggcgaaaccccgtctgtactagcaaatacaaaaattacttgggcgcggtggcacgtgctataatcccagctactccggaggctgagggtggaaaattgcttgaacccgggaggctgaggttgcagtgagccgagatcgcaccactgtactccagcctgggcaacaagagcgaaactccgtctcaaaaaattaaataaataggccgggcgcggtggctcacgcctgtaatcccagcactctgggaggccgaggagggcggatcacggggtcaggagatcaagaccatcctggccaacatggtgaaaccccgcctctactaaaaatacaaaaacttcgccctgtatggcggcacacggctgtattcccagctactcgggaggctgaggcaggagaacggcttgaacccgggaggcagaggctacagtgagccgggatcacaccgctgcactccggcctgggcagcaagagcaaaactctgtctcaaaaaacaaaaaacagaaaaacaaaaagaatcaagtaagtcgaagccacactgataacagccaatttttgtgaaccaagggagtgtcaattcaagaatttacatagatgtctacttttgctatctcctatgtgccaagcaagatacaggctctgggcaatcagaaacaaaagagactcactcgttcctctcacagtactcagtccttactgagataaggacaaaagaaaatgtcctgtctggaatgcagggaaaccagaacttcaggtcaggggacatttccattgaattgtgtggagttgaagctgaaaatacttttttttttttttttttttttatacatcacggcatggtttattacgtgatttttttactatacaaacaaaaaatacagaaatgcaatatgtgaatacagctaaatgcagaatggtgacttttttctcttcaagaggccatgattcccatttctagtaaaataaagagaccgcatacaggttggttgtgagattcacaattttgcctagaaatgatctataaatgcatttttcccccctgctacctaccgtaaatcgtaaaaagggagttaaagcaaagtttccttgttggttcctaccatatggaagatgctatattctattttagcagggtcaatatttggaaaatatctaaattaaatattattacaaaaatgaagctgtaatgagattctggctaaagagggcactaaatgagaataatatatatttaaagaatccaaaacaaacaaacaaaaagaggttattataaaaagctctaggtgcactgtaagcatatagggtttttttttcatgtgtttttttttaaacaatggaagtgtcaaaaatagggtcaactgtgttagactaaattacattattgtatatgctgcattgaatggaacctttgtattataattatcatagagaagcacagtttgcatcatattatggcaattcatcgtcaatgaaaaccttccagagtccttttattttggaatctcctgtaaactatcaaaccaccagaacatgattgtacaacagtaaaatgttctcttgcattaaactgaagagacctgtttaataaaaaaagaaaaagaaaatgtaggaaaggtacttagagctgttactttctaagtacacaacaccctagacaattcgaggcatcttaatctccatcaagaacaacaacaacaaaaataatttttgtcatgttgttaaatccatcattatggatcaaactggtgcaaattggtcaaatgaatccaacaaacactgatgtccaagctggcatattggcaactaatacacaactggtggtcaatagagagtttaaaagatcttccctttcttgttgttcttttccaaggttctcaaagagttctgttgctctaaaatacgttgttgagcttcccagtttgctttctcatcctcaaactgacgacgtttctcctctaattctttgtgccgtgctcccaaattctttttcagttgcacatggcactgctggagctaaatcacagcacaatatataccccaaggatactgccttcctctgaccctttttccattaacttcagtgataatatcactacccaccacagcaagaggtaaacggtcctttatctttttaacacgtttcttttcttcttcatcatctgtttctggaaattcatatattttaattttatgttcttggatttctttcattatctgttttgtaaactgttgacattcctctggtgtgagtgtgtctgctttggcagtaagtgggatgatattcactttttcatgcaaatgtttcataaactcaacatccagtggtttaagtctcaacaaaaggcaatgtcaagtagttacaaacatgcactacccaatcctgcctgaaggtgggagtcttcagttatgtaatggtcctgttatcaggcatctgacgtctgctcactcgcgattctgcatttaggtagtcctcaaattcactatcaatgtaatcgataacaggctgccagcaattactactatccactgcatctccaaatcctgaggtatcaactatcctgagcagcaactaaacaccaccttctttgattaaaactttggattgttccatccaggcttctattttcccatagaggtccaaaaaacgcccttgtttgttaagttgatatatgtaaaccttttctccaggctgttccttgaggtttacataattgggaactccttcaagcatctgtaaataaaccttttcagctgtagatctctctattttcagttaatttgcagaccaccaactatagcagccaagttgaaagagaaaaaagtttctcttcccagcactttctttaggatgcttttcattgcttcccaactggaggcctcgcccctccacccacctgccctagtcctcagctgcctccagttctgtccacttaaatacagactcccggtagtagagaacttttttaaaattttattattattattattattattattgacacagtcttactctgtcatccaggctggagagcagtggcacaatctcagctcactgcagcctctgcctcctgggttccagcgattctcctgcctcagcctcctgagtagctgggattacagacacccgccaccatgcccggctaatttttgtatttttggtagagacgcgggtttcaccatgttggccaggctggtcttgaactcctaacctcaggtgatcctcctacctcggcctcccaaagtgctgggattacaggcgacagccaatgtgtgcacagcccaggtattaaggaattcaatctctatttctcaccaatgaattaggctctggaagttagtagattttaacaaatacttgttaaactaagttcttctcaaaggtctttaggaatattcagtaaaagaggactctgtaaactgaaaaccagttctgttccagtaaatcctcaacagatggagaaaatgagactatgccccaccccttccccttagggcctccacattgattagaggaggaattctccttttaatgactgactgagctatcactcctctctgtcagtaaaaacagcagcaaaaaaaatgtcttggctgggcgcagtggcacatgcctgtcatcccagctctttgggaggccgaggtgggcagatcacctgaggtcaggagtttgagaccagcctggccaaaaccccgtctctactaaagatacaaaaattagccgggcatggtggcaagtgcctattgttgtacctgagcgagttagaaaaacgccacactttgagacgaattaagagtcctttattagccagcgcctgagagacggctaaggcttaaaattctctcagcccggaggaaggggcttgattaacttttataccttggtttaggaaggggggggcgtctagttaaaacaattttacagaagttaagtaatcaaaaagttaaaaggataagtggttacaggaaagtaaaacagttccaggtgcaggggctttaagactattacaaggtgatagacgcggggctttgggcgttatcaatcagacgaattcttggggactgcagatatagcttgccacagtatcttatcagttaattgcattcttggatgtgctggaagtcagcttgcacaagttaagtccttgaggaagggactgccagtgaaagagccaagatggaatctgtctggctttcttagcttagggagagtcagttcaggtggaaacaaggctaggtgattaaaggaaagggagagtctaaaaacagggttagtaaaaaccaggttgggtattacactataatcccggctgcttgggaggctgaggcgggagaattgcttgaacctggaagatggtggttgcagtgagccgaggtcgtgccactgcactccagcctgggtgacagagcgagactctgtctcaaaaaaaaaacaaatttcttggccaggcgctgtggctcatgcctataatcctagcactttgggaggcccaggccggcagatcgcttgaggtcaggagttcgaaaccactgtggccaacatggtgaaaccctgtctctactaaaaatacgaaaaagttagctaggcgtggtggcagacgcctgtaatcccaggtcctcgggaggctgaggcaggagaatcgcttggacccggcaggtggaggatgcagtgagcagagatcgcactacttactgccctccggcctgggcgacagagtgagactctaacaacaacaaaaaaaaaaagaaaaagaaaaagtaaaagaaaattctgacatcaagctcattgaaatgtattcttccctttcctcagctgctgccaaggtgctcggtccttccgaggaagctaaggccgcgttgcagtgaggccctcacttcatcccgcgactagcaccacgtccggcagtgccagccccacactcgcccgcgccatggcctctgtctccgagctcgcctgcatctactaggcgctcattctgcacgacgatgaggtgaccgtcacggaggataagatcaatgctctcattaaagcagctggtgtaaatgttgaacctttttgacctggcttgtttgcaaaggcctggtcaatgtcaacatcgggagcctcatctgcagtgtagaggctggtggagctgctccarctgaggagaagaaagtggaagcaaagaaagaagaatccgaggacgctgatgatgacatgmgctttggtctttttcactgaacctctttttataaagtgttcaataaaaagctgaacttcaattaaaaaaaaaaagaaataaatgtattctttgcatctggcatagtgtgcccagcgcgtgtgatcccagctatgcaggaggatcatttgagtccaggagttccagtccagcctgggttaacaggtagaaccccttctctggaaagaaaaaaatgtaaaaaggcattctttgtgtattatttttttgaaacagggtctccctctataccccagactggagtgccttggtatcatcacagcttactacagccttgacctcctgggcccaagcagtcctcccacctcagtccccggagtagctgggaccacaggtatgcaccaccatgcccggctaattttttatttattattctctttctcttttctttttttttgagatggagttttgctcttgttgcccaggctggagtgtaatggcgtgatctttgctcactgcaacctccacttgctgggttcaagtgattctcctgcctcagcctcccgagtagctgggattacaggcacctgccaccgtgcccagctaatttttgtatttttagtagagacggggttccaccatgttggccaggctggtcttgaactcctgaccacaggtgatccacccgcctcagcctcccaaagtgctaggattataggagtgagacaccatccccagcctaaataattcttttttttttttgagacagagtcctgctctgtcgcccaggctggagtgcagtggccctatcttggctcactgcaacctctgcctcctgggttcaagcgattctcctgcctcagcctcccaggtagctgggattacaggcgtctgccaccgtgcccggctaatttttatatttttagtagagacagggtttcaccatcttggccaggctggtctcgaactcctgacctagtgattcacctgcctcggcctcccaaggtgctgggattgcagtgtgagccaccacgcccggccatatatttttatatatatgtatatatgtgtgtgtgtctgtatgtgtgtgtgtgtatatatatatatatatatattttttttttttttttttttttttctaaagatgaggtctccccatattgcccatgctggtctcaaactcctggcctcaagccatcctcccaccacggcctccaaaagtgctgggattacagatgtgatccgctgcatagggccaaaaaaccccaccttcttttgggggttaataggcacctgaagccaataataataaaataataaaaataaaaaagaaaccaataataataggtcgggcatggttgctcatgcctgtaatcccagcactctgggaggctgaggcagggggatcacctgagatcgggagttcgagaccagcctgaccaacatggagaaacctcatctctactaaaaatacaaaaaagttagctgggtgtgatggcgcatgcctgtaatcccagctactcgggaggctgaggcaggagaatcgcttgaacctgggaggtggaggttgcggtgagccgagatcgcgccactgcactccagcctgggcgacaggagtgaaactccatctcaataaataaataaataaataaataaataaataaatgggcacctgaaatctctttttccgaagttgcgaattatccaattcatgccttagaatttagtcacatttccaggcctgtcccctgacttccgtttccatttcctcagtgatgtcccccaacctctctgcagatccaagcctcttcattgaggccattttacacatcagcaccatccaacagaactttttttttttttttttttgagacggagtcttgctctgttgccaggctggagtgctgtggcgcaatctcggctcactgcaacctctgactccctggttcaagcgattctcctgcctcagtctcctaagtagctgggattacaggcacatgccaccatgcccagctaatttttgtatttttagtagagacggggtttcgctatgttggccaggatggtctcaaactcctgaccttatgatccgcctgccttggcctcccaaagtgctgggattacaggtgtgagacatcgtgcccggcccatccaacagaactttatatgcaaggatgcacctgttctgtacctgcactattcaatatagtcctgatgtgggccaggtgcggtggctcatgcctgtaatcccagcactttgggaggctgagctgggcaggtcacttgagcccaggagtttgagaccagcctgggcaatatggtgaaaccccatctctacaaaaaatactaaaattatctggacatgatggtgggtgtgtgtagtcccagctattcaggaggctggaggtgggagaatctcttgagcccaggaggtcaaagctactgtgagccgtgatagtgccactgcattccagccagggtgacagagtgagaccctgttttaaaatatatatatatttatattttatatattattatatgtaatataaaaatatatatttatttatcctaacctccgaaagtgctgggattaccgtcatgagcccccaagtccagcctaattttatttttattttacatttatttatttatttacttatttatttattttttgagacagagtgtcgctcaggctagagtgtagtggcacaatctcggctcactggaacctccatctcccaggttcaagcaattctcctgcctcagcctcccgagtagctgagattacaggcacacaccaccgcgcccggctaatttttgtatttctactagagatggggttctaccatgttgtccaggctggtctccaactcctgacctcaagtgatcctccccctcagcctcccaaagtgccaggattacaggcatgaaccactgcacctggcatatttatttattttcttagaaagagtctcactctgtcacccaggctaaactgcagtggcttgatctcagctcactgcaacctccgcctccctgggtcaagcgattctcatcctcagcctccccagtagctgggattacaggctcctgccaccatgtctggctaatttttgtatctttagtagggcgggttcaccatgttggtcaggctggtctcgaactcctgacctcaagtgatctgcctgccttggcctccgaaagtcctgggattacagccgtgagccactgggcctcaccttttttttatttttctttttcagacagagtctcactcggtcgcccaggctggagtgcagtggcctgatcttggcttactgtaacctctgcctcctgggttcaagcgattctcctgcctcagcctcccaagtagctgggattacaggctcctgccactacgtccaggtaatttttttttgtacttttagtagaaacggggtttcaccatattggccaggctggtctcaaactcctgtcctcaaatgatctgcccgctttggcctccaaatgtgctgggattacaggtgtgagccaccgtgcccagccctgtccacattttctaacaagcactctatcagccataactcttgagcatggaacccaaatataaattgtatggctctgagtgtctggcaaggcaggctctagaagaaggcagctggaagatggtgttcttgaccactgcagggttcagccactttagagataattgatagttccagtgaggacttattcaatagaaatataaaaagcaggccaagtgcagtggctcaagtctataatcccagcactttgggaggctgaggcggaggatcgcttgagctcaggagttcaaaacttgcctgggctatgtagcgagaccctttctctacaaaaaataagaaaattaggcatggtggagtgcacctgaggtcccagttgctcagggggctgaggtgggagaatcacttgagcccaggagattgaggctgcagagagctgtgacagcgtcactgtactctagcccgggcaacagagcaagactcaaaatgaagaaacagattttggctgtgcgtggagcctcatgcctgtaatcccagcactttgggaggccaaagtgggtggatcatgggtggtcaggagttcaagaccagcctggctaacatggcaaaatcccatctctactaaaaatacaaaaggtagctggacatggtgctgggtgccttaatcccagctacttgggaggctgagccaggagaatctcttgaacctgggaggcggagtttgcagtgaacccagatagcaccactggactccagcctgagcgacagagagtgagactccacctcaaaaaaaaaaaaaaaaaaagctggccccgagcacggtggctcactcctgtaatcccagcactttgggaggccgaggtgggcagattgcctgaggtcaagggttcgagaccagcctgaccaacatggagaaacccccctactaaaaatacaaaaattagctgggtgtggtggcgtgtgcctgtaatcccaactactcgggaggctgaggcaggagaatcgcttgaacccgggaggcggaggttgcagagagccgagatcccgccattgcactccagccggcaacagagagaaactccgtctcaacaaaaaaaaaaaaaaaaaagaaaagaaacaaatttggagcatataccttgacagactcccccccttgaccaaactttacacaggctgtcctgagccctcctgactaggcctgggccttggctgctatcttatctttgaccttaccagcccactcttagcagagattcctgctgagttatctcttgactcttcccatctaactgcccctgatatctgatgaagtgcctcatccaccacctttgatgtaggaggccttggcccacctttagcaagaatcccgttaggccagttgaagcagaaatcctctgtccagggtgcctcctttgtaattttccatccatgaacccatctctctgttctttggctaaatcccatttttgcttcttctttttttttttttttttttgagacggagtctcgctctgtagcccaggctggagtgcagtggcgcgatctcggctcactgtaacctccgcctctccaggtttaagcaattctctgcctcagcctccagagcagctgggattacaggcgcgtgccaccatgccccgggaatttttttgtatttttagtagagacggggtttctccatcttggccaggctggtctcgaactcccaaccctgtgatccacccacctcggcctcacaaagtgctgggattacaggcgtgagccaccgcgtccggtcttttttttttgagacaagctggagtgcaatggcatgttctcaactcactgcaactttcgcctcccaggttcaagcgattctcctgcctcagcctctcgaatagctgggattacaggtgctcgccaccacacatggctaaattttgtatttttggtagagacggggtttcgccatgttggccatgctggtcttgaactcctgacctcaagcgatctgcccacctcagcctcctaaagtgctgggattacaggcttgagccaccgcagcctttgtccactccttgcctcgatactgaggtcagcaaacattttctctaaagagctagatagtaaatggtttaggttttgtgggtcacgtggtctctgtcacaatttctcaactctgcaattactatagcaagaaagtggccatagggtcaggctctggctctcctgcaattcccacgctttgggaggcccatgcatgaggatcacttgagcccaggagtttgagaccagcctgggtagcatggcaaaaacccatatctactacaattgcaaaaaattagccaagtgtggtggcacaagcctgtagtcccagctactagggaggctgagacggggttgcttgagcccagaagttcaaggttacagtgagccatgatccagccactgcactccagcctgggctacagaggaaaactctggctctttatgaaataaaaatgaataaatagggtgaggggctaggggagggaaaacattaggagaaatgcctaatgtaggtgac

SEQ ID NO: 96617 - DNA, 14704 bp, Homo sapiens
tcctcccacagcactcagtgctgaatgaatgattgaagggatggatgggtggatgaattttttctgtaactttaaaaaaagttcttgaaaaataagtttcttatgttttaacagtgacaaccatgagtggaaaaaactaattatggttcagcactggcctgagacagtatgcgaggtgagtgtttctgccttgacgggccctggggcctggggagccctgtgaagaggggtttgtgtgcacgtgcccgtccagggcacccacgctgctggtgcgggaggtaggcatcgctctggcgggtgggcggtgtctcctgcagagactgcctccaggagggctgtgtgtgagcttcccagggctgctgtaacaaaagtgccacaagctgggtggctgagagcctcaggaatttattctcacggtcctggaaggggaagtttcaacctaggggtcagaagggttggttcctcctggaaggctctgagagagtttgttctgtttctctgctagcttctagtaaggacccgtggtcctctgcgttcctgggctgacccatcaccccaatctctgccttctccttcacggtgtgttctccactttgtgtctctctgtctcttctgatgaggacaccagtaattggatttagggcccaccctaatctggtatcaccttttcttgatgacatctgcaaagaccctgtgtccatgtagggtcatgttcacagatgggaggaggggttaggacagggatatatcttctgggaggacacggttcaacccacagcaagcctcagtttgtctcctccctctgtgggcggcaagccacccaggtgccaaggcaagagaccgagggcataagctgttccagtataataaagaaaatatataaaatgagaacagttatactagaaatagattatagatatgatgatatatgaatattattaatcatcagtttgtagcattgctctttattccaatattataataatccttgctctacaattacagcctaggaaaaaccaggccatacagagataggagctgaaggggcacggtgagaagtgaccagaagacaagtgtgagcctctgtcacgcccggacagggccactagagggctctttggtctagtggtaacaccagtgcctgggaaggcaaccattacttagctgacctcggtctagtggtagcgtcagtgcctagggaaggcacccgttactcagcagactgggaaagggagttagagcagactctgcttcaccatacctcttgtggataggcctcatatcagtcaggcctgcccacagccatctggaggcctaaccatctccccgtgatgctgtgcttcagcagtcacactgctgtttcactttcatgttccacccagtacacctggctctgccttctagatagcagtagcagaattagtgaaagtactaaaagtctttgaaatgcatagaagaaataatggcgtaagctggcctctctctctctccgcctccgctgccatacagggaagggccctctgtccagtggacacgtgactcacgtgaccttatcagtcattggagatgactcacactccttaccctgccccttttgccttgtatccaataaacaacagtgcagccaggcattcggggccactactggtctccgcgtcttggtggtagtggtcccctgggcccagctgtcttttcttctgtctctttgtcttgtgtctttatttctacaatctctcgtctccacacgaggagaaaaacccacagtccctgtagggctggtccctacatccctccatgtattggacattttattaacatgtcctgtgagtgaagaggacccaagagcttccctgcctcctttgctgtgcttggcacccatggcactcacggccctccgggctggcccctcatcatctggctgcgttttgctccatgcccacatcccttcagtgcgtcagtgtccaggcccttctcattggagcacccagagccaggacactgcctggatctgcacctcagggcgtaccctgctcggtgtgtcaagctgaccctggtgtgcattgcacacttctcaagtgtttgaccgtgttgctgagctagcaccacattctgtcaggagcacgcaggctttatgttttgcctctagcactgagtggtagtgactttcgcttctacttcctcactgatttttctgatgacaaacgaaaatgaaattttgcttatctggctcaaattatgctcttgctcacttctgtacacgagattgccccgttttcagttttgcagacttaatgttgcgctcctgctgctgtttccttgccttgggttggggcagtggacagaaggagccggaagctgcctggcatcaactttcaattgttgggagtgtagctggcattctgagatagggagggattgctggagtccttggttcctacggaagaaggaccgtggaggaggagctggaacttaagcactgtctttgacccacactgaaggatctgcctccagggcctgagaccaggctgctctgcattcagggaggcatttacatgacaaaacgtgggtgtgtccctgcacactgaatgtaaatatgggtggaggcacatctttgccttgaggctttagaaacaagatttaaaaaaaaatctgtagcaaaatgtccttgttaaggagtgtatttcctactgggcagccatggtgaagggttctgtttgagcccaggtgtcctcctaggcagtgagggctgtccctggtgccccctctgatgagatgcttgtgtcaaagatgctcagtctgcctgtcgggttctcagtgttctgggctctcccacagctccatgcaggcaggcctgggaactgagtgctgtgcagagccctcagagccccgtgtggtgcaggctttgctctctgcattgcctccaggaaaggagcccagcttctggctttgaactgggttccctgagggatagagttgagtggcagaggtgaagttacaggttttggcctctgaccctctttctccagcactgagcagtaaggactttctgttctacttcctcaactgatttttctgttgacaaatgaaaatgcagtttcacttatctggctcagattatgcccttgatcatttctttctttttttttttttttttttttttttgagatggagtcttgctctatcacccaggctggagtgcagtggcgcgatctcggctcactgcaagctctgcctcccgggttcaagctattctcctgcctcagcctcctgaggagctggaactgtaggagcccaccaccacacctggctaatttttgtatttttagtagagacagggtttcacaggttggccaggatggtctcgatctcctgacctcatgatctgcccacctccgcctcccaaagtgctgagattacaggcgtgagccactgtgcccagccttttttttttttttttttttttggagacacggtttttttcttgtcacctaggctggagtgcaatggcatgatctcggctcactgagttcaagcaattctcctgcctcagcctcctgagtagtagtgactattagcgcctgccaccacgcccagctaattttgtatttttagtagagatggggtttcaccaggttggccaggctggtctggaactcctgacctcaggtgatctacccgccttggcctcccaaagtgctgggattacaggcattagtcactgcgcctggcccataaaaacacctgtttctgttaagtcaaatatttgaggaatggcttaacaaaaatggctgtttctgttaagtcagttgtttgacgtttggcttagaacatccagccctagtgtagcttcctcatggatgtgttgttgtaagcaatgtattgtgaagtagccctggctttagcttgtgttattagtgcagtacctgtatctcgttggcatatgttgcaactagctgctaaatgtattttaatagggttcctaagtgtatttgaataaacaaagagccaatcattttcttgttatattttctccctagaaaattcaaaacgactgtagagaccctccggattactggacaatacatggactatggcaagtgtctcacacaattaaatcttaggcagaagaggcttgctgactgggaaccctagcttgaatgtggtcttaatatttattcttgttttttatttttaggagtttatccaatagactagattcttatttaaaaatatctttagtctttctagcagaaccctgattctcttgttctttaattctgtcttcatagaacaataacactttttttttttttttctgagacagagtcttactctgttgcctaggctgaagtgcagtggcacgatcttggctcactgcaacctccacctcccaggttcaagtgattctcctgctccagcctcccaagtagctggaattgcaggcacgccccaccacacccggctattttttgtatttttagtagagacaggatttcaccatgtttgtcaggctggtctcgacctcctgacctcaggtgatccatccaccttggcctcccaaagtgctgggattacaggtgtgagccactgtgcccagccaataacactttttaaaatagtgtttacagattctcggtacatgtcagggtcactacattttaattttctcattttgttcttctcttggggtttattataaataactacatgaaaatacataaatgcacgtctcgtacacatttcagagacactcaaatttattattctggttttgtctgcgttttgttcagttaattcttttctatgtaacatggacatacttgtgacgctgaactgtgcacatcaatcgccccatctgaaggacccgttttgtcccactgcctcgatgccgggattgaaaagggcccttttagcttaattggtgcctcctggctccttaggaagagggattggtggaaaacaagttaaactgggatgtaggtacttggcttcgggtttcactttcttctctgtctggtcagataaccttgacctcctgtctctggggctcctggctttgctagactttgcgtggtgtcctctcccctgctgtgaccaagtgctctgaatgtacctctgcccatcatggccgtttcatttctgaggctggaatgaagctttgcaatgctgtccagtccagcggatagaatcaggcaggtttcacatgctggtccagctgttgaccctgaagacactctcctccctggcctctttggggctctgaggggtcggggtcttaggaagttagtgaccttgtggagtaagcagcactcaagagtcagagttgataagtccagaattagatgtgtgaggatggagttaaagttctagacagtgtaagtgcgtttgctactgaaaatgaaatgaaaatcctactagctgatcttctgccatacgccaggcactttctgacatgttttatctgtcatctcctggagtcctcctcaccattgaaaggaacagactctcgctgttctcatgctggatctgtggtgcggagattggccgggggtcagcttacttaggtctcggtgctagggagcagcagaggttgccgtcaacccagccggggctgaccccagagtccccgctcctcggtgctactaggctatccattgcacttcctttactaagcagtggcctgtctgcattactcctggacggtttaacacaatttcttttcccttctaaagaaatttgaactctgactcctcttacctgcatcttctttcttaagcatcctgcctgggataaggaattcccaattagaatttctctttttattctttgcagacttcaatgaaagtgttttctaaggtcatgtagaagccaccccaaccaagcctaatatttcttattttctcttttaaatttgaatttccaggcccgataaaagtgaaggatgtaatagatcgtggcccttcaatttagaagagattaaggtattgacttttaattatatttctactgcagagtgttgacctagattaactcttttcttcacaagygtaccttcaaagtcatctttaaaattaaggggtcatgaatgtattcaccaggattgagcccttgctgctgttttagtaartatwgttatctcgaccccacaaattacaccaattgaccttttccctctcctcccctcccctgccctgtgcccaagccactgcatgaggggcctgagcgaggggctccgaccggagcaarccctgacactcccccatgccagacctgtgcagatcctgacgctcgcccgccagccccgcctcgtcccaggccccaggacttctgggtcagatgaccgacgtgggaatctggtcggtgtgccatatcgccaggcatctccagacagctgaggctcagagagcacaggcctggggccgtcctatctggtggatgggtttctgagcaggtggacatgctgggcctttccagtacaagagcttgattaaagaaaactcacagggcgggaatttattagagatactagcagaggcgttcctttgagatacccgtaccttatatgtcatacggagtcttcactcacacacacrccctcatctttccttaggggtgccaacagttcctgtgtgtaaccagtatataccagggtaactggacctggaccccagggagggggtggtaactgaggccttctttaaaacgtgtggtagcattgaaggcttgcgggagttgtgggtctttcctaggaatggtacattccccaaggtcattagttgcaaatccatcacaagttctttttttcytttcttttctttttttttttttttttgagacagagttttgctcttgttgcccaggctggagtgcagtggcgcaatcttggctcactgcaacctccacctcccgggttcaagcaattctcctgcctcagcctcctgagtagctgggattacaggcatgcgccaccatgcccggcttattttgtatttttagtagacatggggtttccccatgttggtcagactggtctcraactcctgacctcaggtgatccacctgcctcggcctcccaaagtgctgggattacaggtgggagccaccgcgcccagcccacaagttctaatccatatggaattgttttctttttcctccccgtgaagaccttcagtgggatgagccaagaggctggggactgccgtgagacttagaagggacaccccagagcctggtgctgtctctagctcctcacacagactctcctcctctcctccgggactcactgcagggaatggtttctggggaggcgtgatgaagaggccacttcaggatacattgagtttgaagtgcccttgagacctccagggggtgacatagaggatcttcagggtcagaggaaaggtggctttaggcatagttagcatgaggatggtgaatcaaaatgacaggtgtggggatggacatgggtctgtggacatggatgggtgaggagtcagggccgacaggtgtggacgtgggtggatgagggggcagggctgacaggtgtggacgtggatgggtgagggcagggctgacaggtgtggaygtgggtgggtgagggcagggctgacagatgtggacgtgggtgggtgagggcagggctgacaggtgtggacgtgggtgggtgagggcagggctgacaggtgtggacgtgggtgggtgagggcagggctgacargtgtggacgtgggtgggtgagggggcagggctgacggatgtgggtgggctaaggggacagcgctgacaggtgtgggcctggtrggcagaggggacagtgctggtggagccccgtgttaacagccaggtggaaaggggcatgtgtgcctgcagctgggaaaggcggaaacccaggagtgkagagatttgagaagaggcaccrtaggactgcatatccccggggggtccaggacaggaaagctgaaatgctttttgagtgggggcgtgggtgggtcgtgggtctgtggtggtgtgagccgctgctcctcagagtrgtcctggcttccttgttgtgtagcagtaggaacacctttgcattgtcccaaasggaagtagcccaatttgcacactcaatcatatcgtgccctaggacatctcggagagctgatggggctgaagccagcatggtggggcaggagaggtggggtggggggctggaggggaagaggagggggacagagctgcgcccacacaggcaggggctgtggggtaggggctgagttacaaatgggctgagaaaaggaccctcatatagggtgctggaaaacaggagaaagggaaggaaagtgaagttatccgaagtttgttaagcacctttttactgacctttttggggtttttttggtgtagagggtgtgtagaaatagaaaagtaaactccagttctgttggatttagcgcgactggtgcccaggctgcccagctcacacaagctcttctctgggaaaaggagagcttgtcctttgtttgtttgtttgttttaactgatggtttygttttgtttttttttaagatggagtctcactctgtcgccaggctggagtgcagtggcgcaatctcggctcactgcaacctccgactccctggttcaagcgattctcctgcctcagcctccygagtagctgggattacaggcatgtggcaccgtgcccagctaatttttgtatttttagtagagacagggtttcaccaggttggccaggatggtctcgatctcctgacctcgtgatccgcccgcatcggcctccgaaagtgctgggattacaggcgtgagccaccgtgcccggccaatgtttttagaacagttataggtttacagaaaaattggatggagattacagacagttcactcccttccccctcaactctcccaatcattaacatcttctatagtgtgttacatttgttacaattaatgaactgatactgatactttattattaaataaagtttagcattaacattagggtttactcctgtgttgtgcggctttggacaaatgcaggagagcaagtcccacccagtgtgctctggagcagccgctggccctaaaccccctgagccatacctccccttcttcctccccttgaacccccaagcaaccgcgaatctcattcctgtctcttaagactaccttttccaaattgtcacgtcgttggaatcatacagtatgtagcctctgcagactggcttcttgcacttagcaatgtatgtttgcagttcctccagtgtcttttcatgactcgacggctcattggtttttgttgctgaaaatattccattgtttggatgtacactttatcccttcacctataacagcttgtattttcgtgtgcagttttatgattactcaaattgcacttgtagatatatcttaacaaacacttcatacaaaataagcataggattattttattcaccaaagtattgttaattagcagagctcaattctttggtgtcagtttatcaaatttaccttctaggttttgagtttattattaagaacctgcgtagacttattttattttttaatgcataggatcttttgccagaaatgagggcatactggcctgacgtaattcactcgtttcccaatcgcagccgcttctggtaagtcccagcctctgattgctgtcttgattactgtctgagcgggtgtggggagcgtgatgaatcgctagaagtggaaactgtgtgggaagcaagataacagaatctgtcttctggggctgagcagtttgaacaaccttttatgagatatgattctgttacggcatttttggtgcctttctccaatgtataaaaaattgaaagcaagtggaatttaccatataagcctgttttctaacctgtatggtatttattactttgctttaaaacttttctcggccagtcacaatggctcgtgcctgtaatcctagcactttgggaggctgaggcgggtggattgcttgagctgaggagtttgagaccagcctggtaacatgacaaaatgccacctctaccaaaaatttaaaaggtcagctagatgtggtattgtgcggctgtggtcccgggagatcaaggttgcaatgagctgtgatcagctggggtgataactagcctaggtgacagggtgagaccctgtctcaaaaacaaaataaagatacaaattttctcttctgaggcttaacaaagtccaatgcttgcatatctaagaattagtccatatcagacaggagagaatatttcttaaggaaattgtgctcctgtcttcaaatacattaagaaaaaagagaccaggcacagtggttcacacctgtaatcccagcactttggaaggccaaggcaggtggatcacttgaggtcaggagttcgagaccagcctggccaacatggcaaaaccccatctctactaaaaatacaaaaattagctgggcatgatggcgtacgcttgtaatcccagctacttgggaggctgaggcaggagaatcaattgaattcaggggatggaggttgcagtgagccgagattgcaccactgtactccagcccgggcaacagggcaagattccatctcaaaaaaaaaaaaaaaaaaagaagatgtcttctaaaatgatgatctcatgcctatgacttagggaggagagaaagtgagacttagcatgtgaggctgagacctcagtcatagtgaagcacctttaagttcagcagaagctaagcctagggcataaacgccatgttgaattcaagatagcttttaaaatcctggcttttttaagaacataaagttaaattccttgtattaacattatattaactgaaggtaattattttctctatcccacttcaatattgcaatttataattcagattacaacccatcaaattttaggtgggaagattaacctagaaatatttttgtgtataattttcaggaaaattaaaagttaagtttagaagaaagcttttgaaaacaaaatgaaatggaagtgatgtccccctttctggttcatcggtgtggcagtgaagtggccttaggattcatggaccctcagtctgtgcgttgaatcacccttgaaaattcgggtggtgaatggttcaggtctcagtcacctgttctgcacagcctgtgttctagaaaattatttcaaaataatggccatgataagttggaatggaagaagataggaaaaaaaattatatgtcacttcacagtgtacttcagatgatgagtttatggtaactgagttatgtgaaagagaatttttccagttgttacaatgttccatgatagagtctgtcagattttagctaaatggcttaaaataaatcagcaaacatgcaaaggccttcagtgagctgggtcttgagcatttaatcaaaacagtgtgggcacagtatgcatttatttttgggctctgataaaggcaagatgacttactttaaattttcaggttgatagttgaattacacacttaaaaaactggttctaaatgaaaaagataaatctcacacacaaattaatatttatatttttgagtgctcctaaatacaaaatatcagctagggaggagctcctgtctgggctgtgtcacccagtcctgtgcctatcactcaagtcacctgactaactccatgggggttggcctctggcttctccacctctgctccttgggcaggggaaggtgtcacagcactgctgtggaatgtgtctttgggcataaccagccccgaggactggctgcctgttgtggccgagcgggctgggtgacagtgggtgggtgagcctgggacatccgctcctggctgcatctgctcttggtgggtgagtcagggtgtctctcagcacagagggcaacacgctgagtcacttcgcattggtgactgaccgttctgatgcttaaaaaaaaaaggtccagtccaaatgaagtgtgagtgaatgctgtgagctccatgaatatcaatctatttccaacatctgttgagttaagcttgctccaggaataatgatggctgacatttactgtttattgtgagccaggaactgttttcattcatgtggaagggctcagcacacctcatctcacctgcagaattacccctgttttatagaaactaagtcacctggaattcaggttacatttcaattagtttaaaataatctcctttttctaccttataggatataggaagttatcaggtaatttgctctggaaaggcttctagatgaagacagttactcatccactttcatcgttcctgttttcaacttttcatcattttctgagagttaaatcaataggaattatttaaaactagtattttggatgaattttgccagtgaattaatgcacatttagattgtgtttttaagactgcatataagtgctttataagtggttgcatgaatgttatttattaaaacttcatgaattcatcaccaataaagctgaggaaatctgattcccattttgtcttttcatgctaaagatgataaacatctgatgacacgccagtcattctgaaggtggctgtcaatctcgtcagcagttgattggatgacagcccagtgcagtgggaagggcgctgaccttggacttgagcgtggccttcaagggcaggctctgagtgaccttcagcaagtcccctggcccttctgggcttccattccctgtctgtaaactagcagtgatatttccgccttgcagagttttgagaaccaaacgaagaacgtgaaagatttttgtaaacctttaatctgcagtaaaatatcaggaatcattctcagtgaccacatttttctggaatacaaattgctgttcacgtgcagccctttagttataggctattcagttgttcttattgtcctctatgtagaatggatgcttaaactataatttgtagaagctgaaatggaaaatgggcctgaggtgtttcctggtaattagctgtcctgcctttccatggctggttgcttagaaatgacagtttgtgccactctgcgaaattccctgactgcaaagcacccactcactgcaggagaccacacgttgctttgtgaatcagtgggggttggggcagcagcatgttcttttttctcagctttgatttgttgttaattgagcaagctgtaattgtagacgtgaactgaaactgattatttaatcgtgggggattgaaataattgcctatgttgcaaataaggaattttatccttcctactttgtaaaagaaatgacatgcctaccacatgggaatagtctgtgctgagagaaaacatgcttgagcattttaattgggaatcagtttcattactttttttttgagatggagtttgtctcttgcccaggctatagtgcaatggcatgatcttggctcactgcaacctctgcctcccgggttcaagcgattctcctcctcagcctcctgagtagctgggatctcaggcacctgccaccacactcggctaatttttttgtatttttagtagagacagtttcaccatgttggtcaggctggtctcaaactcctgatctcaggtgatccacccccttcagcctcccaaagtgttgggattacaggcatgagccactgcacgcagcctgtttcactacttttaagtggagatttttcctaatcctcacaggaagcatgagtgggaaaagcatgggacctgcgccgcccaggtggatgcgctcaactcccagaagaagtactttggcagaagcctggaactctacagggagctggacctcaacaggtgggtgcgcccttcccccggctgcacttcccagtggggatctctgctgtcgcccaagcctgacagctggatccaggggagtgggtgtagacctcactgccctccagcagcttctgcatgtgcactattcggctactgggatcattcctgaggaatgttctgagcctaccaagcctttccagatcattctacatcacgatcacacagagtgggtgcagagtattgggatgcccatctgggcaccatctcatcatcagagtcggccatagggaaaacgaggactccaaccagcatgtgccgttctcagccatgattcctgataaaggatagtgcattaataagtcgtttccttagaaagacggaaactctggaagtctgtaggtctttgccgcagaactcctggaacaagcaggcaggaaagagatgtgggccagggttctttaagccccagaaatgaccccaacctgcctaaatcgtccctgcctgccctcacctctattcttgagaagtggaatacgttgtcccacttgagccagttgacttgtaaagcaaagtgccttctgagcgccacaccgagcccactcactgtccgaatctggttgctagagagccagggtgtgcccttacctctccgtcgggacgtttcagggtgtcagcgtcttagctgctctcactgaccttcatcataagaggtcataataaaccagtgaagtcgtgaaaaacatgacaggcaattgcacagcctctgtgttgctgcttttggaattcacgcagcttgttttagagcaattctccttcaaatcagaataataccaggagccttagctaatcagctgtatttaaggtttctgaatcaaaactgcttaaaagatgaataaacctccattgcttatctagacatgtgctttgcctcctcaacgtacaaaatc

SEQ ID NO: 96618 - DNA, 12889 bp, Homo sapiens
gcctcttggtgggagtgcggcagatgggtattggaaggaccaggggatctggctggctccgtccagctgcaagggaacccctctaccaccagcctgtgcccatcttgtcccagcaccaagaccagccctgtgtccaaactcaccctgccccttgggtgctggcttcttgcctgtggtttgtgcttcccctgtgagagccagcagctcagcctccaggtcctcatcatcttcagcctcatccatgcccagcagcrtgtcctcagggccaaactccataaagagccccatctgagagcagagcaggactcttaggaaccacacaacaagcagggtagggtccagctccagagccagacttggggctctccaagtcccaatcagtggctccttcagtctgtgaggcccaatgtgcagaaagaaactgaggcctgcaacattactccttgagacacttaccttcctagggactcaacaaaaaacccagtaagaccacactgaaactgagacagtcttgtgagtcagaatttaaaacacactaccattattacaaccaacagcaatagctgccatcatgcactgttcttagcgttctatgtgattatcttaaccacctcagttaattctcacaattctgagaagaaggtcctattttttggccaggcgcggtggctcacgcctgtaatcccagcactttgggaggccgaggcgggtggatcacgaggtcaggagatggagaccatcctggctaacacggtgaaaccccgtctctactaaaaaatgcaaaaaattagccgggcgcggtggcgggcgcctgtagtcccagctactcgggaggctgaggcaggagaatggcgtgaacccgggagatggagcttgcagtgagccaagatggcgccactgcactccagcctgggcgacacagcgagactccgtctcaaaaaaaaaaaaaaaaaagaaggtcctatttttttaaactctggtaaaacacatacaacatgaaatttaccatcttaaccactgttaagggtgagttcaatggcataaggacattcacaatatcctgctaccatcgccatcatccatccacagaactgttttcatgttgtgaaacaaactttctacccattaaacattaaccccccttcctcccctccttccagcctctggtaagcaccattcttctgtttccatgaatatgactactctaggtagaggtacatccttttttttttttttttctgagacagagtctggctctgtcgcccaggctagagtgcagtggcactatcttggctcactgcaacctctgcctcccgggtctaagcgattctcctgcctcagcctcccaagaagctgggaatacaggcacatgccaccacgcccagctaatttttgtatttttagtagagatggggtttcactatgttggccaggctggtctcaaactcctgacctcaggtgatccacccacctcggcctcccaaagtgctgggattacaggcgtgatccacggcacccagcttacattctgtttttatcccaatgttcagatgaaactgagacagtcttgtgagacaatcagaatttaaaacaagctctttgcgacttgagtctatgccctttaccccacctcctttcttacctgcctttttaaagacagtaaaaatggactaagaagtctcaagatgtaggcccagaagaaataaaggaagaaaattggagaggagacccccctgttcttccacttggggcacagccatctgtccctaggcagtgaagtcctcccactgactacagccctcatgccctggcatccctggctaacaagcaaagttgtgaccctatctaaggaacctttgagagcactgaggtcccatcagaacatcctaaactttggtgattcctgaaccctctccccacttgtatgtggaagagactagtaggagggtgtctaagggctctgccacctccaggaggcactgctccaagtctctgaactaatgggggaactacatgtgatccagtttgcctaagttgtctagggacccccatccccaaaccgacccagtagcctagaaggctaagttccatacytgcttggcagcggccaccccttggcctctggcctgagggcccttccgaggtcttggccctggcatcatggcagcctagatacctatggaagagttacagagattcaggctggagtagcccataagccacgcccccaacagtgctacccgtggtaaggtgtggatagtaaactcccaaagaaggcaatgctgaacaccaaagtatgggttacctttaattaaagcactgaagcagcacaggccatgggagggatggggatcacctgttaatgggtttactgaggaatgttctgaacggactcaaatttaaaaagcacattcagggaagtactctaggttcagggtgggtggaaggctgggtagaattcagaaaggctctaaagctgtgcttatggaagccacagctggctatttaattttaaatttcaatgaattaaaatgaaataaagctaaaaatccagtccatcagccacaacagacacattccaagtgcttaacagccatatgtggtgaggggctatgaccagacagcacacacacagaacattttcatcatccaaggacatgtcatcaaagttccatctcacagctgagctctggagaaagctggctcagcattctgattcccataaagatctcacagttattcacaggacctcctgtgtcagaccttgcgctgggcactgggagcgcagaaatgaacctaagacggtctcagccttcaatgaccatttacagggtggaggtggactacacggggttgccccaggggccatgggtgccctgaggtgaccccttcttcagccctgggagaaaaggctcctccttcgaggcggtgacgcctgagctgagtcacgcaaagaagttgggggaaagagggaaataggattccaagacgagggaacacttgacggctctgaagtggggagcagcttggcctgtacaatggaacctgaggcctggtatgactggggcataagcggtgaggcctgaatgcacaagccgaggtggaaatgtgagcaagcggcagaatatgaaaacctctaagccgaaaagcgtttgggcattattctgagggcgctgggaaagaagtggcgggatcgtatcggtgtttcagaaaccccattctggcaccaaaggggaggtgcacagaaggtagggggaaaaggcaggaagccggcgcatctcgccacagcgctggcggggagaccagctgacgggcgtggaggcggcggggagcgggcggaggagctggcgggcgctccgggggactctgagtgtcagatttcgggagtgactccggctcaggtgaaagcgaggccagacactccaaggctgcggccccgatgacacagccaggcctcacggaaggtgggcaacggagtccgtagggggaggcgacacgggacccccactcccgcgctgcgggacgcgccgccctgccccgcccgcgccgcctccatctacccccgcggtccccagaactccccacgccgaggggcggggacgcggcatacctcgcggtgaatccgagccaaaccccggccttgtctcacccggcaccgccctgggctcccgcgggccctgggccgcagcggtagcgacaggaagcgccagcaggggaggtggctcgcgcgcaacacgtgaccccactggccggcggccggcagtgcgcatgtgcacggctacgcgggcggggggctccaacaggtgacaccggggcggggttcgcagcgcgcaggcgcgttcgggtaggtagcgcaggacaggaactctgggcggttccgccggggcgtccaccggccggctccaatgaggtcgctgcgcccagccctcgcccacttgcagcctctccaccgaacctcctccctcactcagcccgaggcgctgggcgctcgctcgctcgctggacctaccccgcctccagccctcgccccgccccaccgagcaagagggcggggcctacccaagctccgccctggaagagagacaggggcggggctcacctgcttgtccatgtcctttaagcctggggaaatggaaatggggcccaccatatgtttcttaataattcagcacctgaaagtatccttttccggtccgttgaaaacttcagacaggcagagctcgctgcacatcttaaatactttacagagtctaacactaagttctcactcgcctaccctgctgtgcaatcaaatggcatggaggatattaaggagagaaacggagtatacccgttttctgccaagcttgtgtcagtcacttttcataatggagcttataccagttctcaatcctgcaagatggacatcatctctagaagaaacggaggctcagagagaattatttgcccagggaaatacaaaaccaacctctttagcatcagtaaatatgctctagtctagttttctaaggaaagcacgtttctccctgcggcttgcagagtccagttaacaagagattgagctcaggagtccgagaccagcctgggcaacatggcgaaaccctgtctctacaaaaaattacaaatattagccgggtgtggtggtgcgtgcctgtagtcctacctactgagaggccgaggcaggagaatcgctgtggccccggaggtccaagctgcaatgagctgtcaactgcactccaacccgggtgacaaggtgagaccctgtctcaaactaaaacaaacaaaaaaaccgagagcggagtaatggggaagtggccagattcccatctaaagtaaccacttcgattttggggggaaagagaacggcttaaaaggaaaatttgatatgggaagcatgcaagaattgtacagagtacaacgtctgtgtgtcttgttctggtggctatcttgggtcccagcctacctggagcgtgggctggtctcatctccacaatggccccgctgttgactagccaccttgaagtaatctttggaattttgcagctgtgtctccaggcttggtttgtctgtctcaagattagcccttggaacttctcagaaggcagataattaaatactagcatacagtaagataaatgtgaagggagtatatacagtgagaaagggagggatatggggtctattttacagctaagggaaaaggcttttgcagtttgcttcaaggttgtatcttgaaacccaagagaaaggaaaaaaagttttaaaatgtattttaaagttaaactgctggattagtttcttctgtctaaaacattgccatctcctctcctgcctatgccttgaacttttaaattatgttttctagttagcgatctcccagtttacttggacaaagggcttttccatctcctgattgcttactttttttcttttttttttttttgagacaggatctcattctgtcacccaggctagagtgcagtggtgcgatctccactcactgcaacctgcacctcccaggctcaagcaatcctctcacctcagcctcttgagtagctgggaccacaggcacgtgccaccatgcccagcatttttttttttttttttgtagaaacatgtttttgctatgtgcccaggctgatctcaaactcctgagctcaggggatcaacccacatcagcctcccaaagtgctgggattacaggcgtgagccaccatgccctgcccattaccatatttaaattgagatttcacatccatatttctcattccttttaaaattatttaaaaatttttataatgaaacatttaagatataaacaaagatacacaatatttaacatttactagaatgcaagctccagaaggagaaatttttttattgcttctccaagtgtctcgtgtctacagcagtgcatggtacatagtaggcactcaatagttccttgttgtgtgaattaactacatggacatctattaccagtttaagggaaaaaaaaaagcaggtgagcgggcgcgtccccgcgaccgcgctgcctccccgaggcggttcacgtaaagccagcgaggccctgcctgccagccgggaaggaggcgtggttatggagctggcggctgcaaccccggggcccgcgccgctgcctagcgcttcccgggggctctttggggacgcgccccccgccgcggctcggggacccgtagagcccggcgctgcgcggttggcccttctcccgcgccccgcgctcaccctcctgctcctcctcatggccgctgttatcaggtgcctggagcaggcctagaccaccgactggagggccaccctgaagaccatccggaacggcgttcataagatagacacgtacctgaacgccgccttggacctcctgggaggcgaggacggtctctgccagtataaatgcagtgacggatctaagcctttcccacgttatggttataaaccctccccaccgaatggatgtggctctccactgtttggcgttcatcttaacattggtatcccttccctgacaaagtgttgcaactaacacgacaggtgctatgagaactgtggcaaaagcaagaatgactgtgatgagaaattccagtattgcctctccaagatctgccgagaagtacagaaaacactaggactaacttagcatgttcaggcatgtgaaacaacaatggagctcttgtttgacagtgttatacatttaggttgtaaaccatatctggacagccaacgagccacatgcaggtgtcattatgaagaaaaaaccgatatttaaaggagatgctgacagctggtgacagatgaagacggaagaacataacctttgacaaataactaatgtttttacaacataaaactatctgatttttgtgaaaaaagaaaaacaaacatagttggagctacctgtacatctcccatattgcaacacctccctttcccaaagatgtacccattatcctaaatttagtgtttattattcctgagcatttctatttctgtgtaggtatccttaagcaatacatagtattttttttgccagcttttaaaaattatatcattggttacatacagtgtaattcttcaacctttttctactcaaccctgtttgtaagcttcactcaaattgacatgtatactgtatctagttagctgattttcatttctgttatgattccatagcatgaaaataagtcactttcccaatggcttaccattatagagtgctatgaactttttgtatatgactcttggtgtacgtatgtgaatttctctagagcatatacttaggaatggaattgctggctgcattagtcaggtttctctagaggaacagaactaataggatatatatatatatatatgtgtgtgtgtgtgtgtatatatatatgtgtgtgtgtgtgtatatatatgtgtgtatatatatatatgtgtatatatatatatagtcccacaataggctgtctgcatgctctattaaccatcacactggctgatatggtttggctctgtgttcccacccaaatctcatcttgaatagtaatcccataatccccatgtgtcctgggaggcatcttgtgggaggtaattgaatcatggtttccttcatgctgttcttgtgataggagtgagttctcacgagatctgatggttttataagcatctggcatttcccctgctggcactcattctctctcctgctgccctgtgaagaggtgcctttcaccatgattttaagtttcctgagggctccccagccatgtggaactgtgagtcaattaaacctcttttctttataaattacgcagtctcaggtatttcttcatagcgcgaggacagactaatacactggctcatacaatttcttgcatttcctaggctaagattcaccaaataatcttcaaaagtcattccacctccatcagcagggtattggggtcccagttgttctgtgtaaccatagaaaggttttctaatagatgtgaaatggttttggtttgcatgcctcttttactgtttccattttcttggtcattcgtgtttcttctttggatgacttatttgttatttacccatttttttctttttccttcttttttttttctgagacagtcttgctctgttgcccaggctggaatgcagtggcacaatcttggctcactgcaacctctgcctcctgggttcaagcaattcttttgcctcagcacccctgtagctgagattacaggtgcacaccatcacccctggctaatttttgtatttttagtagagatggggcttcaccatgttggccgagctggtctcgaattcctgacctcaggtgatctacctgccttggcctcccaaaatgctgggattacaggtatgaaccactgtgcctggctcattttttctttttcattgcagttttaaaaatattgatattgatcctcaatccattatatgtaattataaatacatatgtgaatatagaaatacatatttttgctaaatgatttgagaatgagttgcagacataatacatcacttataaatatttcattatgaatctcctaagaacagcattctcctacataatcacaaatttatcacgctcggggaatttaacacttacaaaatacttctgtctaatacatagttaataatgtttataattgtttatatttcctaaatccaggacccagtcaaggtttatatagtgcatttagctctcatgtctctattctcctttggtgtagaatagttcctccatgttttgtgttttttttcttgtgatattagtattttcaatgagttgaacagctgctttgcagagtttctccctaaatttagatttgtctgataattttctcatcagtaaatttaggacaagcatttctgacaggactagtacacgggtggggctgttttttttcagtacctcatattaggttttatttatttttttcagacggagtcttgctctgtcgcccaggctggagtgcaatggtgtgatctcagctcactgcaacctctgcctcctgggtgggttcaagcaattctcctgactcccaagtagctgggactacaggtgacaccaccacgccagactaatttttgcatttttagtagaaacgagatttcaccatattgatcaggctggtctcgaactcctgacctcaggtgatccacccgccttggcctcccaaagtgttgggattaccggcatgagccacccacgcccagcctcagtacttcatgaggttttagatgttcattgcctgttgttggtttccatataaatattagaattaactgcaaagtcatacaagaaaccttgccaagattttgattggaattgatttctatctagagattacttgcatctctttattagacttattcctaggagacggacatggtggcccacacctggaatcccagctacttaggaggctgaggcaggattacttgaacccaggaggttaaggctggagtgagctatgatccattactgcattccagccttggtgacagagggaaaaaataaataaataaataaatatttaaatcaatttatttctaagtaccttatattttctgtgacatataaatcttttgtatttaaaggtttgttttgtttttatggtaaatggtacctttgtaaaaattacactttctagctatttgtggctagagattacttatgatttatattatttccagtagttccttttttataaactatattttatttatttatttatttatttatttttgagacggagtttcactctgtcgctcaggctggagtgcagtggcgcgatctcagctcactgcaagctccgcctcccgggttcatgccactctcctgcctcagcctcccgagtagctggactacaggcgcccgccaccacaactggctaatttttttgtatttttagtagagacagggtttcaccgtgttagccaggatggtctcgatctcctgatccacctgcctcggcctcccaaagtgctgggattacaggtgtgagccaccgcccctggcctaaattttatttatattatttgaaacttaagacagataatgacatacagtgaaaagtcctcctctaacccctaaccctggccatctgattctttccatctgattctttccagaggtaatcagtgtaaccagttttttgcatactctcccagaactattttatatagatacaagtaaatcgtgtacttatattttatatatgttagcattaaataaatggcaggcctagtaacagaaataaaagtcacatggaaggactattgtaggaaggacagtttggtttcataatcagatgtttgtaatgattataatgtaataacttcacaaacactcaggaaaaagcaaattatttaatggaaaattccaaaatacatgagagccatttccattcaatatactttgttacaacaattccatgtacttccaaaatcagatgctttgtagactagcttrgcaacayggtgaagccctgtctctacaaaaaatcagctgggcatggtggcatgtgcctgtagtttcagccacctgggaggatgaggttggggggtcacctaagcctgagaagtcaaggctgcagtgagccatgatcgtgccactgcactccagcctgggcgacagagcaagaccctgtctcaaaaaacaaaacccagcaagaccccagtcttttaacttgtgaagcccctttactcgtctttcagcgcatacagcacatcatcctggctgacgttgagccgcacccgaaggagcagatcgttcctgctgggctccacaagcaggaggcgacaggagcccaggtgagaacacacggccatggtctctgacrtggtggggtacggcagtccctccattctgcacagtgccacatgttgactatatatctagacacaaatagcaaggcaaaggttaagaggaaatacaatcctggggctttttctgttcctttctttcttcatttgggaaaatcagacacatggcccccaggatatcaaacactccagaaggcatcagttggtgccccagtggtacacaaaatgcagaggcagaatggaatgctagccttggaatcagaaaacagcaggcccgaatcctggtgctaccatttacctaaatatgtagacctggccaagttactgcactcttttgagcttcaattttatctataaaatacactgtacatcccttgtgagttaatggatataaaatgactagtaactctcactggtgatacaaatagtcttgtctccaggggctgagagtttcataattgagactgtcaaaattcaagtcaaattttgctacaaggccactttccttatcaggtacagtgagcaaatgccaaggcatgacccttggaaaagcacaaaggcctagagagaaaattgaataaagaaataaagggaggcaggaggatagctggaaacatagattcctaccctaacgttctctactgggtcagctaaatctggagcatttctggtcactttccattctaaatatctatgagtctatccccgtcccagccccaagactgggagtttgtcaggaacagggatgttaaccaaatcagcttggggttcaaggattcatcacagttaatggcacactgcagatgttcaggaaatgtttacaaactaaaatgaaagtcactctctgcagaagagctatctcagactctaggaggagaacagtaatgggcaaaacatgacgagtagctaaaattttaaacaagaatttacaaccaacccaataaataagtagctgaaaggaaaatgttttcctgacttattttagttaaataaagatgtctaaaacatacatacacaaacatacacactctcaggtacacactcataaacacctttaacaattcatcttccaaggcagccaattactagagtcttaagtaaactaacaaagcacatgccctactgatccctctcacttgatctaattgaactatgcccatgcagggattggattgatctgtgatttgttctcaaatatggcctcattctgaaagccttgactccactacaacataagctgtaatcagggagtaactttgtcttgttcctcattctttgaacagtgtctggcacacaggccttcaatctaacatgcagaaaccagtcgctaaaggtctcttctcatgcagctctacaaaatgtcacattaaaataggtgccggtctggtattctttcacatactctaggtggcacaaaatagagtgtcacacattcatggaaatttccatgtattttaaaagcgtaagtccaaaatctagaaggatttgaaaagaggaggagatcacctgttgaaacgtggcttcctccagtcctgatcgacggaactctgcgaggatggctctcaggaagctctgttccagaacagaggaatttcttaaaggaaacgaggggatgtragtttttgtcagtggctgtaaccccagcccagaggaaagccaaagaaaacttttctgtgtctttagaaaagagaaaacccgggaaataatttctcctatattatgtggcaaggatctccctgacccccaaactctcaaactgatacagaaaatgtcactgtggaagtgaggaaacatagcaactacatccggaaatacactggtcactcataaatacctgtgccctcatttcatgagctgagcacatcaatcagtgtgagagaagcagctgcttccttttttttttgttcctatcatagcacttttatgccctaaacacctataatatagctcaataagtggcaaatattctattatcctagggttatatttctgtttccctgactagataatgtccctatgaaacataactgtgttattaataagt

SEQ ID NO: 96619 - DNA, 13023 bp, Homo sapiens
ttttattttatattatccacacgtacaaagaaattactgagatattaaaatgatggtaagatgaaaaacctacctatacatgttcttacaaggttgttttttcccccatagtgtccattggtgatagacattgactcccttctccccgcctccccacacaatctgtcagagaaatgttgcagaataacatttgtatgctaaagaagtcacaggggccaggtgcggttgctcacctgtaatcccagtactttaggaggccgaggcgggcggatcacgaggtcaggagatcgagaccatcctggctaacacggtgaaaccccatctctactaaaaatacaaaaaaattagccaggcatggtggcaggcacctgtagtcccagctactcaggaggctgaggcaggagaatggcatgaacccgggaagcggagcttgcagtgagctgagatcacgccactgcactccagcctgggcaacagagcgagactccatctcaaaaaaaaaaaaagaagtcacaggaaggggaaggttggaggggttcaatgaatctataacagaggttggcctataggccaaatctagcctgcaatttataatagtttttactttttttcttgtttggtggggtttgttttgttttttagaaacagggtcttgctctgttgcccaggctggagtgcagtcgtgcgatcacagctcactgcagccttaactttccgggctcaggtgattctgagtagctgagactataggcacatgccaccatgcccagctaatagtttttgcattttttaaagggtttaaaaaacaatgatgaatatattacaacagccacatgtggtgcaaaccctaaattatttactaactagccttgtacagaagaagtttgccaacacctagtctatagcattgctatggactgaattatgtctcctcccacaaaaaattcataccttgaagccctaacccccagcgcgatggtatttggcaatgggacctttgggaaataagtttagatgaggtcatgcggaggtggagccctcacgatgggattagcacccttatgaaaaaagataccatgtgaaggagggcacatctagaaggtggccatctgcaagtcaggaaaagacccctcaccagaaaccaatcatgctgccatcctgatctcagacttccagcctccataactgtgagaaaatacttttctcttgtttaagccccccagtctatggtgttctgttatggcagcctgagcagactaagacaaacgtacagtttttccaaaagcaaagcctagtcctaccctcttagattttaccaaatctcttcacaaatgaaaggggttttaagaagaggaaagaatgcttgctgtaaagcttggtcagggaatttctttgaaataaccagcgcagtaagcagcgggttccaaaatgctaagaagaatagggtttctacaatagtggttttcttatgtggcaccatctgtttttctttgactgtaataaaaatgacagcttttcatgtactgatactccctgtgccttttaaagtcaaacatatgatgctatttgtgtgtaaaggtttttctcttgcacccatttgtttctccagcttgaatttctatgtaaactcccttggctaaattacacaagccgcctacacccagccgcctcctccctcgctttagagcagggggtggaaaccttccgtctgcagcatggagtatccaatacacagctcactgtgccaggcaaagaaagattccctaaccggaagggcttcatggtacccgctcccctatttgtgcccatcattctgaatatgcaactttgaaacggctttatgacatttttggcaacctatcctaaacctggcttttgtctcccttttctccttagtaatccttggtaaatcttcatcatctcccttttccctctttgccctaaatgccccttttatcttaaaaggcaataatatgtatttaaagcaaactcctttttttttctttttttaagagagggggggtctcactatgttgcacaggctagtctcgaactcctggccttaagctatcctctcacctcagcctcccagatacttttttattaaataactttacagaagtataatttacaaaattcaaccatgttaagtgtataattaaatggtttttagtaaatgtaccaagctgtgcaaccatcaccataatctaactttagaacatttccatcacccaaatatgatccctcatgcccttttttaaaattttttttattttttaaaatttttgtgggtacatagtaggtatctgtatttatggggtgcatgagatgttttgatacagggatgcaatgtgaaataagcacatcatggagaccttatgcccttttataattagttcccactcccagcccctggcaaccactattctactttctgtctctagatttgtcttttctggatatttcatataaatggaatcatataatgtatgatgatttgcttttggcttctttcattcaacatgatgttttggaggcttgtctgtgttgtagcatgtgtcaatatttcttacctttatgttgctgaatagtattccactgtacaggtatatatatatatcacttgtcgtttatccattcaccagttgatggatatttgggttgttttcacttttcagttatgactaatactctatgaacatttgcattaaaatctttgagcagacttattaaacctccttttttcttcttttaagagacagggtcttgctcgtcacccaggctggagtgcagtggcaccatcatagctcactttaacgtcaaattcctgggctcaagcaatccttccacctcacctcccaagtaggtgggaccacaggtgtgcaccaccaccctggctactttttaattttattgtagaaacggaatctcactatgctgcccaggctgatcgcagctcctggcctcaagtgatcctcctgcctcagcctcccaaaacactgggattataggcaagagccactcagtcataagcctcttattcttgataattaataaaatcatatgtttatatgtttctagttataaattcaaaaagcagctgagtagaacttcttataatccaaatccgttgcccctcaaaaaacccctcctgagctaaattagcttttcttacttctctgaggctattgatgagtcactggcacttaacagaaaggaggctccccacttaccataaaaatgttcccaattgttgttttcaaaatagaaaagtggccaggtgtagtggctcacacttgtaatcccagcattttgggaggccgaggagggaggatcacttgagtctaggagttcaagaccagcctgggcaacatagtgaaaccccatttctacaaaaaataagaaaaaaaaattagctgggtgtggtggcacacacctgtagtcccagctactcttgagactgaggtgggaggatcagtcctgaggaggctgtcctgggaggttgaaggttgaagctgtggtgagctgtgattgtgctactgcctttcagcctgggtaacagaacaagacccagtctcaagaaaaaaagaatggggaggaaaagaaaaatataagttatcatccaatttaaggggcattgattccacacatccctgtgtccagacctctgtcaggactgaggaagccaaatgatgagacctgggcccttgaagaccttgccatcaagcagggagtaattgccagagaactgttcacgtttcacatgctcagcagtcagcaatgatgacaggagagcttgtcagttattctctcctctctggccttttggatgaaggaaaaaattatttttaagaagattatcaaagcctctacccatttttttcaccaactagaataatttcagctcatgcaaggaagtcagtattagccagcgtttcacgccttgcctgcggagggatcatgggcacgcatctttccaaagaacagcagcagccctggccgccccaggccagctcagccccctgtccttggtaggaccttcctgggcagtcctggtttggatatgtccagggcctacaagcacacaactttgtgcggtggccaatgtgattagtcgcctggtttgttactcagtttttcttaggttgaacccagcattttactccctgccagttttactagtctcatgtccatatgcctcttgctcatggtatccttttacatattttaaagtacttaccctctctttccttttccaaagtcagctctgctagttgaagagttcttctagcagactctgttccctaaatggggtctcatctatttacagtgtagtaattgggataagactgttaatgtggctgaatcctggagtgttgtttgtttgaacagccacctcacaccctgttggctcctgtgaggcttatggttcaccaaaaactccagatctcttgatttcataaggtgggtcttctccattctgatctggagtcattttgttgttgctaagtcatgtaattacatttagacttattaaatttatgttactgtgggtttgggggttttttcatttattttttgtggtaaaagacatacaacatttaccattttaccacttctaagtgtatagttcagttgcataaatactgtcccattgttgtgcaaccatcatcaccatccatctccagaacttttttaatcctcccaaactggaactccataccaattaaacaataattctctatttctcatcttcccagctgctggcaaccttctgtctctactctttgtctctgcctcaccctaggtaccacatatgagtagaatcacacagtattcacctttttgtgactggcttattttacttagcatgatgtcttcaaggttcatctatgttgtagcatgtgtaagaatttcctcccttttaaggctgcataatactccactgtatgtatataataatatcccgctgtatgtatagaccacatcttgcttatccatccatcagtacacacctgggtttctttgccttttgactgttgtgaataatgctgctataaacatgagtgtacaaatatctcttcgagtctcattgatcatgctggttttaagttatgcattacatttgtccattttgagttattggttgtataattatctataaatcacataaggtcaatctctttatccaaatcccttcttgataacaatgttgcatttcctattgattggaagaaatcattttgcacaaaatggtcatttcctgcatccctagtcttttttaaaagacttatgccatcgtcttcacagctgggctctgggaacagactgctttcatacttagcctgagtctgagtttgtcatagttcttttggctgaggtctaacttggggacggatgggaggtgaataataaccaatctctaggctgggtcaaagcaggaggttttgggcggttttgggttttgtttgttttttttttttacctatttgaaggtcactaagactacacggaaactatcaggcaccataaagaagggaactgagtctcggagtaacccacttaggactgaattcatttgctccgcaattatttattgagctcttacttgtgaaaagcacaaagtgtttttggaaaacagaagatgaataaacacgttccctgctttgaagatgtttacagtacaaaatattagaggaacttcctattataacccagagctctttaggcaaggcttccactcttagctgtaaaaacatatctccttaagataaagaggattataaaatacatcagaaagcaaagtgtgcttttatatttatattatattttgttatagatggattcaagtaaggatttggagacagactgaaaaatcttaccatgaaagctttagaggtggttagcttttgcttttctttggctaatatgagagcaccaggaaaacagaaagtactcttgctcttgacagtataaaattcttattatttttagagaatagtaactgcatttatgaaattctttgtcagagcaatttagttaatagatatgtaaatgactacttatttcattgtgtaggtggaccgctccatgtacactttctgaggaagaacataagtgctaaaaactattaacattgcaaatggaaagaagcaaaagttaaggctagaatgccattcccttgctgtattagatattaggagtgggacagaaagtccatcttgtcatcaagatttgttcggtttatggggtgggatttcttatttacatcccactcttggacggtcttttttttttttttttttgatgcatggaaactaatataaattggggtgcaagggtgtttcttgctgattttcaagcacaaaaggtcattacaaacccagctgggaagggactgggggaggtgctgaaagttaaaaccacggcagtaaattttcaacacaagggaatacctcctaaaaatcacytaggggctcttttaaacctttaytgtttttttcagcataaaaacaacttcagaggagactggggatttcaaagctctctggctctaactgcctcctgggaacagcatggaagcttccctaatcatggaggagttaatgcaggcctctgggggaagaagtctytaatgggaggaaataaatgggcccttgccttgcagatggtcccaagccctcccctcactggaattcttcttgctctgtgagctagcctcatcttcagttgtgcttttttttttttttttgagacagtctcactctgtcacccaggctggggtgcagtggcgctatctcggctcactgcaaactccgcctcccgrgttcaagcgactctcctgcctcagcctcctgagtaacygggattacaggcatacgccaccacacttggctaattttctgtattttttgtggaaacagggtgttaccatgttggccaggctggtctcaaactcctgacctcatgtgatccacccacctcagcctcccaaagtgctgggattacaggcgtgaccactgacatcagtccacattctccgcatgaggctggcaaacctgtaaatccccacccctcgtgtttgttacccccaccctgctgctctcactcctggtgactgaggccctttgcacttggccctcatctctgggatgtacacagctgtcatcctaggccccagctctacacgcaagctctttctgccatacaggggtcctgaagatagagaccagcggctgtgccgactcactccctggctctgccgggtgctgcacactgtcttcattaacgttgtctgtgtgttttttttcttttgttttcctcttccttcaggtacagagtgaagacagtgtcctcctgtttgttattgcatggacgatcacggaaatcatccgttactccttttatacattcagtctattaaaccatctgccttacctcatcaaatgggccaggtaaaaaagcacatttcaaaaggctcacttttgaaatgatctgtcattgaatttgccctttattgcctaaatattgcctcaaagtttctaaaaataaaattgagacgggttgggtagaaattttgtctgtagatttcatcagaataggagtctgtacttaactttgactaacggaaatactgttttaaggtttttatattttacttaaattattttaattgggatcagttcttttcaattaaattatgcagtattttcttttttaaaaaatttcatcaccaagtagcaatcaatagagatttgccgtaacatcccttttttgtccatatcatcacattttactgatgagcttctgccattgtgatgggtttttttggaccaagtcctattctcctagtctcaattttgccaagaagttgtgactcttaaattaatttttaggtaatgacaaacattacatgtcagttttagcttatcacttttgttttgctttgattgtttttacaagtaatgatgactttggtaaaaggctagtagttcatctgcttaccttaatgagtccatgagacagttgtaggcagttttctgagctgggaaggactttgagggagagtgacaaagcagaaggatccaagtccctggagccgaaatgccttatttggtggaaggaaagcagtggttcctagagtgtttatgagttcagtaattaaattagggacataatccgattgtttccaacattttgagtatgggaactcctttgttattttattatttttctcatttgcaatgaacatttttattaggaaaggggaagaatgggaaacatagcagttactaaccaacctggacagccactgtggaagctttttaccctggttgttagggaagtctgttgaccaaggcctgattttactgttggagaaagattctttcatccactgttctccatggcctctgaaagatttttttccaccatcctacttagtgtggctaaaattggcagtggggaatatgtcttcccttccacttcagagattttcatcacaattcctgtgcccagaagtttgtagtccgttgcacattgtgagccacaaacagccaaaggctgtttaaagtctgagctgatgattcctttagcaatacttatagtggcttacagttccatgggacagtgactgctctctgaattctttgtggaatatggagaactcctttttaaagagaaaacaattatgcagattcccctcccatgtgacgataattgtaattgtggggtgttttgattggaaaattacatagtaaccaaaagctattatgaattttaaatttttttaattgtatatatttgatttttcacaatagcatgtacaaacatttgaaaaatagtagcagtatacagatgcttatgctattttttttgttgttcagtctttgtgtgtggtgtggaattcctagaccacatgttccaacacctccgccactaccaccccaaccccatcccaagacccacagggcaggacccgtcagtataaaccatgactcagttcccctactttaccaacatttggcatcactttagttattttagagcataattttgaagagttgtttattttgtcagaccaaattttgaggctgcctgaacggcctttattttgtcgttagaacatttggaaacatatacctgctgtaggctggtttcagaaactggcttgtaaaacctgaatttgagtagcaggtaaacaggaaaatgtataaacaatcattttctaaaagaccagtactgattagaagggtgggaagtgcagcttccttctaaagctgactttgagcctcagtaatgaatattttgttttgttttaggtacacacttttcattgtgctgtacccaatgggagtgtcaggagaactgctcacaatatatgcagctctgccctttgtcagacaagctggcctatattccatcagtttacccaacaaatacaatttctcttttgactactatgcattcctgattctaataatgatctcctacattccaagtaagtaaacagttatgcgtatatttaattatgttttaaaatttggctctacaataactaaatatctttgactgtctttgcactatatccaagtaaatgtaaatctcatttattgggaattcttggtttttattgaatgctgactatcaaaaggaatttttttccagtagtaattgaataaagatgaacccttctcaatacagttgccaaaatgcagcccttcttagcatgtgggtttgaaactgaataccaggctaggttaagtatgtattggggaaagtactgaatggaaaacaaaaaagccattaaaggccttaccttgattgtagttttctgtgtcttaagaactgcttgttacagtatttgaaaaacatgataaaaagatttttgcattggttactatatcaaaatagacatttaacttcattttgaagggattggtagttaactagaaacataacaaaataataatagatttatttttttctaaatttttcattttcttgttgagcactgattgggacacagtgttctcttcaagatggtttccaattattttaatagtactgctgaagatttaagtatatggataatcaaatgtgcctatcagtgtattcagtgacagagaaaaagacatgtttgatgtctctgtgaagtgagccctactttctgaggatgaggagtttagtcctttgctggaattctgatgttcaattataaatcctatgattgatttctatataccaaaagatcttcttataaccaacgacatacagtgttagtggttcttctcattttgctatttctataaccactgtaactctgaatcttattttaatctagaaaagatactgtattcttccctaaaccccaggttaaatcagacagggttggacttctcctcattgcatggcatcatcggaatgaatcaccctaacaaagcgacatgcttgtgtccctctgtggaaaattgcatttcatgcattgtgagaaaaaaactacatccagatttcatgtgagtgtttatcttgcagaaattcttggatacagttctgcttcatgattcattttccactctttattcatgttgagtcctctctagtgctggaatcatagcgaccagaggccatctctcttcaaatgtaaaaagtggttgattttcaaacagatgataaatgtgaaatcatctaaactactaagtaataaaaattaactggtagtttatcacctttctaattttgttttttttttttagagtttcattttccagtctctagagcagcagttcacagttgcagttttaccacacccggagtaactaacacatattatcccagtgggcaccacaggctttatttgaattcaccatagtcaaatgaataggagatatgtaccatattgggtgactgggaaaggggcagggaggtttttatgaaatcagatccataacaagctgcttccacactgacaaaaatctaggcgttcttacctgagagttcctgcaagacttccaacctctctaggaagcagggcttccttccaggaaccactccccagggcagcctccatctgtctgcatgtttgtctctttatgctctggtagccaaccagtgctgagctttgcctcttccttctgagctcttggtgtagtggcagtgcctgggtaccacacgcagcctccatgatgatagcgttcctgagggaaacccactcctgtgagcttttcatcttggtcttgaaagagatagaggaaagagaaaacactgaccccagagccagctgtcttttagagcagcagtccccacaacctttttggcatcagggaccggtttcatggaagacagcttttccctgggcggtggaggggatggtttcaggatgaaactgttctaccttagatcatcaggcattagattctcataagaaacatataacctagatcccttgaatgtgcagtttacaacagggttcacacttctatgagaatctaaagccactgctggtctgacaggaggcagagctcaggcagtaatgctcatttgcccaccactcacctcctgctgtgcagctctgttccaacaggtggcggttggggacccctctttcagagagcagggaaggactctcctcccaacagaagtctgctttctttaccttaagtaattcccccttgcagtctcagcctccttttggtaagagaacttggctcagttaaagtctaacataatttctttttctaaggcagctaacctcttgtagaccggagaaaagggtggatctcaaataatgattaaaagattccctgcaaaccattgactcctcacccaggttcaagatggcacacagactacctctcctgatgcgagtcaccctggtgcctgctggcctcactgtgctgtggcctgagccagcagctctggatgttctcagtggttcaggttgttactgttgaggccagagtgtacagttcattctggccagctgcacatttccaactttccaaagctttgtatttatcagaagaaaatgcagaattaggagaggttgctgttgacatgcagtctcctttaccaaatttggttttctttctaaacaaggtagcgttcttttaatctttagtggcaagttgatgatacacatgtattatataaagtaacacctccttttcatgggcctcatctgttgttgcgttgttgcacacatagcctaaattgtggctcatgaggcttgaccccaggagtttcctcatattggggtgccctggccaggtgctcctctcctgttctgctgtagttgcaatatatacaggattagtacaacacagtccctgcaggactcagtagatgtctaaggcctgtttacattccacccccaaattggtgaaaattggttatggtggagggagccaaaaaagggcaagatacattgatgaggggtgaggacctggagaagctggcgctttccaggttgtcagtgactgtaaccacacctctgatttttagagaaaccaaggagacttggcccaggcagagagcatatctggtgctgtcgtcctccacagttctctccccagaggggaagagagccccaagagggctggccatcttcttaaagaaaggagggcccagcagcacccacacccccctcgtccccaacacacagggactgtcacacacacgtgcccagcagtgtccccattctgtgttccctgaattgggacagcagaaggtggaattctcaatagcctgttgtcgggttgaggggttttttcagtgctattcctcagtgtagctcatgttgttaaaagtggcagccgtgcatctgaaaagctttcagtctcatggtcgggttcagtctgaacatgtaggtgattcagatggagacagaatcatagttctggtcagccagaagccactgcctgaactgtggagaataggccagacaccctaggcccttggcctcccatccacattcctttctctgggtactgaggaatctctgggagatgtaaaggagtgaaagtg

SEQ ID NO: 96620 - DNA, 74104 bp, Homo sapiens
ctctataccagagaaaaacgggaactttttaaaagcacagattgtagggccctcaccccagacttaaataaaaattggggggactggagcacatgagtttggattaaattacaagtgccccagatgattctgatgtatgggatccactactcagaaaagaaatcctggccgggttgggcgattaacaggcggtggctagggaggacggagagggggcgtttgctcctctgggacttttcatgcctcgttttttttttcagatgtggcttggtctggacgcaaggtcccagcagccagcttaagcttactcttctgtgaaaggggaaagtatcccctgtggaaagcagttaaacttgtggagggggtgcgagacgtgagttctcccccatgccaggcgaatggtgtggacttgagctggtccagcagccggctcgacttgtctgagggagccctggagggggcggggaggggccccacagaacgtgggttctataaagagacattgggaagattcgattccgagaagaggaagagccggattgaaagagagccaggcccttgagggggagggggctgccaagatggcgtcggcctcctccgggccgttgtcttcggtcggtttttctccgttgatcccgcggtcccttcctgtacctcgtcctcagcatctggaatcaagagtcccatggcatctgaggtgccttatgcctctggcatgcccatcaagaaaataggccatagaagtgttgattcctcaggagggacaacctcatcagccttgaaaggtgccatccagttaggcattacccacactgtggggagcctgagtaccaaaccagagagtgatgtcctcatgcaagatttccacatggtggagagtatcttctttcccagtgaagggagcaacctgacccctgctcatcactacaatgcctttcgtttcaagacctatgcacctgttgccttccgctacttctgggagctatttggtatccggcccgatgattacttgtattccctctgcagtgagccgctgattgaactctgtagctctggagctagtggttccctgttctatgtgtccagcgacgatgagttcattgttaagacagtccgacataaagaagcggagtttctgcagaagctgcttccaggatactacataaacctcaaccagaaccctcggactttgctgcctaaattctatggactgtactgtgtgcagacaggtggcaagaacattcggattgtggtgatgaacaatcttttaccaagatcggtaaaaatgcatatcaaatatgacctcaaaggctcaacctacaggcggcgggcttcccagaaagagcgagagaagcctcttcccacatttaaagacctagacttcttacaagacatccctgatggtctttttttggatgctgacgtgcacaacgctctctgtaagaccctgcagcgtgactgtttggtgctgcagagcttcaagataatggattatagcctcttgatgtcaatccataatatagatcatgcacaacgagagcccttaagcagcgaaacacaatactcagttgatactcgaagaccagccccccaaaaggctctgtattccacagccatggaatccatccagggagaggctcgacggggtggcaccatggagaccgatgaccatatgggtggcatccctgcccggaatagtaaaggggaaaggcttctgctttatattggcatcattgacattctacagtcttacaggtttgttaagaagttggagcactcttggaaagccctgatacatgacggagacactgtctcagtgcatcgcccaggcttctatgctgaatggttccagcgcttcatgtgcaacacggtatttaagaagattcccttgaagccttctccttccaaaaaacttcggtctggctcatctttctctcagcgagcaggctccagtggcaactcctgcattacttaccagccattggtctctggggaacacaaggcacaagtgacaacaaaggcggaagtggagccaggtgttcaccttggttgtcctgatgttttacctcagactccacctttggaggaaatcagtgagggctcacctactcctgaccccagtttctcacctctagttgaagagactttgcaaatgctaactacaagtgtggacaacagtgagtatatggggaatggagacttcttacccacccggctgcaggcccagcaggatgctgtcaacacagtttgtcattcaaagacccgcagcaaccctgagaacaacgtgggccttatcacactggataatgactgtgaagtgctgaccacactcaccccagacactggccgtatcctgtccaagctacatactgtccaacccaagggcaagatcaccttctgcatgggcatccacgtggcccatctggctctgaagcaccgacaaggcaacaatcacaagatccgcatcattgcctttgtgggaaacccggtggaggacaatgagaagaatctggtgaaactggctaaatgcctcaagaaggagaaagtaaatgttgacattatcaattttggggaagaggaggtgaacacagaaaagctgacagcctttgtaaacacgttgaatggcaaagatggaaccggttctcatctggtgacagtgcctcctgggcccagtttggctgatgctctcatcagttttccgattttggctggtgaaggtggtgccatgatgggtcttggtgccagtgactttgaatttggagtagatcccagtgctgatcctgagctggccttggtccttcgtgtatttatggaagagcagcggcagcggcaggaggaggaggcccggcaggcagctgcagcttctgctgctgaggccgggattgctacgactgggactgaagactcagacgatgccctgctgaagatgaccatcagccagcaagagtttggccacactgggcttcctgacctaagcagtatgactgaggaagagaagattgtttgtgccatgcagatgtccctgcagggagcagagtttggcctggcagaatcagcagacattgatgccagctcagccatggacacatctgagccagccaaggaggaggatgattacgacgtgatgcaagaccctgagttccttcagagtgtcctagagaacctcccaggtgtggatcccaacaatgaagccattcgaaatgctgtgggctccctggcctcccaggccaccaaggacagcaagaaggacaagaaggaggaagacaagaagtgagactggagggaaagggtagctgagcctgctcaggggactgcatgggaagcacggaatatagggttagatgtgtgttatctgtaatcattacagcctaaataaagcttggcaagattttttccttctttgcttcaaaaaaaaaagaaagaaagaaagaaagaaagaaagaaagaaagaaagaaagaaaagaaaagaaaagaaaagaaatcctgatgcctaaatctgaccccttgaaatgctgatgagcttcatctgagctgtgtgatctctcatgtgcagctaaggttgagaaccactaacataaaataattcacattaaaatcaccaggaagctttaataacatttcaaatacttggacccaacccctaaagattctaatttaattggcctgggactcaggtactgatatttttcaaaagctcacaaggtaattctgaaattcagcaaaagttgagaaccactattcagactaagtgacttgtccaatgtctctgggtgcatcagactttacggccttccttacacaggggttgtgaatgaaatatggctatggaaagcaattgttgagtaatatgttataaagtatggtggtgatgatgatgatgacaatgatgacaatatttcttgagtgcgtcctatgcaccaggcactatgctaagcattttatgagcttaatcttattgaatcttcaacattagcctgctggtattattttcccttttccttgattataatatgtcatcagttgaggatgacaatttaataacagttattagaggctgttgcttgttaataggaaaatatttattcagtcctccagagacaaagatttgctttgatcagaataaatgtaaattttgatttatttaacatgaaatgcaaataaacatgtgtgctgctatcaatgcaaatcactcatcccatgtgatatcaaataagcagataccttctatgtagccctccaagttcacctacattcacaaatgttacttatatctcatactggggtatccatactgggcctggaagctggcaagtttatttagacacattccatttcaggaataataaaatgcagggaaaatgtgtatctttgagtcacagaatcatggtattattcttattttcaggtgagactttaaaagattaagtgacttgcctatagtcccagggttcattctacagccaagccagaaataacaacccagtgcccctgatgctggaattctccagaagctcctctactgacatagtttccactgacaaactttccttgacaagaataaagtagtctgtcagaacaaaattttgccagctctgtctactgccagcacttggaaataggagtcccatggggtttgcaaacaaatgaaagcagtggtgggcttgcaagacctcaccagtccttagagttcagttgatatgtctctcaatacaatgcaggaactaattttaaagcattttgaaacaagcacaataactgaaaattctgagttcaacaagaaacaaatgcatttaatctttgaagaaaaatcaagtcaattaagaaatgaaaataggttgagactagacgaataagaatggaaatgatcgattggagaagttttcagccttgaacaggccattaccaagtggtcagtatgaccacatttatctgatattatttggtccttttctttcttttaaaagtactatttagttataagaatcttaaatgctggctggtgcagtggctcatgcctgtaatctcagcacttagggagactgaggctggaggatcgcttgagctcaggagtttgaaaccaacctgggcaacatggtgagaccttatctctaccaaaagtaaaaaaaaatagttggacatcgtggcatgagcctgtagtcccagctacttgggaggctgaggtgggaggatcacttgagcctggcagatggaggctgtggtgaactgtgatcttgccaagaccgtgtctcaaaaaaaagaaagaaagaaagaaagaaagaaagaaagaaagaaagaaagaaagaaagaaagaaagaaagaaaagaaaaaagaaaattaaacaccactttttaaaaaaaagcaacaaagaaaatttggacattaagagaataaacattcccattaatcccatctccactctcctaagagatcatcagtttagtgcctgcttttccaaaaatatatgtcaaaaatgatttctctttcttaaagagaaagtatatatctatagtcttaactttccttttttttccaactatataaatatagtggccaccatacattattttaagcagaaggtaaattaaacgatccactgcgaacactttggatttcttttgtagctcccaatgtttgtttggcaagatagaaatgcccttaaatgcagccttattgtcccagctttagtaaaattctatttataaatcaaatccaaagtaaccagagacgttggcataatctttggtattctctgccggtacagagaaatctcaatttgtggtttccaacatttgtaaggtggtaaatagcaacctccctccactgttcctcccacctcaagtcagcagggtgctggtaaactggcttgggtgggagtgaggggaacccctggtgtgtcgtatttactgacttccattgggtaaatgctccatgattggctcacaaaatttcctaatatttaacaattggtgttgaactgttctaacacatcagtgtcaagccattcgatgaccaattatggcacatatatgacccttttatcttgatataacactcwtgcaggcttatttcatacaygtagtcactgcacctacaagaaacgtataacagaatgaatgacccaaagccaacaactgtggggaaaagtgaattagacaacatctctctcatatttctctatttatgagaggaaattctagcatataacctccaagtatgatgaagttcttctgtagacatgtaggtatcagtattatgctaacattttttcttttcctagataaaaataaagtagcccacaagyctggttttatgttatgttaacattcattaggtattctttgcaattttcccttttgcagctattaaatcacttattccttcaatattttttcctgcataatgatttttttatagaagctaatacagtaagcattttaaagtcttaccagttgtgacattgaaataatgagactttaaagtccaaccacgtatctggaaatataggaacaccattcatttatttkttagaagaccacacactcatgctaatgaggatgccattgcttaaaatgttttggaaattctctttaggaattgtttttggcacaagattatgcagtatggatgaatattagtttcactgccctaatagtggtgcttcatatttttctaattaaaattataaaatacaacctctgataaagggtaaagagcattggatgttgattcagaagatctggactcaagtttaacctctgccacctactcgttttgtactctgcatatcccttaactgctcctaacctcactttccttctctgcaatttgagaataaaagtacactcgtgcgttgcttaacagcggggatgtgttctgagaaccacattgttaggtgacttcattgttgtgtgaacatcgtagagtttacttacacagcctagatggtatagcctaccaaacacctaggctagcccctattgcttcagagctacaaacctgtacagcatgttytgaatactgtaggcaattgcagcacaatgataagtgtttgtgtatctaaacatactcagtatagaaaaggtacagtaaaaatatgtataatcaataaaaaatggtacatctgtatagggcatttattatgaatggagcctgcaggagtggaagttgctctgggtgagtcagtgagtgagtggtgagtgactgtgaaggcctaggacatgactgtacactagagtaaactataaacactgtacacttaggctacactaaatttatttttaaaaattcctttcttcaataataaattaaccttagcttactatagttttttactttataaatttttatttttattaactttttgactcgtaatcacacagcttaaaacacaaatacattgtacagttgtacaaaatattttctttatatctttattctgtgatatggttaagctttgcgttcccacccmaatctcaccttgaattgtaataatccctacgtgtcaagggcggggcgaggtagagataattgaatcatcggggcagtttcccccatactgttctcatggtagtgaaaaagtctcatggggtctgatgattttatacatgggagttcccctgcctaagctctcttgccacccccatgtaagacaagactttgctcctcattcgccttccgccatgactgtgaggcctcctcagccatgtggaactgtgagtcaattaaacctctttcttttatacattacccagtagcaggtttatctttattagcatcatgagaacagactaatacattctgtaagctttttttctatttttaatattttttattttatttaccttttaaacttttttcttaaaaactaagacacaaatacacacattagcctaccagggtcaggatcatttatatcactgtcttccgcctccacatcttgactgactggaaggccttcagggacaggaacatgcatggagctgtcgtctcctgtgatagcaatgccttcttgtccatacctcctgaaggacctgcctgaggctattttacagttctaaaaaaaaataagtagaaggagtatactttaaaataatgataaaaagtatagtatagtaaatactaggtgataagaatttttcagctccattataatcttatgggaccactgtcatatatgtggtttatcactgagtgaaatgtcattgtgtggtgcatgactgtacctgctccaggagttgtcctgaagattaaataatacaaggcattgtgataacaccttgtgaaatgaaacacgctatccaaatgaaagtcatcattggtctagcttgattagaattgaatgggcttggctatttccaaaattcagatgtattccctgaaagcataaatgttccatcatcaaaaaaagtgtagtgtaaaaagaaatatgcttggactttgtctcagttcttggctcagagctcataaagcccttggaatttcctgaatgacaggagtgtctttggttctttgcaaggagcccctttcgaacatgcctgagtttatgctaatgaggtgatttagagtgggacccagatagtgtcatgatggggccagtcaccagaaggattatagaaatttgggactttcatcccagttcacctacccctcagcaggggatgaggaatggaattcaagctgttaaaaacacatatacaccatggaatactatgcagccatacaaaatgatgagttcatgtcctttgtagggacaaggatgaaattggaaatcatcattctcagtaaactatcgcaagaacaaaaaaccaaacaccgcatattctcactcataggtgggaattgaacaatgagaacacatggacacaggaaggggaacatcacactctggggactgtggtggggtggggggagggggagggatagcattaggagatatacctaatgctagatgacgagttagtgggtgcagcgcaccagcatggcacatgtatacatatgtaactaacctgcacaatgtgcacatgtaccctaaaacttaaagtataataaaaaattaaaaaaaaaacaaactctcaaacaacaagatttgrtgactttccaggtgggtgaacacatggaggtgatgggagggtgggcacctggagaaggtgtggaaactccacactcctcaccttgaactccagaccttgccctgtgtagctcttccatctggctgttcctgagctataccctgtataataaactaataaatgtaagcaaagtgtttccctgagttctgaactattctagcaaattatcaaacctggggggaggggggtcttagaaaccctcagtttatagaggattggtcagaagtaaggaaggcccgcactttcatctggcacctgaagtaggggcagtctgtgggactgagccttttcacttgtgggatctgaggctactcatctggtagatagtgtcaggattgaattaaattgtaggaccccactccctcccckaccccgcctcaccccacccccatgtcgggagacttggttggtgtggggaaccctccatgccccacatttggtgttagaaatgttgtgtgagtctagagagtatttttttcagagtattcaaaataatttggaagacacttacatggatccctcaggtcagtttattgaacccaaatgaggactcagggattatgggccctagatcattttgagatctgagatccagagaaagcgtatcctgtactgaagccctcctcactctccaggtccttagtgttctcatttcttcctgattctctgcttcccacccactccactggatgaaagcaggatggctgcatgagggcatttatgataataaatttgaaaagatcctggccgggcttttgacaagaacatcttcatctctctctcacgccagcagcctgggccagccagctctcctccttttgaatgcctcactcagtattgctgctattcttgccattttaagatagctttgacctgaggggcaggatcacaaattccacagtggagcacagggcatgaagaggttgttctgtcatagtctgaggctatgagggagaaattaacctcaggcccagcagattccaaccagcccacccctaatcagataggtcatatgaatgaaacatttaaccaggttatccagtttcttgctgtaaaactagccctttgcagtctgctggagcaattactgaagtctgtcatctgcaatgctcctttcacatctaaaagtgttctttcttttcatttttcatgttaatcaaaacaataaatagcaaccacttaggtatcccaacaatgactgcactacatatagtttacaaatcagaacaacagataaatacatatcattttactgcatgctatattttttttcgttgtagatttaaaagtgtgctttgtttgtaagaaaataagtaaagaaaactgcttcacattctaaggtgaaaagaaatcctctcacgtgtcgctgtaaaattttcatttatggtgatgagttgtcctgtgtcaaaacatccttattaacagacattttactgtgagcgctctctctttattgtgttgtctgatagtgcagggttttgtagtgaatacaagtaaagtatgaactgtctaaacaaaaaagcaaacacaggccaggtgtggtggctgacacctgtaagcccagctacttgggaggctgaggcacaagaatcacttgaacccgggaggcgaaggttgcagtgagctaagatcgtgccactgcactccagcctgggcaacagagtgagactctgtctcaaaaacaaactagcaaaccccacaaatctaataatatttgaaaagacacaacagtttcagtgacagattaaacacaaaaaatacactggcccatgatttggttatccttggttagagccactgtatattataaaaatttaaaaacaaattcttggttttttaaaggaattccttgagatgagggaattttaatgagctacttctattggtattcttcaaccatcagtttagaagctaagtatttgatgtttcaaggtaaattagattttgaagcagcagaccaaatattcagttctcatccaccagtaaacaatacttcacgcccattttataaagctttcagttatgtttttccttatctgctgctgctgcctgtaggcatttgcaaaacatacatcatggctcctggtcattagtcccatcaattattagtttctcaaattcaagcacaacctccaaggtcttagtgttaatgttaaattacttaattgaagaataagaaatgatgagactaaaccttctgtcttgtctcctaatggagacttaatagtctttcccaaggggtattttaaatataaatatttttaaaatttaaaggaagttcattttacaacttaaaggtgatttcccttcagaatgttaagcacttttccttgtttattttcttataaacaaagctcacttttaaatataaaatgcaaaaaagatacagagtacagtaaaatgatacatatttatctgttgatctgtttagtaaaccatatgtagtgcaatcattgttgaaatacaaaataaagactaaaataatgaacataaaagtaacctgtagtctcaccatcaaaagaataatttaacattttgatgtatatcctttataaaatattgtatttcaactgcaaatgtatttattaagtgtttagtatatacccagaactgttctgggtgctgagagagagataaatgaacatagtcttcatcccccaagggcttacaaataaggtattcatcttattgataaaggcctagtttgttgatagaaaagttagttgatagttgttaattttccacattttgagtatttataggctttaagctcaattgaaaagagttctctcccaggtatgtcaagtctgttacaacctctttttaacttactgccttttgtgtcttgttcactgggcccagattgtacttaatggatttgatggtatccagacatatttagttacactgattcctctaataaaacagtcatttctcagtgtacattatgttagttccttggaatggagataggtgttatatagggaaatagattttatggccagaaatgtttgggaaattctgtgttaaacaatcatgtagaatacaaaatcaattgtttgatgagtgatcaatctaaatgtggaagataaatctatccagcctgtagaagaaaatgtaggaaaatattttcatgaccatgaagtaggcaaagatttcttaggacatcaaaacaggacaaatttgacttcaacaaaattaaaaacattaatcaaaagatgtagttttccttttttaaagaaatagttaaattgaaagacaattcatagactgtgagaaaatattcacaatacatatatctgacaaagtactcacatcaaaatactgatatcagaatatataaagaactacaaattaataataaaaaagacaaaactaaaaaagatcaggcaaaaggcttgaagagatacttgayataaaaaatatataaacactcaataagtgcatgaaaaggtgcttaacattaacagtaatcaagaaaatgcaattaaaaccatgatatagtaccacttcacatcaactgcaatgagactaactaagatttaaataccaagcatcagaaaatatatgaactggctgtgatacactgataacaggaatataaagtggtatgatcactttggaaaagagtttaccgctaaacagatagctactggtagctataattgcactcctagttgaacttctcagcatctgtatatttatatatattatttgacacacacacacacacacacacagtgaaaaccttgctgcacccaagaggaataagagtatgtccacaaaaatactggtataaagaacgttcatagcagctttatttataatgggaatgaactactagttcacacagtgtacatgaactagtgtgattcacaaaacaacagaaacattgtatcaagggaaagaagcaggcacaaactagtacctactataagaatatgtgaaactaagctatggtgataaaaatcatttaggatgattgcctctggagaaggtcttggggtaactagaaaggaataccaggaactttgtggagtaatggaaatgttctctctcttaatttaggcggtggtattacaagtgtatactttttttagcttttaattttgatgtacataattttcaatttacagaaaacttgcaaagccaggacaagaacttccgtattctgtatctaggttccccaactgttaggcgtatgtatttgttgaaattaattgaaccatatgcttcaaatatggatgtaaatgttaccttaataaataaagtggggggaaaagctattttactgaataacttctcagaattagttaagtctccaaaaaatgtatactttatgtattacctccctaatttttttggatgagaaacctagttttcaacaaaaacctgctgggccaatgtctcaatgaatgctcattgggacccaatgctctagtacagcacttctcagccctgagcgctcattggaatcacctgaggagcttttcaaaccttctaaagtccaagctgcacctcagtctaaataaattacactcaccagtggagccaaggaagcaatctgtttatatcccaggtgagagctgggcgtgacacttataatcccagctacttgggaggctgaggttrgaggatcacttgagcccaagaatttgaatccagcctgggtaatacagtgacactcccattttaaaacaaaacaacaacaacaaataaatctcagatgaatccagtgtgagccatggctgagaaccactgttttacgaaaatatcatctcacttttaagaattgacacttgcccacggtagggtggccgagtggtctaaggcgctggattaagaattgacacttgcccaattagacagaggctcacacttaataaacattaccaagaccagcaacctggtgtcctccctcgatggatatctgcattgggagcagggatctatcgtactgattagtgcccacctggctggctctctgactgtaggaccctggcttctccccttcagacctctgtttcctgcctgcagttcacttcagtggatgtcctctctggacaaggtgcccaggtagacctagagtatttgcctatttttttccaacccagctctatactattaagtggtctgattggttgcctagccccctgtcatgtgaccagcacccaatgagaacaaggctttggtttcttgggcagttcagtttgtatactgaactttctcaagccatcctacttcccactgtgtttctagacctgtttcttatcaaagcttctggtctcttgcctcattctttaccacagtctcaaactgacctcttatatctggtaattcatattgctgctttgccccagctgttggctccaaatgagactgcacttcatgcatctatcacaggagtttcctctaccctctctggtgccagcactttctrcctcaacgaggacccctctctgttgctagccgggtaagcctccgcttaagaaagagaatggggcagtttctctgtgcctcagctaacctccctggtctcacctaaatgtgcagttcggccctgataactctcacttggctggtcttactctctcacatggcctggccagcctcatatttccgttcgttggacaccacagggaattaggcatccggctgaagccactatatcaggtttctgtgtgcttccgaggggctggtgtctgccctacattccattctactgaccatgtggtacattctcggtgcaggcggctagatgaagtgcgtatcagaaaatacagctgctcacacctcagaactccaagtgccctctctgtcatccatctctcctggctcaggcctgccccttcctgacctgggccacagctttgatccagcatttatctttatttctattcatggtttatatctgcccctagcctcaaacccatgtcatagatccctccaaggggatggagaggccacattcctggcaccaggttcatggacatctgttgttttgcccgcttggcctctccactcccttctcctgataacaacacccagctttcgcttaagaaaaccaatactcacctccagtcagaaataacatagattcagcatacatgtcaagtgtccctcccttgaccacggcatgggcagaagtcccaaactaaatcattccaatattcactctctgaaatttgagtggagtagagcacgaaaagttttaaaatggctgaaaatcatcaaacctacttatcttgaagggtaatgcttgtttctattaagggtctctgaaccccttagttcctgctgttttctaagatttattctttcatcgtacattttcttcaattcccaggcttgtttatttacttattgatttgttttctctagtaccaagagctggttccattgtttgtgaccagtacatataactagtttacagtcaactcttttttatctttaaagtaataataaaatactaagaaatattttaaagaattatttcataagagtgacttatttcctaggatctccttggagttccatagattttgtctattacctttataatcctagctgaggtaattgtttaacatctctgagcctcagtttcctcatttgtaaaacaaagcaagccagtgatcctcatctcatggagaatcagggcaggttagatgagaaaacattaaccaccacctgctcagagcctggcacatcacaggtaaacaaatgtttgttgaatgaggcatttgtgtattacttcccaggttcgttttgctctcccaaaatgctttcttaaaatcatgtagtgggaagattatgtaaaactgtccttgggacttaatcatagaaaattctcctgacaaagtacattttggaatatttggtccaggaacatagccagcaatttggcaagcataactctccagcaaaaacaaggccgttgtacaaaagaacctctcatgcctttggcctctctgctttggtttgctctaacttctgcagatggtcatgctcaacctagtagacagtggtatctaaattctaaatccactgtcttcctaaggaggaaacgaaggtacgagggagacagagtgtacagcttacccattggcatggtgtcaatagaagaaaaaaactcttcagctctcttactccccctgcccctcaacacttgaggaattatgccaaattgaggaataaactccatggataaagaaataatagagaagctcacctcatttcagacaaaccttcagtatatgaagactatgagaaacacaagaagaggtagcagctgtgaatggtgagtgctcggaatgtagactgtagtcccatagagcaaaagccacagccactgagtctgacctagacgttttatccctcaccccacttatcccctctccatttctgcacatggatgcattttgtatctgcatgaaactggaacatactgaagcaagaaacaataataaacttacattgtgttgatactaatttttttttagttccagtttatgcccatgtctttaaaacttaaaataattaagagatagttttcatttttaaagagcccaacccagctatatttgatgaaatttaaaaaagaaatttaaatcagcaatggtataattattatccaaattgactataaatattgatatgcacagtgagtcacctgaagagtgtctggctcatgaaggcacttaatatttttgggatgaatgaatgaatgaaaaataaatacctgtgtgagcaaatcaagtcacttattcatttttatgttaccactaaggaacatggagttggaaggagccaggaatactagttctaccctgatattttaaaggggaggaactgaagccaaaaggaagtcacttgactaaggcacaggctagtggcagttctggaatttttttacttccctgaaagttgttattccagacttcttcccacaagtggaattttaatgtacacatgattggtttattgaattaatagttttttccccctaagtttgctctgattttagcattctttgactcactcatataacatatatttgttgcatggttactctgggctaggcactattctaagcagcaaacaaaacacgtcaagatcctgcatttagggagcttatattctagtgggagcacggcaggcaataaaacagaaaacaagtcaatatataatacctcagttggtaacaaatgctcaaataaagcataacacaaatgatggggatctatctctaggtatgtacccaagagaaataacatatgaccacataaaaacttgctcacaatgcctttcacagaattatacacaatagccaaaaagtgaaaacaactcagatgttcatctaccgataagcagaggactaagatgtggtatatccawatggaatattatctgccaagaagcagcaatgaagtactgatacatgccacaacatggatgaatcttaaaaacattatgagaagtgaaaaaagcccatcacaaaagactgtatattgtataatttcctgcatgtgaaaagtccagaataggcaaatatatagagactgaaagcagattagtggtcagctagggctagggaaccggagtaattggtgtgtcagagggtaatgatgatcaaaaggtgcagactttctttttggggtgatgaaaatgttgtacaattgatagtggtgatggatgcaaactctgttaatactaaaagtcgttgaattgtacacttcaaatgagtgtattgtatggtatgtgaactgtgggagcgggctcctgctgttttatgaagtatcttcaagaaaggtctcactgacaaagcgacatttgagcagagactgcaaggaatggagaaagtaagcctgtgggtacctgggggaatagcattccaggcacaggggacagcaaatgcaaaggcccattggtgaataaaagattgagatgctggaggaacagcaagagggtcacatggctgtagagagaccaagggggaggtggaagaagaggaagttagagagttagccaggtggggtgggtatgtgctggtgaggcttgtagacccctgaaggacagtagtagcctttctctgagtgagatgggcatttgctggagacttttgagtagaggcatggcatgatttttgtgcaaatcactccactgcccttataatagatctgaaaattaactggtttcacaacagcatgcagaagacatttggctttacttctgggcctaaagttcagaaaataaacagaatcagggcaggggtctccctcacccaggcctgctggcagcattgccctgtcattgctgtcagaaccagagagaggtcagggaggagcctggagctctgagactagatctggtctagtcttcacctggtcttggcaagttttgtaaaaactttcttcatgagaggagacagccatcaggttaaccagtaattgtatttgacactaagaatgccaggccataaaaggattatctaatataactggaaggttccaagaccagtgatagagaggcacagtggaagctgactctgagtccctgcctaaacaaaaggacaggcagagagaagataagttactgagttcatggactttaaaatgcatttctctatccttagcttctctctgtgtacagtgcttttatttttccaagagacactgcagaatcaatggggtgaaaaggggaggtgagaggaaagaagtaacaaagtttatttactttaataatgacttataattgccttattgtctttcagaactcatttttaaatattttcccttccttggcacttcaaatcaaactattttaaaaatgtacacattctaaaacatcttattttctgtgggtgaagtttaaggaatagataattctccctgtaagatgtattctgcttggctaacttcaccatgggcaacttgcatttacttaagtaaaagaaatgatagggccacgtacaagatattttgacagaatgcctaatggtctggttactagagaattatgttggaggaggtgagaaatgccatcttgagtccaatagttctcagtatctcagagggcattcaacaggaaaacaggaaatgctggttgaatggatgcatttatagagagctggtaatatactttttctggactcttaagaatgagccatccaaaacacaataaataaaattgtatgcactctgggaaaagatctggataattaagatgaataacctattgtaggaagagttctccttgagcgtgcttattattcttcagggaattgagacaagtttggggaaacaaggttggttttatcagggcatccaggtgawcaacaacccaactgaatagaccaagtgtgtggaaggctcaaggaccaagctaaagagctgtggcatttacagaattaggatgtaaggtgagtttagggaccaaggttgtttggagtggggagtggtctgatcaagggatcaacttttatcctctttcttcccatctttgaccatacactctctatcctcttttctttcttgtcctttttctctccatgccattttctctatgtgtgtactattatactgaactgaagcctatttttattgaggactgggtatttactgaagagaagtattaggttcccgtgtatatttttcatttattcttccgcagtttgcctgggaaagaaaactaaaacaagaaacagtaagctctatgcttacttgtaaaagtggtcaactgaaaaaaaaaaaaaaactttacaagtggattccttctttttcatgggttgatggtttttgacaggggaaagaaaaaaaccttccccactcactccaaatctacacggaagtgctcaaaaagattccttcaatcaggaaaaaaagtgatgaatttgaaagggagaaaggctatcctatttatgttatttaatagatagaaattgattttcgataggaaagcaagcagctgcagacactgtgttcagctctcacgagaaatggttgctctattttagggttcttgccaaagctggagcaggtgctggctttttttccttctttttaactcactcctagctctcaagggtttaactggccagaaggaggctgacagtcaatggacctatgcccaaatgggctgcagctcaggcagcacaatgctgcgaccagctcgatgctctgatacaactttcaaagcccttctgaaatagttggctcggtggactcccactcacattataattagaatcgcacctgctacgtccagcatgtgttaagtttctgaaaatactagagaaggaagacaacaaaaatattcatactgatgtccttaaagggactgtagttctaggactttgcgggtgtgggtgagagaggaagggggtaggaatagtcattcgcctttgcttctaaagtattctagttaatgcaggggtgtgggaaccctttgaggcaaactgtggcaaaacgtttttttccacctatttattttgtagttttcaagtataaacttagttttgccaaatttctgagcccctttacttcttttcaaaattttactgaaatctttattcaaaattttgctgacaatagaaacctggaaggaggagaatgcaagaggccacagggaggtgctaagggctaagtgggttttccaaagagcctgctaggagttcgcgagctccccttcacttgtcacaggcttcagtgcccatagagcccaccggtcacgtaaatgagagacttgggccaggcatgagaaaattgggagtgagggggatgccgttctacrgaggatgttctttctttaaggctactcagctccagccaattgttcctgtgtgagaatgtgaactcagtgttgccagatcttcttgagttttcaagagtagccagaaatctggatgctataaaaaaaagttcccagtttttaaaacaggaaataccttattataacaaaaggacctgaggctgggtaatttataaagaaccagaaattgattttatcacagttctggaggctggggagtccaagatcaaggcactagcagatttgggtgactgctgagagctgctgtctgcttccaagatggcgcctggttgctgaatcctccgcaggggaggaacagcagaaggcgaaagggcaagtgagctgagtgctgcatgaagcctcttttataagggccttaattccattcacgaggcaggggccatcttggcctaatcaactcttaaagataccccttttaatattattgcattggccacacctgaattttggaagggacactttcaaaccacagcagggagttcaaacaaaacacatctgtctgctgtatttggaccatgggctgccaacttgtgaccactgccgtaaagggcttgttatatgtgtaccacctactgctcactcacctccccttctgtgccagctacgaaacatcattggttccaacgtggcttggctttgcctcattatgccacctgatttccttagagaactacacttacccttctcttactcacatggattgggtgaagtctcaagtctcagatatgctcattagcatttttcatcctctctggcaactcacatcaggtcaatgagattagtagtggaagtttatgaaacaactggacaaaagaatgtttatttctgctgaactagagagctatatggtgccactatatgaagagtcagtttgagagagtgtcttggtccattttcggttgctataatgaaacaccacagactgggtaatttataaataaaataaatttatttcttggcagggcatggtggctcacacctataatctcagcactttgggaggccaaagtgggaggatcccttgagcccaggagatcaagaccagcttgggcaatatagtgagacctcatctctacaaaatcatttttttttaattagccaagtgtagtggcacacacctgtagttccagctactcaggaggccgaggtaggagggtgacttgagcctaggaagtgaacacaagtggaggctgcagtgagccaggattgtaccactgtactctagcctgggtgacagagtgagactttgtctcaaaaaaaaaagaaagagagggagagaagaaagaaagagagagagaaagaaagagggaaagagggagggagggagggatgaaggaaggaaggaaggaaggaaggaaggaaggaaggaaggaaggaaggaaggaaaatttatttcttaaattcaggaggctgggaagtccaaggccaaaggatccacatctggtcagagccttcttactgcatcacagcatggtggagggtatcacatggcaagaggacaagagcataccagctcaagtctttcttcctcttcttatgaagccackggtctaccatgggagccctaccctgatgaccttatctaatcctaattacccctaaaggccctcaccacctccaaatatactaacatatgaaatgtgggggacacattcaagccaacacaaagtaaagccaacacaaaggaaaatagggctgagagagaaagaggagtccagatcgtgatcacatcaagtgaacacctgaatctggctatgccaactgctataccctttgattttgcagtttaatgtactgagttctattacgctcaggcagtttaaactgaatgtcttatcacttgcaagtaagagtcctgatcagattttgtcatttcatttaagcatttaatgaacatatattgagcatctactatattccagggcaatgctaggagatgctgaggatacagatttgaatgagataatttcttttctttataaattaaaaatttgaagacttcacattttattagcaccttgacacatttgtgctttctttctccacctctcccactctctctctcatgcacacacatacgcttcttttttttctctctgaaacatttgagagtaagttgaaaagatcaactagaattaggacagtctgattatcaaactcagaaaatttaacattgatctaatattacccattataaagcccttattcaaattttactactatactaatattgaatatagcaatgtttaggccagatacagtggctcatgcctgtaatcccaacactctgggtggctgaggcaggcagatagattcccttgagcctcggagtatgagaccagcctgggccacatggaaaaaccccatctctgaaaaaaaaatacaaaaaaaaaawttagcaggttrtggtggcatgcacctgtagtctcagctacctgggaagctgatgtgggaggatcacttgagtcccagagactgaggctgcagggagctgtgattgcaccactacactccagcctgggtgacagagctggggaaaaaaaaagaatatagcaattttttatacatttaatgtaggatttaatccaggatagcacattatatttctttatcatgtttctttagtgtcatttaatgtgcaatgatttatcagccttccatggtttttcatgactttaacattttgaaagagcacttgcctattgttttacagaatgttgattagtagaatgtagaaactaagatctgggcacttgaggttagtccgagtgccttcttgtgatttgattatgagtatgccttcttggcaggaatacaatgtaaatggtgtgtgtctcttttagtgcatcatggcaggaatcatctgatgtcagttcatcccatcatgggtaatgttgactttaatcacttggctgaagtagtatctatcagatttaggtaaaggtaccattttcccctttgtaattaataagtaatatgagaagatgctttgagtttgtataagtatcttgtttctcaacaaattatcacccagtgattttaggatccactgatgatttttgcctaagtcagttaacacagtggttgaaaaatagtaatgtttaaaactctattgttccttatacattttttcagttggctttctactgtaaataaaaactttctctctttttctattccctttctatgtttgtttttagtttaagtgtggactcatggaatcttttcttttcacttttgaaataaattcaaacttaagaggtgcaaaaatagaataaagagcttccccactctctgaaccatttgaagaaaagttgctgacataatgtctaatatccctgaatactttagaatattcctacaaacaaggactttctcctacataaccatgatacaaccatttagatcaggaagttaacattgataattactatcatctaacccacagaccccattcatttatccagttgttccatcaatgtcctttattgcaaatggatccaatacaggaatacatgttgcatttagttgccatatctacttatctttctttggctttatgaccttgaccctcttaaaggtcagttattttgcaggatgtccctcagtttgcctttgccttatgcttccttgtgatcagattcatgacttgcattttggtaagatatcacggaagcgaggctgtgtgtcctcaatgtatcctatgacgtggtgtatgatttcaatttgtctaacatgctgatgttaaccttcgttgtttgattaaagtgctctctgcctcaagttactgcttatagttactgtctttctctttatactcagtaagtattttgtggagagttattttgagaccatgtaagtatcctgctcctcatcaaacattcacccactaattttatcatttattgatatttttagttgaatttattattactgtgatgattgccacatagtgatttttctaatttcatcattgtgtttactattatcaattgactttctttttcttttttttcaagatagggtctcactctgtcacccaggctggagtgcagtggtgcgatcttggctcactccaacctctgtcactggggtcaagcaattcttgtgcctcagcctccagagtagctgggactgcagtcttgtgccaccacgcctggctaatttttgtatttttagtagagacggggtttcaccatgttggccaggcggtctcaaagtgacctcaggtgatccacctgcctcggcctcccagagtgctgggattacaggcatgagccaccgtgcccagcctcaattgactttccaatgtaaagaaaagttttcctatctatcatctatccacctacttacttattcatttattcgtatcagtatgggctcatgaattcccattttatttaatatgttataatctgttactaatgatatttatttatttatttgagacagggcctcactctgtcacccaggctggaacgyggcagcgtgatcacaactcactgcagcctagacctcccaggcttaggtgatcctcccacctcagcctcccaagtagctgggactacaggcacacatcaccgtgccctgataattattttgtattttttgtagagacaaggtttcgccatattgcccaggctgaatgatatytattttgatcctcaagttgttcctgatttggacaatgggaatcccttcagagaccttttgacaggtcctcatcattttttaggcactccttcacacaagatattcattctgtattccctggcccagtgctggaatcagctatttttttttctaagaagcactgattcttattaatgggaaatgaaatttagaaaccaagatctgggcactaagtgtggatattgctactgggttgtgactgcttttaaacacttttggccaatatagacccacgtatttaaaatcatgactttatagtgattccagcacagggttgttcatctctagcccccatttcatatttgcatatcaaatgcaacagcaaaagctgtggtttccatcagcaaaagctctggtttccaaaaatttcagtatatatatagtcattgactctatcctacaatattcagaaaatactttcagaattcctatgcccatagcactgccaataacaaaactactaagcaaagttcaagatttatttgcagttctttctgtcattaggctgtttatatgtacacaatcccttttttccccttctgtgtttatagcattcatttgatatatagctcaattcatgtttttgttcatattcaattttttctgccaattttgttaatttaatttttttttgaatttgtaaaaacactaacatggttccaaaagtcaaaattatacaaaaaggtttaatcagagaagtgacactacctctccttcccttccacccttttcacactctccctctgtagggaacattaacattaattctttttttttttttgagacggagtcttgctctgtagtccaggctgaagtgcagtggcacaatctcggctcactgcaacctccacctcctgactgtaacctctgcctcctgggttcaagctatcctcttgcctcagtctccagagtagctgggattacaggcgtccaccaccatatggggctaatttttgtatttttagtagagacggagtttcgccatgttggccaggctggtctcaaactcctgacctcacgtgatccatctgccttggcctcccaaagtgctgggattacaggcatgagccactgtgcctggccttatcattaatttctgatttatccttcctgtgattctttttgcaagaattagctggcgcatgaacattttaatataccccccttttcaaacataaattatgtactcttttacaccttgccttttttggttaactttatatgacagaaaccacacctttcagtattaaagagcttgttcttatttgtttaaataacagctttatgaagatataattcacaagccataaaattgatccatttaaagtatttgatgctttttagtatagtcagagagtcgtgtgaccatcattacaataaattttagaacattttcctcacccccaaaagaaatctgtaccattagcagttactcagcatttccccctattccagcagccctggggggccaccaacctactttgtgtctacagatgtgcctattctggatttttcatatatgtggaatcatacaatgtgtcatcttttgcccctatcttctttcatttagcataatttcaaggttcatccatgttgtaaaatgtatcagtacttcatttctttttcttgctgaataatatgccactgtgtagatgtaacacattttattgyttcattcatcagttgctgggcactcaagttgtttccactttttgtctcttatgagtaatgctgctatgaacattcatgtataagtttttgtgtggatgtgcagttttaattctcttgggtatgtatctgtgttgtaggactttctccttagttcagctaaaagccaggtttttgtcacacggccattaaagattaggttcgcagacactttgaagggtgagaaggggagggtttattgcatcaaaaggggraaaaaacggaaacagggactctcagcaaagcgagggtcctgctaataggcttctagactcacagattgaatcccagataccacccggaaccggagaggccaggctcctcccgcctgcaaactggcaaacttccagaggctccacccccagtgtgcactcctcccagtgcggaggccagttggaggtcctcctgcgacccctttatacttggctgtctcatttggaccggaattcytggatcatatggctactctgtgattaatcttttaagaaaccaaaaggctgttttccacagctgcagcaccagtttatagtcccattatcaatgtatgagggtgccgaattctcctcatcccygtcaacacttgttattatctgaccctttcagtatagccatcttagtggaagtaaagtgatatctcatggtggatttcattttcatttcgctgatgcctgataattccattttctcttttactgcagcacagtacttctttgtgtggatgtaccaaaatgaacaaggcaattcttgcagtcttttaccctctgggaaggctcattgaccagtgagagagacagactcttttttgttgttgttgtcgttgttgttgttacaggacttttagattttttttttaaaatagtattagtagtttctgtgttttcttttctttttttttaattattatactttaagttccagggtacatgtgcacaacgtgcaggtttgctacatatgtatacatgtgccatgttggtgtgctgcacccattaactcgtcatttacattaggtatatctcctaatgctatctcttccccctccccccaacccacgacaggtcatggtgtgtgatgttccccaccctgtgtccakgtrttctcattgttcagttcccacctatgagtgagaacatgcagggtttggttttctgtccttgcaatagtttgctgagaatgatggtttccagcttcatccatgtccctacaaaggacatgaactcatccttttttatagctgcatagtattccatggtgtatatgtgtcacactttcttaatccagtctatcattgatggacacttgggttggttccaagtctttgctattgtgaatagtgccgcaataaatatacrtgtgcatgtgtctttatagcagcatgatttataatcctttgggtatatacccagtaatggratggctgggtcaaatggtatttctagttctagatccttgaggaattgccacaccgtcttccacaatggttgaactagtttacagtcccaccaacagtgtaaaagtgttcctatttctccacatcctctccagcacctgttgtttcctgactttttaatgatygccattctaactggtgtgagatggtatctcattgtggttttgatttgcattcctctgatggccagtgatgatgagcactttttcatgtgtctgttggctgcataaatgtcttcttctgagaagtgtctgttcatatcctttgcccagtttttgatggggttgtttgatttttttcttgtaaatttgtttaggttctttgtagattctggatattagccctttttcagatgggtagattataaaaattttctcccattccgtaggttgcctgttcactctgatggtagtttcttttgctgtgcagaagctctttagtttaattagatcccatttgtctattttggcttttgttgccattgcttttggtgttttagtcatgaagtccttgcccatgcctatgtcttgaatggtattacctaggttttcttctagggtttttatggttttaggtctaacatgtaagtctttaatccatcttgaattaatttttgtgtaaggtrtaaggaagggatccagtttcagctttctacatatggctagccacttttcccagcaccatttattaaatagggaattctttctccatttcttgtttttgtcaggtttgtcaaagatcagatggttgtagatgtgtagtgttatttctgagrgctctgttctgttccattggtctatatctctgttttggcaacagtatcatgctgttttggttactgtagccttgtagtacagtttgaagtcaggtagcgtgatrcctccagctttgttcttttggcttaggattgtcttgggaatgcgggctctttttggttccatatgaactttaaagtagttttttccaactctgtgaagaaagttatgggtagcttgatggggatagcattgaatctataaattaccttgggctgtatggccattttcacgatattgattcttcctatccatgagtatggaatgttcttccatttgtttgtgtcctcttttatttccttgagcagtggtttgcagttctccttgaagaggtccttaacatctcttgtaagttggattcctaggtattttactctctttgaagcaattgtgaatgggagttcactcatgatttggctctctgtttgtctgttattgttgtataagaatgcttgtgatttttgcacattgattttgtatcctgagactttgctgaagttgcttatcagcttaaggagattttgggctgagatgatggggttttctagatatacavtcatgtcatctgcaaacagggacaatttgacttcctcttttcctaagtgaataccctttatttccttctcctgcctgattgccctggccagaacttccaacactatgttgaataggagcggtgagagagggcatccctgtcttgtgccagttttcaaagggaatgcttccagtttttgcccattcagtatgatattggctgtgggtttgtcatagatagctcttattattctgaaatacgtcccatcaatacctaatttattgagagtttttagcatgaagggttgttgaattttgtcaaaggctttttctgcatctattgagataatcatgtggtttttgtctttggctctgtttatatgctggattacatttattgatttgcgtatattgaaccagccttgcatcccagggatgaagcccacttgatcatggtggataagctttttgatgtgctgctggattcggtttgccagtattttattgaggatttttgcatcgatgtgcatcagagatattggtctaaaattctctttttttgttatgtctctgccagactttggtatcaggatgatgctggcctcataaaatgagttagggaggattccctctttttctattgagtggaatagtttcagtaggaatggtaccagctcctctttctacctctggtagaattcggctgtgaatccatctggtcctggactttttttggttggtaggctattaattattgcctcaatttcagagccagttattggtctattcagggattcaacttcttcctggtttagtcttgggcgggtgtatgtgtcgaggaatttacccatttcttctagattttctagtttatttgcgtagaggtgtttatagtattccctgatggtagtttgtatttctgtgggatcagtggtgatatcccctttatcattttttattgkgtctatttgattcttctctcacttcttctttagtcttgatagcagtcttgatagtcttgctaatggtctatcaattttgttgatcttttcaaaaaaccagctcctgtatttattgattttttgaagggttttttgtgtctctatctctttcagttctgctctgatcttagttatttgttgccttctgctagcttttgaatgtgtttgctcttgcttctctagttcttttaattgcaatgttagggtgtcaattttagatctttcctgccttctcttgtgggcatttagtgctataaatttccctctacacaccgctttaaatgtgtcccagaaattctggtatgttgcgtctttgttctcattggtttcaaagaacatctttatttctgccttcatttcgttatgtacccagtagtaatttaggagcaggctgctcagtttccatgcagttgagtggttttgagtgagtttcttaatcctgagttctagcttgattgcattatggtctgagagacagtttgttataatttctattcttttacattttctgaggagtgttttacttccaactatgtggtcaattttggaataagtgtgatgtgatgctgagaagaatgtatattctgttgatttggggtggagagttctgtagatgtctattaggtccgcttggtgcagagctgagttcaattcctggatatccttgttaactttctgtctcattgatctgtctaatgttgacagtggggtgktaaagtctcccatctttattgtgtgggagtctaagtctctttgtaggtctctaaggacttgctttatgaatctgggtgctcctgtattgggtgcatatatatttaggatagttagctcttcttgttgaattgatccctttaccattatgtaatgtccttctttgtctcttttgatctttgttggtttcaagtctgttttatcagagactagaattgcaaaccctcctttgttttgttttccatttgcttggtagatcttcctccatccctttattttgaacctatctgtgtctctgcacatgagatgggtctcccaaatacagcacactgatgggtcttgactctttctccaatttgccagcctgtgtcttttaattgcagcatttagcccatttacatttaaggttaatattgttatgtgtgaatttgatcctgtcattatgatgttagctggttattttgctcgttagttgatgcagtttcttcctagcctcaatggtctttacaatttggcatgtttttgcagtggctggtaccggttgttcctttccatgtttagtgcttccttcaggagctcttgtaagggaggcctggtggtgacaaaatctctcagcgtttgcttgtctgtaaaggattttatttctccttcacttatgaagctttgtttggctggatgtgaaattctgagttgaaaattcttttctttaagaatgttgaatattggcccccactctcttctggcttgtagagtttctgctgagagatccactattagtctgatgggcttcccattgtgggtaacccaacctttctttctggctgcccttaacattttttccttcatttcaaccttggtgaatctgacagttatgtgtcttggagttgctcttcttgaggagtatctttgtggcgttctctgtatttcctgaatttgaatattggctgccttgctaggttggggaagttctcctggataatatcctgcggagtgtttttccacttggttccattctccccatcactttcaggtacaccaatcagatgtagatttggccttttcacatagtcccatatttcttggaggctttgttcatttctttttactcttttttctctaaacttctcttcttgcttcatttcattcatttgatcttcagtcaccaatatgctttcttccacttgatcgaatcagctactgaagcttgtgcatgcatcacgtagttctcgtgtcatggttttcagctccatcaggtcatttaaggtcttctctatgctgtttattctagttagccattcatctaatcttttttcaaggtttttagcttgtttgcgatgggttcgaacatcctcctttagcttggagaaatttgttattaccgatggtctgaagccttcttctctcaactcgtcaaagtcattctccatccagctttgttctgttgctggagaggagctgttttcctttggaggagaagaggctctctgatttttagaattttccgcttttgtgctctagtttctccccatttttctggttttatctacctttggtctttgatgatggtgacgtayagatggggttttgatgtggatgtcctttttgtttgttagttttccttctaacagtcaggaccctcagctgcaggtctgttggagtttgctggasgtccactccagaccctgtttkcctgggtatcaccagcggagrctgcagaacagcaaatattgcagaatggcaaattttgctgcctgatccttcctctggaagcttggtctcagaggggcatgtagccatatgaggtgtcagtcggcccctactgggaggtgcctcccatttaggcccacttgaggaggcagtctgtctgttctcagatctcaaactttgtgctgggagaaccactactctcttcaaagctgtcagacrgggacgtttaagtctgcagaagtttctgctgccttttgttcagctatgccctgcccccagagttggagtctacagaggcaggcaggcctccttgagctgtggtgggctccacccagccactttgtttacctactcaagcctcagcaatggcagacacccctcccccagcctcactgccgtcttgcagtttgatctcagacagctgtgctagcagtgagcgaggctccgtgggtgtgtgggaccctccaagccagtcatgggatataatctcctggtgtgccattcgctaagactggtggaaaaacacagtattagggtgggagtgtcccaattttccaggtaccatctgtcacggcttcccttggctaggaaagtaaattcccccamcccttgtgcttcctgggtaaggcaatgccccaccctgctttggctcatgctccgtgggctacacccactgtccaacaagccccagtgagatgaacccagtacctcagtaggaaatgcagaaatcacctgtcttctgcgtcgctcacactgggagctgtagactggagctgttcctattcggccatcttggtacaaccgagacagactcttaaactaataattagaacacccactagaacaattactgaggtaagaacagggcactccagaaggagaaaaggggaagaaactcacygtaactgggaggtgaaagttttttgctttttgtttttttgagatggagtcttgctctatcaccagrctggagtgcagtggtgcgatcttggctcactgcaacctctgcttcccgggctcaagcaattcccctgcctcagcctccgaagcagctgggactacaggtgcccgccamcatgcccagctaattttttgtattttagcagagatggggtttcaccatgttggccatgatggtcttgatctcctgacctcgtgatccgcccacctcgggctcccaaagggctgggattacaggcatgagccactgcgcctggctgaggtgaaaggtttcaaagagaggtgagtctgaaagaataacttggaggtggagagaagagcctttgccaagcagagatgcttcaaaaagcttgtgtgcttagagactcggctctccccctctgtattcactatgcttacgacatcacctgtgggctacttatgagagtgaatctttacaacggcacatatgggctacttatgaaagttaatctttttttttcctatacagctaattttcattcttcctagcaatacaggaggtcagggagaaggactggcaggaaggttaaattttctgtggtcacactggcctgtcaatacatgaaaggtataataaaacaaaacactgagtgccataacatgtctaaattataattaaataccttgtaatccatgccaagttcttccctttatgggtataaatacataatgatgatctagatttattttgctgscatctgaccataatgaaatcaacttgcatcgctctcatttccttaatccacttctaaattcctgctaggtaagtcacaagttggctggcatgtctatgagaagaatagattcctggcttgttctgggtttgcatgtggctggcttggctgggggaaacctgtaccccagtaggtggtctattcctatctttcttctcaaggatctgtctgggttctaggtctggaccattcacagctgagttcattctctcaccatcccaggtgcctggttgtgacaggaagaatcgggttcctggtctgattttcgagccttgctccttggacgagcrgtgggcatttgtctggtttgttaatggccctctgcttgctctacccaggcactctggggatggctgtagaaagatgtaaactgaaaagttcttctggcccccctggcttctttgatcatcatctgctcatttattcaaaatttcatttttaaattctgcaaggatgatgtctgctaatgcctagtgctgacactggcctcaaccaggacacagaatcctcttgttcccttaggttcaacatacactgactcaggaccctacaagtgcttggaacagagtgttctcctcaaattcacctacaataaaggtgatccccaaaagcccagaaaccagtaattaaaaaggagcaagaaactgggactggaattgtttgggacaggaaacttaacatttcatttgtctgtactatgcagtgttttgttttgttttttctaaacaaagcatacctattaattacatgaaaaagaaaaaataaattcattctgaatttttagcctggaaatgaagtcctttcttcagattaggttagcatcaaagcccctctggtggctwtcttcagaggctggcagcaggactctttttctctgactgtcgtcacttgccttttctcatacttaactctaagagcttcttttctttttccatgcagatgtcagaaaggaaaaaaaaatgtataacagagggcatctccctactggaggtgagtactcactgggagtgagatcatgcagtgaagtggctgagaacacaggacayaggggttaggctgatgtgacaaagaggtcctgacaagctacttgtggctcagcaagacctcagagaagagcatccttcaccttggccctgagtggcctttgcttttcctttctttaaaacaataataatctctaacacttattagggatccgccattgtgctaagctctttaactccatgatctcatttaattcttgcaatgttcctgtaaaatggagactagtaaagccatttcacagatgaggagactgaagctcagaaaggtgatattatctgcccaagagtcacctagctagttagagatagatagagctagaattcaaacccagcatggtctgactccagaactgaaactgttaaccaccatgccagactgttttttccagtataatgcactttttacatgtgtactgaaacattatgaggtgttcaataaatccaatttgaaaatattcattggcctggcgtggtggctcacgcctgtaatcccaatattttgggaggccaaggaaggtggatcatttaaggtcagaagttcaagaccagcctggccaacatgatgaaaccctatatctactaaaaatacaaaaaktagctgggcgtggtggcacatgcctgtaatcccagctacctgggaggctgaggcaggagaattgcttgaacctgggaggcagagtttgsagtgagccgagatcacaccactgcactccagcctgggcgacagaagaagagcctgggtgatgcagggggactccgtctcaaaaaaaagaaaaagaaaatattcattagctggggggcatggtggtgtatgcacctatagtcccaactactcaggaggctgaggcaggaggatcacttgacccagagtttgaggctgtggtgctagctgtgacttcgccattgcactccagtctgcaaaacagagtgagactctgtctcaaaagaaaaaaaataaaaataaatcagatacttggtgctatcacagtcaagcatttacttaaagtttcaaaaccatcacttttcatttgttttacaggttaagtaaaataatgttatatttaaaatttcacccctggaattttatctgcattgtaaggttggtacaattatgtttctgcattgccatattaagctcagttaactcaatttgaagctatttagattttctgattttagtaggatttgttaggtaattatacatctatatctatgcctgtctagctgtctatcaatacaccatttggcttctagttcttagcttacttattttacttctactgaaatacagtaacatttataaaattaaaagctaggccaggcatggttactcatagctgtaatcccaacactttgggaggtcgagatgggagaatcatttgaggtcaggagttcaagaccagattaagcaaaatagacctgtctctgcaaaaaaattaaaaattagacaggtgtggtgatgtgtgtcttggtcctagctactctggagcctgaggcaggaggatcacatgagcccagaagtttgaggttaaagtgagctctgattgtaccactgcactctagcctgaaagacagagagagaccctatctgtaaaaaaaaggctgggcatggtggctcacrcctgtaatcccagcactttgggaggctgaggtgggcggatcacaaggtcaggagatcaagaccatcctggctaacaccgtgaaaccccatctctactaaaaatacaaaaaattagccgggcgtggtggcgggcgcctctagttccagctactcgggaggctgaggcaggagaatggcatcaacccgggaggcggagcttgcagtgagctgagattgtgctacygcactccagcctgggcgacagagcaagactctgtctcaaaaaaaaaaaaaaaaaaaaaaagtaaaaataaaaggtaaaccataagcactcaaactttataaaaactctcttataagtataaggggtcagacaggcaggacaccaaaattataagagctaaaattatatataatataatataatcatggcaaagcagcttgtaygttctcttgctattgtacagtttgtcattacgatgtcatgagcacctgcacaaagcagatggacctgaacattatccaacatttcctgcagggcagcccccggggctgtgagagcatgcttattttaacaatttgttgtgagtggtcctgaaaagttcctgaattttttgaatagtttagaactacaaccttcataatcagtttacaggaagttcgaataattgctctaagatggcagaagtttcactccacattgtttaccaatatgatttaatctggccgtttaaattaacatattgatggtctgaaatatatatacatgttgtttttactattgttttcaaatgaatgaggtatgtctttatcttctgacatgaaaaattttcgtgatatactgtctagtgggacagaagtttcgggacagaatgtaccatatgattccattttgtaaaaattaatcaatcaattaaacaaacaaatctatatgtatctatcgaaaagagaatccagctaggcatggtggtgtacatgtgtagtcccaggtacttaggatgctgaggcaggaggatagcttgagcccaggagttcaacgctgcagtaagttcatactactgcagtccactctggrctacagaaggagagctcgtctctaaaaaaatgggaaaaaaaagaggagaaaaataaaagaagaatccactctactacttaaaggtcaggggaattgagccttccatttatattttacatttctgtgttgctaattttttaactatatggaagtttattaatgatgcaatccctgatttaagatacaagaaatgcatcagaaatccagatgtcaatgtcctatacagattcttgctttgaaaatatgttctgagagcaatgtgattgcagtccttggaaaatcttctctgactgttgctgcaactttacttatttattttaaatctgtacatatttaatgcatacagcttgatgagtttggagataagtatacatccatgaaaccatttccacaatctatgccataaacatatcaattacctccaaaagtttcctcccaccctcattataatttgtgttaagaacacttgacattgatctaccatcttagcaaatttttaagtataaaatgcaatattattaactctaggcactatgttgtacagatgtctaggacctattcatgttgcataactgaaattttttgtgccctttgaccaatagttccccatcttcctttgccatatggccctggcaaccaccattctactttctgattctacgagtttgactatacctgatacctcatataattggtatcatgtagtatttgtccttctgtgttaggcttatttcacttagcataatgtgctccaggttcattcatgttgtcgcaaatggcaagattctttctcttttaagtctaaataatattccactgtatgtatatatacaccacattttctttatccatttgtcctttggaaatttaggttgcttgcacgtcttggctattgtgaataatgccgcagtgaacacaggagtgaagatatctcttcagtatactgattttgattcctttggatatatgcccagaagtgggattttttaatcatattatatttttaatttttcaagaaacttccaaactgttttccactgtggctacaccaatttacgtttccaccaacagtgtagaaggattcccttttctttactttctcgcttgttgaatttttaaagtatcacctttgaaagataaatacagtattttttaaaacaaaaatatttctccaggcatggtggctcacgcctgtaattccagcaytttgggaagatgaggcagatggatcgcttgagcccaggagttcgagaccaacctggccaacatggtgagaccctatctctacaaaaaatacaaaaattagctgggctggtgtcatgctcctgtggtcctaactactcgggaagccgagatgggaggatcacctgagcttgggaagttgacactgcagtgagctgagatcaagcccctccactccagcctgggtgacagagtgagaacctgtctcaaaaaaagaaaaaaaaatcaagaaacgcaagccactggtttccacagcaagtcttgaccatagctccacaccacaagggggtgctgtgggattctgaatgagtcacatcactggcacctcagtttcccctctgtaaaacgaggataacacccccctcaccgggaggtggcggagctgaaaagatgtggctgtgaaagcgagtgggtctgagtgggttctgggagactgcctttaattttcctaaatttgaatgggggttgggataaggtgagaccaaagaatccctgttctggtygattatgtttctaaaactagaactaagaattcagtgcttagcttcctcctctgacctaagtctcttctcacactcctattcaaagtgctggggtggaaggaagcttgaagtcaccctgtcctcaaagaatctgacaaaagttatgcacctgaatcccagaaaactgcatggaaagctgaattttaaatataattcctggagattcccaggcccacgtgaaggatccttcattgatttaattcaggcaccttattttacccaggagaacaaaatttagaaattaaggccactgaacctggctgttaatggctcacagattccccatccccaagaattgctctgggtataagacccacctacaatgcagtggtgtgatttatgctcctgaaagcacatcctctgccaggtgcagtggctcaagcctgtaatcccagcactttgggaggcccatgagggtggatcacctgagctcaggaattcgagactgacctgggcaacatggcaaaaccccatctctacaaaaaatttaaaaagtagcctggtgtggtggcagctacttaggaggctgaggtgggaggattgcttgagccctgaaggcagaggttgcagtgagctgagattgtgctactgcactccagcctgggtgacaaagtgagaccccgtctcaatacatacataaatttaaaaaagtgcatccttgcttgcctctttccccctccctggtctgttttcctcatgagcttttcctgaagagcatatgcccagtaaatcacacacacctcaacctctgtctggggctctcctagggaatctgacctcatactagtaccaagtgtcactggcatcattttatagattccagacattgataacatgtgatgacaatacactgataagatatctaactgctctcttcactttataaaatcatgcttgggacctcagagatcatttagtcatcttagaggtgaggacatgtattatatatatgtagatatrtactttatattatttatatatttattctcctgctttttccacttaatatcataacatgacratttctctttacttctttttttgtggctccatttggtaagctttgtaaaaagaacttgtatttggggccgggtgtggtggctcacacctgtaatcccagccctttgggaggctgaggtgggcagatcacctgaggtcatgagttcaagaccagcttggccaacatggtgaaaccccgtctctaccaaaaatacaaaaaaattagccggacatcatggtgggcacttgtaatcccagctactcgggagaatgaggcaggagaatcgcttgaacccggggggcagaggttgcagtgagctgagatggtgccactgcactccagcctgggtgacagagcgagactccatcacaaaacaaaacaaaacaaaacaaaaacaaaaacaaaaaacttttaagttcaggggtacatgtgcagatttgttatataggtaaacctgtgtcttgggagtttgttgtacagattatttcatcacacaggtgttaagcctagtacccattagttatttttcctgatcctttcccttctcctaccctctaccctctggaaggctccagtgtccactgttcctcctctatgtgtccatgtgttctcaacatttagytcccacttataagtgagaacgtgtggtatttggttttctcttcctgtgttagtttgctaaggataacgagctcaagctccattcatgttcctgcaaaggacatgatcttgtttttttatagctgtatagtattccatggtgtatatgtagcacattttcctgacacagtccactattgatgggcatttaggctgattccatgtctttgctgtgaatagtgctgcaatgaacatatgtgtgcatgtctttatgatagaacgatttctattcctttggatttccctttacttctgtctttataaagatacttgtgaaaagatgcataatattctaatctatgaaggtagcttttttaaacctaatatactcaaatggaatagttatttgtatttttattattataaattataaaagggaatgtctttatgtaaatatttgtttctgtgtttcaggggttttttcccttaggaaaaatcttctagaaatagttactgggccacagggtatgatatgtattgcaaatttttcaaaaaatttttaccaacttaacattcccaaccacaatgctgtctggcaatttgaaccctcttgccaatatcaagtgttatttttataaaaacaaacmccaaactctgacttaaagtgaaaagaactcactgctccattaatttatctttatttacagtaaagttgattttttcatatatttattagccatttatttttcctgtttgggggcgttttcccccttgtgtagggctttactaatgaatttgtacagtttttgacagccactctgaaaaaatattatactagttgtggactttgttactaagcccttgatttagagatatttatgctataatttctccagagcaacattttttacctgttctgtggcaaagtgtatggggaaagatttgagtctggagaaattccattagtaattaacactcaaccaaatttacctccctcgctacaggcaagacggaatgtctttaagagaggatttctaaacataaaatgtaatgtgataattaaacaaaatatttaaagtggaatggaggcagaaatgaaaacaaccagaaaacacttacatatttatgaaaaaacacaaagtgggcagatgacattgttcaaaatgckagggttagggcaatgtaacccatgtgcctcgaagatactaacaaattcagacatccctaatgttaggtttgtcttaggatttcaacttgtggttttaaaaatgtttctcatttggttgttttcttatttcagaaataaagttgacactaagaaaaatccaattggatagataatcaacactgcaagtcaagcaagtgttttagcctccttctcagtgcagtgttatcatttatctgttttcatgattaaaaaaattaagtgctgacagtttttcaagagacaagattaaattctgtactgaaattcttcaagcttgagctctagccagaggtgaactttattttggaaaatctgagaaaataagctccattaattctgaggtgtggaaagaaagatcttgaaatacccctcacttctccagacacattatttaacctagcacattccttacagcagctgttccaaatcttttccactttccccaaaccctcctaagccgtatggagaaggcagatgctgggtgaccttccttgtccaagctcctcccatctccaaatgcccccatgtctactcccactsaatcataaatycttttaggacagcccactgtctttcctttacactccccttctcctagtccaaaacggagtgccctgttcataagaatggttcactaagagtttaaaaaggaatgattggggcaaaatcaacttaaacaacatggatcctagattttgctggtagtcagaccctgactagagtcagtttccttggaataatgaactaaggcaggaacacagcagagtgccccatacaggcctaagttagaacctggtcctaccactcattaactgggtgatccgggacaaattaacctctcaaccccactccccctcattcttcagatacttcatctcaaaaaatgaggaacatagaaattcctggctcttagagctcttaggaggattaaatcagagaatggagttggtgcagaatgtaccagttaataagcgctcaaaatagctgtaatacatgttgtcatatatcttcaatatatcaaacctctgaataatttgccaggtttgcaaactgttttcctaatctctttctgccttatgcaggcaaacctcagtttaaaaaaaggaaagagggtgttgaaggagagctgatgggaattgtttctcagctccttcaccctgattttagaactttgatctacctctgaagccaggaaaacctgcacctcccccactccaggatggaggacagaacacatgacctctgctttacttcgccatcggctctatgtaccgcgactccctctccgattctagtagtccctagctcagtgcctggcgtagggtggcgcgcaacagtctgcacagttgagttgcttaaatccccacgtcccttctcacgaatggactctgggcagagttgcttacttctgtacctgcctgcttgcatcttagagatcatttttgttctgcagactctaaagctcttcctctgattcctatcagagcataactcaatcacaaagatttcagggcggactattccatatgcattgattatttgtcggttcacttagtaaacatttattcaatgcctactgtgctttttaaaaaaagaagagcacatgtttagctatagaagaacttgtttgcttttttccccctcagatcctttaaactccggtgaggttacctttctctttttgaggctttaaaataatgtctgactatagtgacatctactggtaaaactgagctctaagccaagggaatcataagcacctagcctgttattttgacagttcttttttccctaagtgtggtccaggcggatgtccaaatcaacattctttgataataagaactactaaaccacttcattaaagtcactttcctgctaatgatttctgaatcttaaaagctgttctgtttaaaatactaccgctatccttgctgaaaaatcacagaccaagatgccaggcagccttttgaaaggaccatacttaagaaagtgcacagaaccttagaaagatattgcattaaagtaactcatattgaattgaatggctgcaagccctggctaacacagcattgctatgaactgatggattccaggacatttcagttcacgaatgaattattatttaaaagttaatttgtatgccatgtggcagatacgataacaaagagatgaggtcaccggattcttctattaaagaagtcattggtcaggtttaggattttattttacacataatgaagtattcagttgttaaattctcaaggtatccatcaacaggacatttaacacaacataaatactgtgcatttgctgaaaagaaaagcaggaaggaataagaaataatgcttttataatattagtaaattatattttctaaaatggaaaaataaagcttttttaagaatagatttttaattaccttgaattctgggagagaaacaactatataattctccagtaatttgttgctagcttgcaaaatgttaactacgtctgctggtgccaatgagttttatcaatcaagatgcgtttggctagatgtcctcatggcagcaagaggctgaagcagctctagcaccacctccttacacaaacagaaaacactcttcagaagcctcattgtgagaacaagcaactctttcccagaggtgttgcctgcagactgcctctcacgtatcattggtcagaactggttactttgcccctttctaagccaatcactggcaagaggattggaatgtttggtttagagactaattgaaattcacccctaccttagcccctcctctgggtttgggttgggtgcactttcatcagcgcgtggcacgagaacttaaaactggggagattcaagcaaggaaaaagggaggaggttgaatttgggtaaggaaacaatggtgtctactacaatcaagaggtgaatgtgtgggraggataatgaggcagatgtgggtctctagaaatctgcgtcggatgggaagaacgagggtgccaacccaagagaaatgctggagcgagagaaatgtttgtttgattttgtttggtgtgaatatagaagagatctgaacatatctataagcagaagaggggtcagtagaaatgaagagtttgagaactcagaaaaacaagttcccggagcagatgagaaagaatggaatctccagtcaggtaccagactttgggatttggaagaccaaatttcaaaaaaatggctgagtccatcagaaaattgccaacttttaatttctttgatcaggggctttaaaaaaaaagttaacaattcttaattaaagttactttcgattacaattaattgaaggtaatcacaattaatttccatttatttatcagtttctggattttaaacatttttcttgttaactttctccagttttttttttttggctatcaattacgttattgtgaaaatctgaataaggttggcataatagatgatagcactgtattgatgttaatgttctgattttgcacattttactatgcttattgagagaatgtccttttaaaggaaatatacactgcaggactgtagaagtgcgatggtcaattttatgtgtcaatgtggctaggctaacggcacccagtggtttggtcaaacaccaaaatagatgttgctggaaaggtattttttagatgtgattaacatttaactcagtagactttgagtaaagcagatggccctccgtaatgtgagtgggcttcatccaatcaattgaagactttaagaacaaagactgaggtttccgaaagaaggaattctcctcaaagttgcaacatagaaaccctgcttgaatttccagcctgctgctctatggaattcagactcaagattgcaatattgacttttaccttaattttccagcctgctaggctgccctatggatttccgacctgccaacacacacaatcccataagccaatttcataaaatatatgtctactttccttcttctcctcctccctgtacgttcttctttctctttcatccattcatatatatatattttatatatatatattttatatatattttatatatatacatgttatatatatattttatatatatactttatatatatattttatatatatactttatatatatattttatatatatactttatatatatattttatatatatatatatatatatatatatatatatatatatatatatatatggagaactgtgacccccgactatacaggggtaaatggcttcatgttttcaacttactctcaaatattaactctaggggaatctgggtaatgggaattctttgtacaattcttgcagtgtttctgtaattctgtaattctgaaattatgtcaaattaattatgtcaaattaaaattatgtcaaattatgtcaaaataaaaagttaacagcaacatttatttgaaagccagtttggaacatagcttttctcttatatataagcatataaacttggctacattcctgaggtagctgacaaagtccaatttaacacataatgtagctgaaatactgtgccctcccacagggattaaataggaagaaagcaagaccgttttaacggtgattcaaccagaagggaaaacactgagattgagtaacaaattttaattcatctttacttgggtggaaaaacgattgcacagtttaatattcaactgccaatgtggaaaatgggggaaaaaaacaacagctggtgggttgaggaaagaatggttgataaagaagaaacaagtgcttgggtgtacctagagaggaagggaggagagttttaagggaggttttgtttgatttggtttgatctgaagaaatttgagcatatttatacacagaggatggagctagggttgagtgaatagttgaaataatatcagagagaaacaaatgggatcttaagcaagcagtgttttttaaaattttatataccatcaatttgttttaatagtaaaactggaggaccaatataaagttgttgacttttatatttgccaagtgaagactttaaacacacacacacacagccacccaaacaatgactatccactattaccataatttcataaagggtaaacactaatacataaaggcaaaatgtaaacacttactagatttagcatggtgttcttatttcactgaggactgttttatggactctggctttttaagttagtcttggctgagcatctataagcacctgtgtctatcctggtaacctgtgtgaagcctgctgaagagggatgttctcaaacacacactttggatggtggtacatcctcatctcctccattgtggctttggttcttccgagggcttgcttccccttacctccataggtgatccaggtaagccctgaccttggctctaggttccggttcctcctcctccaagggcaaccttacaagtggaastgtggcactcacctccactggctttactgaaattgcatgtttatcttcgaagtttttgaatactttttatcaccaattctgccctttgttaatgttcaaacccacttatctctttctggttagtggagctttacttgtgttttcgccttgctcatcacctcaccattgcttctcatagaattttttggctggagaaatgtattagcacttgtttctgtttctctaattcatgttagatgcctcttaccttaacagggaacagctggtttggctacacaccttactggtgagattagtgccattcccctgtgctttgtttaggacctttcctgatccacaacctttagggtaaaactccaaggcaattcatgtcctcttacctgtaaatgaaaagyatgagatcaattagaaagtgtttgctttgggtcagacagactgtgtgtgttgtgtgctttgtcctctgtcctttttagcaatgtgacttcacacaagtttcttaaactcgctaagtcgtctttctcatttgtaacatagagaaaataagaatctcaaaaggcttttccagggatcaaatgagagaaatatgtaaggagctttgacatgtgctggcacatggcagggctcaagaaatagtgcctgctgttataaccctcctttcttcctagcactttctagaactatgctgtcaaacatgctaactactagtgtcactgaaacaccaggggttcggtctaggtcctgctgcttgctgcacggaaaggcaatgactgagacaatgagtattgccaaggaaaaaggctttaattgggagctgcacccaaggagatgggggttcagtctcaaattcatctctcttactgattaaaattaggggtttatatagcagggaagacatgttactatgtctgagaaaacaggaactcgagaggcgtaaggaagcaatcatgatgaatgaggggcctggcgtttcattgtgtggatgcaatgacgtggtttcagttctttgatacttcgtgagaggcctggggatcctttcctgaggaaggaactcagatacaaacaagggtcaatttctatgtttatccaaaaacaactgtctatgggactgttagtcggtgtcactagctagtggagatggttgccacaaattccacctgtagttgctcttgggaggaggaggaaccaaagcctggagccaggtcagggctgacctgaatcacctatacagacaaggggaaaagaactctcggaagaaccaatgtcatgatggaggagatggggatgtacaaccatccgaaacaacttacagctctaagtttcaagctttaagactagaagggccaatttctacrtttatccaaaaacaactgtctatgggactattaggtcatttcactagccacatgtacccactgagcatctgaaatatggctggtctcagttgatatgtgcagtaactataaaacacacwttagattttgaggcatggtatgatggaaagaatgtatctcactaataattttttatattgataacatgttgaaacagtaatattttggatgtattgggttaaataaaatatattattaaaatcaatttcacttgtctgtttacattatttaatatggcttccagaaaactaaaaattatatgtgtagcctgcagtgtaattctactggacrgtgttattttagaatcctgatttttgtctgtgaaataggttgacaaattgatgtatgggatctttcttcagagatcactcctggatatgaccccatcgtccacctgacatccctgcagaggatggcatgttgactttatgacttctttggccttaaacatctgctttgtactgtttcttgcttttctcatgcacttagaagattaaagatcttaataagatagagagatgtcatctgaaaaaggttggccagatagcccatcatatccccaagggtcgagtcatgaagagatgggaaatctgcttgttagcatataggtggcaaatattgggtattaattaagattaataattaatacttgcatttgggtacaagtaagagaaacactgttttttggggggttttttttgttttgttttgtttgtttgagacagagtctggctctgtcacccaggctggaatgcagtggtgccatcttggctcactgcaacctctgcctcctgagttcaagcgagtctcctgcctcagcttctcgaatagctgggactacaaggtatgaccacaatgcccrgctaattttttgtctttttagtagagacggggttttgctatgttgcccaagctggtctcctaagctcaggcaatcagcctgccttcgcctcccaaagtgctaggattacaggcgtgagccactgcgcccggcccagaaacaaattctaacttaatcacaagtagggaactaattggaaggatagtggggatctcacagacttgatggaagagctggacaactgggcatcaggagggacaggacccagtctgtctacaggatttctacagccggcacccacggcccttctctctgggcactgccactggacagctccttctgcgcttgagaccctgctcatgattcaaattacagagagagataaacctgacttggctgagctcaggtcatgggcctgcccacttcctaggccattgggggtaggattctgaattgccagctccaccaaaactagagacttagatttcagcagttccccaaaggaagggggttatggcagaaacaatgctttaggttcaccaaattctgttgctattgttcttttcctcttcctgagcacaaaggaagacttatttcctaccctccttttaagttaggttacagccaatggcatttgggtagaaacgatgttctccgtcaagactgttgatgtaaaatsttggtaaacttggaggctacctgtataagaagtcaggatcatcagggggaaggagcctggagcctaatcaccactcaaaggagagatactgtagagaccttgcaacttacatcagactgtgagggaatcgagatataaaactttattttttaagactcttgagatttggggtgttgtctgttatagcagccagcataattactctaatacagggatattattttagaagaaaggggatgagggaagctgggaatacattctatctctctaggaagagcaacaataaccaaaaacatagagtcttatttgtgaaacgatacaaattttattaatatacaacgggaaatttgacagtttagggaatcaggtactcaatcttttgattctcttctgcacttatggtatatgagaagccagattataatcacatagttatttgataacacaaatatacaaagaacaaggagtgctgattttrtaatgcagtgttcagggacatgaagacttgactgtgtactcattgggccatgtttcttaaaatgaagttcaagagtccctcaaaccagaggtacataaagcccaggataaatatgacacatctgcctagggtaccaaagatttggggaataaaaagctaaataactgaattggtaatttaaaaaaaaaawtttacactaaaacacacagatatattattaattaggatgcaaaaaattgcatggattttttttttttaaagcatgaagcctccaagaggatttgagcttgaagtgggcagctttaggcttagggtaagcagaatagtggagtcaggagcacaggcttgtagttggacagaccagggttttgagaataagactcttgacacttattagctatgtgatcttcgaaaagtcatgtaacttgtccaagctctataacctcatcaatataatgaaaataaacaggcttgttgcagggactgaaggagccagaccacaaaactagctaggacagacacctgaaggatacagtaaagtatggtggttagtgtagctgtgatggtagctatgcctccagattcttctcagctattaggggtgctttggggagaaaagctgggaagtcactatcttggtgtatctcatctctacaatggagcaagcctgccagagtcactctcctgtcctttctcctgagcctggccacctttcttctgattggcacactgcacctgtagaaacagtctggggaagttacggctgaatgtggctggcccagggttcacttctgtatattcagatgactgtgtatagctccattctttcctgcttggaggccgtaggaagccagctcatgcctaggctcttgggcaacatcttgctgtagcccacgcaaactgattatatagtccatatatgtcatgtttgcttccagttatgaccaatgtgagggcttgacaatatttggtgtttccttgcattggctaggattgtttatggctactgcccaacaaatgttaattagtagatcggaagaaataaaactgaaatatatgcagtgttgtcatcaccttctattctttcacttctagctcttgctctaggaggggaaggaggaaggaggacatatgtatccctaaatcccaaagtcaaaaaccaactctttctccaccacagtgacaaatgactccctgttctgcattctaccaccctcaattatggaggcagcatgaagtattggaaagggcaaggtctttggagtcaggcagacctcatggcccaacctcatcatttactagtgaggggactagaatttagcaggtaggtaaccccattcaacctctttgaacttcagttcccaatcagtctatctcccaaggttggtgagggaatgagacaaagattaagaagctcttggctgggatgaggtttattcaataaatgttagtgtcctttccaagtaaaaattgttttggtgccataggaaagcagacatctgaatcagggccacacaacrctttctaggatcttggaggatatagtcctattaaaaaggtgaacttcagtttcatctttatattcccttcaatcatggagatgtgggaatttaagtatggtctgcagactctatgaggcaaaagaggagggagcaaaaggaagtccgtaaggtgagtcagggtgacagcccagattaaagcagtaaacatctctctatgcatgtatgtatgtatgacataatgtatatatgtagctccctatgtcttttactccttttctttctcctttcttttccatcaagtcacctttttatttttgttccaccaawtttattttattttattttattttattttattttgactaagttatttacccacctggttcaaaattcaaaaggtgtaaaaggggattcagtggaaagtctcctctcacctcgcccttcagctgccaaaggcaaccaatgttaacagtttcttgcatatcctcctggaatattctgtttaccctctttttatacaaatgagcacatactcaaccatgatatgaattttgctttttcacttaacaattttggacattattccacacccatatatggaaagcttccttgctcttcttaaatttatttttaattgcattayattttattttgggtatataccatgacttacttaaccagtactctattgagggacattcaggctagttccatttcttcttgctattacaaatcaggctggaataaacttgtacatatcattttgcacataagtaaatctgatagatggtgccaaattgcccttcctagaagttgtaccaatgcacacatgctgcaaagtaccaaagacttctgacttttctaaaatgcacatacaaaggaactaragcacataaacaggaagtgtgttcatctgttgtatctcgtactgtcacccaggctggagtgcagtggcgcgatcgtagctcattgcagccttaaactcctggactcaagtgatctggccaccttggcctcccgaaatgctgggattacaggtgtgagccactgtgctggccttgaaagataatgtaattatatgttaatataaataacactttaataaaaaataactattttccaaaaaaattagtgagaagagtggcattgctttttatttttgcaaacctggcttgatagataatagctgtattctcctatctgcttctgcattcaagctgttgcaatttcatgtctaatagcctctggaaagctccactgtatacttatgaaagaatgattgtgaaacagactaataacattcttagtattattattaaaatagttttgacatcgcaaacactttgaaagggtcctgaggactctgaggtatccaaaccacactttgaaaacagttggtttagaccaactttattatattttattattcttatcccctatatatctaatttttgygaattttatctgtcacaggctaaaaaaaccccatgaaaatgtcctaccttttgttgatttttgttcttttgaggtgttttgctttatgtaattgtgattgtgtataatgtggtacatacatatccaagacaattttatcgtttatattttttttttagtggcttaaaacagtaataactggtttctttttctcacaaatstgcaatttgagcagagctcaggaggtaggaggagggcttgtctctgctccacacagcatcagctggggcagctcacctgagagttggaggatccattcccagtgtgcacactcacctggctggcaggctcatgctggctatcagctggtagtgcagatggggccaagtgtcagggcctcagttcctctccacatgggcctcttcatgtgggcttctccatgtagcccaggcttcctcacagcaatgtggctgatttcccagggggaatatcagaagaaagaaaatgttagtccattctgaattatgctattgctttgaattcaattctaatattattgagctagtacctactataatcatagaaaaaatcaaatatagttgtattattagtttctctctttctggtatgttcttggcacatacagcttaatcttaaatcatggtcaagtatacttggaacagcggtaagaacagccaggttcttataacctcagatacaggccttctggttagtaatgcactcctctggcctggcctttccatgtacttctgctgcaccatggagctcccaaccctggcatggtactttcatgctgcaccattcacctgaacacatttcctcctgcccaagtctacttctgctcaactatggttttatactttcctgaccccaccctggcaactaatcatgaatctaggttacttcctttgcttcatcaggcttactggtattaatctcacatggtttctagaatcatgaaagtttagtggaagagacccaggctctttctctagtaatgacatttcstgagcccagtggaacgttttcctgtgtactgggcatctctgctacatttactgccctcccttgataccaagtatgtcttctccttaccctcttgctataaagcccacccctgaatttccaggagatgagaagtgccaaggttcatgggctgtgaattgttttcccaggtccagctccaaacttaatgttcaaagaggctaaamcgtggatccatcaatgtggatcagagtccctgataggttatcttgcagaattctaggtgaatatggtagctgtattagatctgatataaggcaccaaacggggcataaaacagcatgcttagggtagtgtccaggattcatatatccaaccttcacccatataaccaaattctaatgcccattattgaccatggatccatacacacctagatcagagaccagggtgatatcaagaacatctggctctcttcccactagaatgccctcaagagagtaaatawgcttaccgagtgcaatacgtaagaggctaaaagaaccatgctgagtacacagtgcatgggaaacacacataaatcaggcccattccccaggtcagagccaagcataatacccatataagatcagagctagggccagaactggaaaggtggtaacacctgygcatgaaaggactggtgatccttggcagccctatatgggaagatcagctaggaagtgaaagctggccaacagcacaattctgtgctagcaggagggggccgaatggagtttgcattctgataggcatgttcctacggttcctggtgaggctgctcgggagtaaggactctggtatacgcctcattttgaagaggagagtgaatactcaattctacagtcttaaccacagttcaayacttaatgttttcatccttcttaatagtctataagcccttctatggcactcatttgcaagagggactgggcaagtgaggaaaacaggctcaggtgcattaggtgatttgtccagctgaaaagtgataaaaccacactagaccttcagatcccaatccagtgctttacccactcttccaagatggattatgtgggtaggagaagctagagtccagaagaaacaaaagcctaagctgagccattggaggctaacaggccttagagggtaaataagagaaggtaaggacaggggggaaatgcagaggaaggactctactggcaaacatgggagctagtggtaagactgatctgagtatcccatttgtgttgggatgtagaaatcaggtcggagaagtgggagtagggccagatgaaaatttgatgtgatatggtgtgtaataaggcatcactgtggtttcatgagaactagagtaacagtgaaaatagggctttaggaacattaagctggcactgagacaggaatcagagtggaagaaagagtcttgaagcaggtaaccagtaaactgttgtggtaattcaggtgtaaggtgctaagtcttgggctaagatggtggcagtggaaatggtgaggaaagaataaatccacaagacaataagaagacaataagaagaaagactcttcaggatttagtaacggattagctacaggaacaaaaagtacagagttcaaagctactttaagttctcaggatctagaagaatgaaggtctcactaacacagaagactaatgcctttattttggagagataaacagattacactgttcatctgaccctcttgatagtacaagtgggtcagacaaacagtttaaactttgagattatatcccagctgaatggctagaggtcaatctcctacagaaaatatattttgaagcatagggttgaaagggaaataagttatatatttgctataatcataacaaccaacatatagctttctttcatattattttattagtacttataaaaacaatttatgaaaatattttccttttcaagatatagaaactacgctctgcaaaatatacatacccatagttgttacaatacatatccttgtatacaccttggacattgtgtttaagaatcacaccctgtaagggctagaagaaacattttctctaacctcagttatatagtgtgacattcaagtacttaaactacattgttcaaacaaaacatgtctctagtgtatgggcctaaagggatttaactttctaggtgccaytgattctttcactgtgcaaggtaaagaactggaagagggttccctgagagttaattcaccttaggtagctcaagtagtggtttactgtccatactttatcatggaactaaggaagggaggaaggccatggaaattcaacttgggcaggtctcctctctatcatccctatctacgaagcatggcccctatgtgatgatttctgagacctctagagttctcaaatgctcctgattctgtaattatctaagatatttgcagaatgatgtttttgcaagtctaaattccaatactgtaaatcaggtggaacagagatgactcacctacatagacttcatttagggtttgtcaggtgtcaaggcaattgataaaatcagcaagccaaaaattcccccattggaactattggaaaagattctttctcactaaggcacgaaccccagaagccaagttcctctttgctttggaaaaattatgatgagagggtaggaaagagcctataacctttcaactctgcaggcttaagataatgacagatgcttcatctgacacagtaagagctggaagctattgcaacctcaccaataaagggctcattacaacaagtaaccatttatgtatactccctaagtcctgactaacctcccaagcttttctagatattaaattctctctaactgcaaagtattggtctgatgaagttccaggtgtaaaacgtgctgtttgaattcatggcgttagtgtcatggtgctgcatcatggtatggcactgacatttaacatcatgctgataaactagaattcatagtgattttatttcaatgcaggaaactatgaaagtcaatcaaacatggattcacaagtctttacatttaatgtataacataaagcrttattacacataatttcataactataaaaataagtttaatacattaccatattttaaaaaattactttaaaaacatatactccaaagtcttctatttcatttagagaataatggaggtatctattagggtgaatcatatgaaacgatggtttttctaagttaaaatagtaaaatcttggcaattacatatggttcaacctaataagatcctgagaaaattttatttggcatcacactataaattcaaggggaatttatagaaaatcacatttctagtgaagagaaaacacttcaggatggaaacgtgcacactggtcatgccaagatttctctttgtgatttagagatctgaaatcttggaatgttaagaaaaatttagtgcagtttcaaaaaaaagtgaggacaattaaaattatagtatgctagctgcagttgctaatgccactgaaacaaaactactagccaaatttggcaatttaagtgttttagaggtgacataataaaaattccagcattaaaatgaaaaggcacaaatatgagttacaagtatgataatcatttataaaatccttgaaaataaggccaattcatttgtattattaacaccattaagcaggcacctattctaagcttcaacttcatcctcctaaatagaataaggttgcaaatgaattatcaacataatactaattatagcagcattatcaattgtctggaaggcatagtttataaagatcatggtagtagaaccaagtttcttaggctctacactgctaaaagaatatctaaaatagcctccccacccatatcccatcagtaccaaaaatacattttaaaaattacataaatattactagccataaaatgttttggtttttcttcaaacaatgagctctcctctcaccaacttgaccccaacaacaacaacaaaaaaaaccaaaaccaaaaccaaagctaccaaaaaattgttacaccaaacagactagctattcttaactaaagacatactatattcaaaaatggtactttaggcaatttattaaatacaaccaatgaagaaaatgcagattttccagatgtgtgcgtatgctgtatgtgaattaggtgatggtgtacttgaaaaaaatatgtatttcagcaatgatgcttcatttggaactttggtaccatttacgaatggccgctccaacattactggctactacgcagagagcaccacccactgtccaccacgttggcacattattaaagaaaataatctgaaagataaaagcaaagaccacatccattgtcttcattattgctactggccctgctttttctatttgaagtgcttttgtgataaatatctgaccccccaaaccaaagagcccaatgaatatgagaaatagcctgtccaacccacagtaaggcagactccactctcctaatacagagaggatgatgacactttcaacgaggccaagtactacataataccaaatgctcagaaagtagtccacagattttcccatttttcttaggataactagagtcgatgcagcaaatacggcacttccaattgctgcgaatgttcccttaaggtggcctgaatagctttcttccatccccgaagtgtcggaaccaaacaaaaatggtggtctcacgataaggatcactccagtgattgtgaacacggtgaaaagagcatcccaagggctatatttttccttgagacatatccaagcaaatatggacgtaaacactggactgctaaacgtgataactgtggcatcagcgagggacattgtctggtaagcatagtatataagcatcatggcggtagaaccaaggactcctctgagaatgaggaaaattcgttgaccttttgggcctataaacccagttctgtaaattcaaatgaagaaatgcatattaaatgaaattaatatttgtttttaaattacaatttgtaattaaacattattttaaaagtactaaatatcaaaaaatgagggaatagtaaattaattataatatccacaaatgaatattatatactttttaaaaatagtattttctaagtatagttaatgacagtaaagtgttcacagtaaaagcaaaaccagtgcaagtgaattacatgcatagtaaaattataattcaattaatatagatatttatcccacgtatatgtatatatatgcttgcaaaaaggacaaaaaggaaaataaactaaatgttaatcatgtttatatcttaatagataaactcataggtaattttctttctttatatttattttctccaaattttctataaacatatcacttttatgataaatacaatgtcaagattcagctgccctgtgtaaggaaacttagacccagctaatgctcattctcaatctcatgaatttttctataaaacttgaaactgctaaaatttattttagtcattgaatatgagacaagttttcattgttctcatgaggaaagagtcaaaacacactgaaaaagaacatgtagtgtttggaaaagtatgattactgctattcaaattctttttcaataaatatttactaagtacccactctgtgtaggttcctggctaggtgcaacttgctgacgtgtgccagggctagacttcattagattatcatctaggctaccccgggtatcttggagttaaaatgaaagcacggtcacatttggcccatactttgagaagcaaagagtcttccatgataataaaacataaaatgggtcaaaacagatgaggaccaaggattttaacaacattcttccagtgtccttcccctgacaatatctttatttcaaaatgggggagatgattatgttagcatcggtgttctgctgctacccttagaaatttctaaagccctaccatcatttcttaaaatagtgtgacttgtccgcattgacagaaatttgcaggtattagcaggttttcacttttcccaccaaatcatcaggatatggagtgaaactattctaagtgaatccgcaccatgttagagatacaaggagactttggtgacaagtgactaaagcttttcatttggggtgtagccttttttgcccaaagagacaaagagccaggcagccaccaaggacccaactggtctcgctctcagggttctaaatacactgaggtatatggaggttacaatggttgaaggaggcataattttaacccagggagggtagggagttcaacagggaaggaaaagaggaattgggttgggagagaacagagagggcggaatagagacaattttcatatactgttacactctacacaaggcactccaccctataataaatcttatttgacccttggaatcaccttgtagggcagaagtcacacagtatcattccctctagtttacaaaagaggaaactaaatacgaaagtaaccttgctcagggttaccccatcaccttttgaggaatacctaaatattattactataatcttctatttgccctggtaagaaagcagcccattctaaaaaaacttctgatactaggatacactattacttcttttcattcatttttttaacttccaaacagtagttatgccaaaggaaagaagggagggtgatacaagacaagaggaattatacaaagaaagctctgttttcaaaaggggaggtggtgaaaaacaaaatttctttctccccactttgttgggtatgtggtttatgctcatggtagaatcttctgtgggtagatgcttatgacttttcattaagcagagccaaggggcataggaactggtaagtatatgagatggataaagcagatagagtaattataggcaggtgaaaagatatacacacatttattaatatcttctactttgcagttaaaaaatacttactttctgtatattaagcaagggataacaactagcatttggaacacacatcgaaacgcactaatctctacagcatggacgtcttgcacttttttaacaaataaagagcccactgagaaaaggaaggcagacaataatgtgtaaaacaagccaagtccaggacagggtgctttcttcttggcttctgaaaaagattaaattctggttagtccttgcttccaagtgtatgtgttatcattttcacttagaaactsagaaaaatggaacagtgtcaaaggtcaacaggctttattacctcctaagcatatcatttctctgggcctgtaccattttccccatcaattatgaagaaccatagatgaggataacaatttaaacctgcatttttaaaatgccgtttcgccctatcaaatggatttcctatggctcactgaagaatcatcctcacttacaagtcaagaagtagaacgcttgccaagatggtgagagaaatctttaagaaacacttgtcaagatggcaagtaaaaaatccttccaagtgatatcttacgccacacctcactggcgaaattggctttatgaagaaagtgttcttttctggaaaatgggttataattgggttatacagttatctgttgattatttgacttcctcccacaagtctgtgagctcttccagggctgggatcttgctgtcttgtacatgcctggcacatggaagacactggataaatattcagtgaatgaaagatgagagaacttcagggaaagactcaagagtctaacactatcggcaacagcataatctgggaaggttctccattttgttattttgaactgttaatcaaatctatatttaacttttcatgctttcacgacttatcttcccattcagagcacaaactcctcaaggggagggtgtgggttatctagccctttggatcccaagtgctttgtacagaactgccatctaatccctactcttggctcgatctgaacgaggaaaccagtgctttctccagggcatcaagtattcagtcattaatgacaatctgtgtgagctttaaacttgtttagccacttactatgtcttagtttcctacacaggagtagaacctgctttcagtcttactcctctgtcattcagagagcaaaagcagcagggtgggcagagaatgccctaaaacaaaggtcacacactgcgggatatattcttttttgaaattaacacaaaracagggttgagggtaagaaggaaacacaagtggccctcattgattaagagcacagtggaactgaagggtgagtggatatgagcaacttgtaggaaaactcgtattatcattccaatctaggactttataatgtgatagctataaaacagtattgtgtaatgttttttaaaatgcccttctctgataaatgtaaacaccaggtaacacatttacacatcctcaggttastgagatgactttgcaaactgggaccaaagtatgctgatgcacaggctttctggggcattctacagcctggccttgtggtcaaaggcaccattctctacctcttcctgttctaggtgcacagctgaagatactgctttggaactagcagtagtccttcccttaagatgccagaatcctcattctgttctgtatccatgtgcttgtatactgcagaaataaactgcacacacgcagcccacgagaaggaagctttagaagacttccaagtgaagcaccacaaaatacatgccttggctgtggtcagccttagggtctggcctctgaaatttcagaattcagttccaaataaaacagtttttcttaaaagaaactcaacccctacatagaaactccaccctcaaacagaacagaccgagaagatcaaggacagaaaacatctccctgctctgtttcaagtatcttctccaacataaacttgctaatttttccccaggaatattttaacttaacattaaatattttaactctttaaaaatgtaattgcacccccttggccctagtgacctttccccttaaaacacatacacatgtattttcttgcctataaacacttaaggctcatgctttccaactgggaagggacagacattagaaggcctcgctgcatttgatgatttgttaacgagggtgaggactggctccactcagacaaacctcagtttcttactaaatcatttcaatcctgtcaatggagatgagcaygactagcataattgaaagaggcatttgtttaggttccatgttcatatctcacwgcaagcatatctaataatttggtaactcaaattattcaaattaggtaagtggccatggtgtaatttcctcacttagaagaaaactgaaaaattactcagcttctctatcctctgctttcagctggtgattcgcaatcctggttgggaattagaatcacctgagtaacacttaaaactttaattcctgggtgcagtggctcatgcctgtaatcccagcaccttgggaggacaaggtgggaggatctcttgagctcaaaagtttgagaccaccctgggcaacacggggaaaccccctcatcaatgcaaaaaatatttttaaattagtcgggtgtggtggtgtgtgcctgtggtcccagctactcaggagacttagatgaaaggatcgagtaagcccaggaggttgaggtcgccgtgagctgtgatcacgccaatgcaccacagccttggtgacagagtaagaccctatctccaaaaaaaaaaaaaattaattctcaagccccatctcagacccaccgaaatagaatctctgtaactctaaaaggctccactagtttgagaaccactgctacactcgatcactaactccctccagaggatgtgaggcacaggcctaagaaactacttctccttgcttcagtgtaagacccacactgtccctgaagaaagtatggagatgtcttgggacagctgtatgtgtctgttaaggtcatccaagaatgtaagacatatgggtaacagttccaascagaacttgaaaaaagctttgttgagataagcagttagaacaagaggtgtcacaaagttcaatgacaacagtaaagtgtttttatgtcaattttctttccaaaatattatcttgtcaccttacaataactaagtcttactggtagaaactttctttgaagttaaacacccacaagattcttagatacactcacgtaagtttctcatcttgccatgagctgcctgggagtagagaattcctcttccattcacaaaaaggggaaactttaagagtttgcatggactgattcggcatgccaccagaaggacattcacccagagggtgataggtgagaaactgaccttttcaaaggctgcttatctgttcaattcagcctggcataacccctgttctagaggcaccagcccatttataaatgatcacaagtctgatcatttcggtttgcctttaggacagaaatggagcaagaatagtcttcctagagtctgtctctctaacttggggaaagtgcacaaagggaggaggggaaagcgcagtgagaggagaggaacagaaatccagggtcacacttaggggaggtgacccagaggacaaggtggtgcaggccgtgtaactgtcctaaaaagagatctgcctattcccttcttcttgcaggaagctgctcctggtagatggtcgacttctaagaggaatgtgcttgaagcagcacttgtggccagtggaaagggccctaggccggtatatggcaagctgggatcctaaccctggtgctccctggacatgcgccccatctcacccccacgttccacatcttggaggagacaaagcaaacgaaaacccaaaagccctcaccttcctgggcctcactttgctcatgtgtcgaaggagggggactgaacataaagtgttcttcacgaggggtccctgactttggggacggggctgtgagcttcttaacaagatatgccttgttctgcatcgtttgctaaaaagtccttgtatccctaaaggttaaaaactagcggtcccacttatctctgcctttccaagattctaaaactctaggacgaacattttttctagactcgatgcttttcagcttccttttcggagagaamccttaaccaccgggatcacttttcagggtcagcttcctcgcaacgtcgccccactgcaggatggcctctctcgctgaccccccacctacgacctaggggagggtacgccaaactgcagtctgactccacagccctgccccgacactaattacaggagcagcctcggaatcccaaaaggactgctaacaatcggaaagtttcttccgtcttagcgccggctggggcgccgggaattccgctttgcagccccccagctgacagctcgaggggtttcccgagccccgggcagggtggggacggaggcgcggcgggcactgtgcccgggttgcggggaccccaacccgccggcgcccgctcgggacccccgagcgagaccagagcccgatccacaccgcgcactcacccggctcggtgcgggagcaacacggcgaggaaaggcagagccagcacctaccgcggtctggcgccccagctgcctcggcggccgccggctcctcagtggcgcccgggggtgcatcgtccrttagcggcagcccgggctcctggagctccgcgaccccggtgctgtcctgaggccgcatctcgcggcacgcgctctaccagcggccggtgccgtctggcgccagcagcagcgcctgggctgccgctcttccggcgggcgatggcgcccatgcgcatgcgcgcccggcccacccgcaccctcccccaaggagaccgcgcgcgtcctccgctggcctcttaacctggggagacccgctgcctccctggtcgggctgtggtgcccacagctggctctaaggcgtccaaccctctgctgcgttcaggctacatggcccagctgcttggagccatccttggcaagtcacactgaacctgtctgtcatggcacagacaaggaggggcgctgggttcccaagccctggcgcccgggggtcctgtggcctccttttcaggaggctcaaagagtgggcgttttttcattgatgtaaccacgcattcagcacctctgtgataccccgaagattttacaaagcaccatgcttgtctttaaatggtctagggtttttatgttttgttttgttttgttttgttttgtttcccgtgttgtccctttgctgcttaccaaggagggtagaattttgctgttttgggaaatatttttaagaaagaattagtgtgtaattataggaaaatatatctataagactgaccagaactcatttatatgttctttgcattctttgcaagagtaggcatgcattattgatctttggttttcttttcttaaatggaaatatcctaatttggccagatgtaagattcaagtaatctgatgtaattagacctggtaaaagatatatattctttggcccaggattcactaacagcctctttttgtttagctaataattcttcttccatctctttgcttgctttatatgtggaagaacagtctctgtgcaaggatgaacgtatctaaacttctaagtccagtgccaagcagatcaccaaaggagagtgaagtttgcctttactcagacatttgcacatagtgatccacagctgaaacagttttagacttgaagtcaggaatcctaggttctggccctgagtgtgtgacctcagtcaccactgtacccctcgaagccttgattacctcctttatttaatagcgatcaagtatttcccttcctgcttcgcagagtagttatgtaaataaaatgcaatgatgtgggcaaaagcataatatcacctggaaaacactatgttagaaaatcaaagtgtgttttaaactagggtcagcatataatttatcctccaaactggacctttttttttttaagagtaaaaggaggagctcttttaaaagttacacaagggaataggcataaactgggactgtcctaggcaaactgagacaaatggtcacctgaattctaacttgattaacacatacttttgccttgtcttaaaagagaatttaaggctgggcacggtggctcagcctaccatcctagcacttcgggaggctgaggtgggaggattgcttgagcttaggagtttgagaccagcctgggcaacatagaccttgtctctataaaaaaaataataatacttttaaaagaatttaaggctacttacaaaaatatctgtaacaggttttgttgtcgttgttttagatagggaaatttcagggaaggatggtaagggtggtagatcatgattataaagcaagaaccaggaagcttcctcaaatatctggaaagtcaagtgcagtttcacaattgcattctaagatttcgatatggaaagggtttgaagagtcccctcctcttaaatggtgaagattatggctaggaagtgtggtaaagaagaaagaagtgtgatgatttgagaaggaagtaccctgactgctccactttcaacactttcaacaccatcctcgaaaagggagaagaagaagagaagaaaatgggtactacaccagttattaaaggtggtgagatgatttcatacctgctgtttattccctttaacttccttcccctccactgctgaccttcatatataaatggtatcagttatattcattctcccatttagctgacagccatgctgacataaaaggcaaccaatgagaaaagtgcggaccaagctggcctgtaatcccagcactttgggaggccgaggagggcagatcacttgaggtcaggagttcgagaccagcctggccaacatggtgagaccccgtctctactaaaaatacaaaaattagccaggtgtaatggcgggtgcctataatcccagctgctcaggaggctgaggcaggagaatcacttgaacccaggaggcggaggttgcggtgagccgagatcacgctgctgcactatatcctgggcaacatgagcgagactgtctcaaaaaaaaaaaaaaaaaaaaaaaaaagtgcggaccagactagaagtcagaagacatggctgtcctgaagctccacccagtagaggtgtggggctgttaaggtctctcctgaacattgttatttcaggtctttggtgatgatagtgatattgagctggtgacagatagatctccataatgtgcaggatgggccagaaatcccgactgtagaggagactagttcagagcctattgaagtgacccagatgagattctgaccccaggtagagaaggcaaggaggaaagatggattttgaggtggctaggagatggaatgtgcagaactcgttgactagatgtgaaagagcattgtttctgtatgcaaaattgtgctgtgttccagcacacactcttctgcttctgaagtgattcaatcttccagtgagaacaggagctctcactgtgatgccaggtagccacagcaaggatggcactcccatagttctggtgtcaagaaggaagatgaaaatggagaagaggtgggttttaacctgtccctgctaaccactgaaagtccaagatcctcaccatccatgtggcagcaggtggagacttccaggaggagtcagattcctggtttccactggtctttgcatgtcagggatgttcctaagtgagacgtttgtatgtcagaaactgtctttcataacaaactggtaccttggtactgatttgaaggactgcttttttttttccaaaaaattcatggattcttaccttttaaactaatgcaacttatgacttgggaaatggcagtttgttccaaacagccctaatgttttgttttgggaaaaatcagtactgtggaacataagatcatatttctaaataatctttgtaaatgaaagaagggaccagcaaaagagaggtcatttaggataaatgtaggatagaacactggagaggcaaaataaactgttcaaataagtaggagctgactctgataatataacagaaaaaaatgccaggaatggctcctcaaaaaattagacatagttactatatgatcctccaattctacttctggatatatattcccagatgaagtgaaagcaggaaattgaacagatatttgtacattcattttcatattagtattattcacaactgccaaaagctggaaacaactcaaatgtctgtcaatgaatgaacagataagcaaagtgtggtataaagcatacagtggaatgttattcagtcttaagaaatgaaattctgacatgctacaacatggatgaaccttgaagacattatgctaagtaaataaactgaacataaaaggacaaatattgtatgattctatttattagcagggcctagcatagtcaaattcatgagacagaaagtagaatgatggttccccgggtctgggatgtggagggaatgggagttagtgtttaatgggtatggcatttcagtttaggatggtgaaagagttcggtggatggatggtggtgatggttgttcagccatgtgaatgcacttaatgccactgagttgtatatttaaagtggttaaaatggtaaattttatgtgtattttattaaaatttttaaggggttaaaaatgccagggaaaacatttctgagagtttgaactttaatctctgtagacagtttaaagcccttaccagatttttgaagtttctttgaagtcctgtgtttcatctttaaaaaggcatgacaattttccattctgatccctaatatgtttatctttatcttcataccatttttcatgtaatgcattcagctagtgttgtttgagtgcccactttggaccacgtacagttcttggcagtggtggagttgggaacaaaagagacaaggccgaggacgtgatcgggatggggagggagatgatggagaaatgaagaaatgatgctagcattacctagcatcctgcaaaatccatgagccaggggtgtggcactcgtttagttcccagctttctgttctctcctgttggacagattgggctggaagtcaggatgctccctttcaagggagctctgacgatggggccaggacattctccagttcttccttgctttcctactctctgatctgttcccatgctgcaaaaggcaccttctgtataaacgatttctgacaccccagggaacttgtatttttctatgagaactttctgtttatagattatctgagagtgaggatgcctgagctttagagttggccctgggtgttgctacagaattcacgttaaccccagatttgtcataacttgggatctggattgcactcaactctcattttgataattaccatttatgaaagaatcaaaatgtgccaggcactattgagctcatcagcttatttgatactcaggagagctttatccagcagttttgcttaatagttaaaagcagggctctggaatcagaatgcccagggtccattcctggatgtaccacttaaccagccttgtgacttccgacacatgacagcccattgctctgagcctctgttttcacacctataaaatagaataataatagtatctagctgttgcgaggataaaatgagataatacttgtagagtacccgacagtaagtactcttttttaaacagtatgcattttatcatcctcattttatagatgagaaaattgaggctcagagatgttaaaccagttgcccaaagtcaaactgatagtgaagggcccaggtaggattgaaacccaggatcatcagacgcctaggtgggtggtcctgatgactctgctctattatttgcccagagagctgaattgccaggattgctggtttctgagaggacctcattagagcatagtttctttcactcaacgttctcctttgaacgctgagaccattgcgatggcaatactcatgatgactttccacacaactgtgtgatgtgcactaggcttatggtgtctctctagcatcttaactttcctagagtaaaatgctgtgaaataaataagaaaaacaatttttataatgctattaacagaatccaacctctgtcctaatctgctatgacagcagtcgtactccagtgtctacagctctgatctcttcctaactcaattctgctgtccaaagtatgggtctcagctgggtcccacagggaatggaggctgttcataggcaatttgcaacgtgaatacctacatataactcagacctaatgttagtcccttcctgaatcgtctgcatgcctcaggcactctgttattctccgtcttctccttctttctccctgctccatttctgtgtacccattactggatgttcttccaactcctgattctgtcgaacaaaaagggcaaacattaatttctactaagatgagacctcagggagaaagaaggcttaagccaagtgtcagtaagcagagaattccaataccaaactacaaagtattatttatcctacagacaaacatatgtacacacacacacagtgcttggctaccacaatccaataagagaagccagttctagtccgctaaagcagcagcaatttcaccttcagtggtagtaaggatagaaagcactcaagaggttccatttagatacaaagccatgtatatttgctttgtatatttgtatattagctgggactacaggcacatgccaccatatctggctaatttttcaattttttgtagagacaaggtctcactatattgcccaagc

SEQ ID NO: 96621 - DNA, 23560 bp, Homo sapiens
ccggagggaagggacacttgccccaatcccgtcttcccgatttcccttccctccaggtggaagcaccggtggcagaatattaactactattttctgggcaaaaggaagcgacatctagttcccttgcgcccgtgagagccggtgaggggcgtggccacagggggcgctgtaggtgggcgggggctcgcggaggggcaggtcttgggcggggcctagctagaggcgtgggggaggggcgaggcccgagcacgaggttggcctgctgcagtcgcggcctgcgaggctccaggaccctgtgcagatgagccgcagtcagaggggccccgagtgcagggcgtggtctttgcagggttatttttccccgctcttcttgggctgacacaaacatacttttaaaaagattgacaaatttgactatgttgaaatttctgtttgtcaggagacatccccaaaaaagtagaggagccccaaataggactcctcaaacataataccagctctgtgcccagtgcagggagtcggggaccaggaaagtggtgcactcgggtgggcaccaactgggtcagagcaaaggtgactccagccctgggcctagaggcgaagctgaatgaccaagggaagggaagctcggggtcagtttgaagggccctgtcgtggtgatcatcctgtgtgtctgtgttcacatttcggtgcatctctgaaagtctgtaccacctctgagtgtggttctgtttctgtgtgttctatctctgatctatgtgtctatttagtcaacgaatatttatcaagggcttggccaggtgtggtggctcacgcctgtaatcccagcactttgggaggcttaggggggcagattgcttgaggccaggagttctagaccagcctgggcaacatggcgaaaccccatctctactaaaaatgtgaaaaattagctaggcgtggtggcgtgcacctgtagtcccagctactcaggaggcttaggtgggagaatcacttgagcccaggaggcagaggttgcagtgagccaagatcgcaccactgcactccagcctgggcaatacagcagaccttgtctcaaaaaaaaacaaaaacaaaacaattatttatcaagggcatgttttagtgatttgtgacaggtttatacactgagttaatcactgggtttacactggtgaagcaaacagttgaggtccctgccctcatggaacatacattctggtggggagacaggccataaactggagagagaaacagtgtgttatgtttgagaagaacagggctgggtcaggtgctacttgatatgggatgggcagggacttggtcttttcttgagggggcagggggacggagtctcgctctgtcgcccaggctggagtgcagtggcgcaatctcggctcactgcaagctccgcctcctgggttcacgccattctcctgcctcagtctgccaccacgcccggctaattttttgtatttttagtagagatggggtttcaccatgttagccaggatggtctcgatctcctgaccttgtgatctgcccgccttggcctcccaaagtgctgggattacaggcgtgagccaccacgccatgccgggacttggtcttgttcacaggtctagaacagtgcctaacacatagctggggcacagtaaatgctgagagaatgcatgtgttgtcgggaggtcacttctgaggaggcaagtcttaaacgaggctagcaaggatggtcagccgcttccagagcttgggaagagtgttcttggtggacggaacagtgtagtcttgttggtaaccacttgcctctggctctctgtgcctggagaatagtgtttctgtgtcttttttgtttgtagtctgtgatcctgggagccctggggccagtttaaacagggccccatcagggtctctggaagtgaggtcactgcccaacagattcaccccactggctaactctggcttaactggctgggcctggccattcccctggaagcaactcctccccacaacagcatcagtcccacgacctctggctccttcccagggcagcatcctgcagtccggaaggaagttcttcgtcctgtctaaccacagaccccgctgaggcaaccccagccttttcctcttattctgccttgtgggcagaagggaggagatgggctgacccttcagcaacgggtcctggcctagacggagagcccagtaaagacctgacagagtgggggtgacaacaccctgcagcctcggggaagtgaacttcaaagggcagaaataatcactcatctcagaagcttctttggcatccattatctcatttaatcaattaacacctactttatagacagaaactcaagcaggcccagggagggaaaacagtggcagaactgggaccagaatccaggcctcttgataaaatagtaataattaatattattgcacatatactcactgccaggtactgtgctaaaactttgcatgcattttcttctttaagcctcatcacatccccatgaggtgggtaccctcattattcctgttgtcctcagatgagaaggcggaggctcagagctgtcaaatgacttgtccaaagacacccaggcagttcatggcaggacagaatttgagcccaggcagtctggcgtgctcagccatgctccctgtgccctgggattcgggaggattgtcacagatgtctactttccagggacttggggagacaggcttcaggctctatcacatgatgatcctggggccgacttgtgccaaggctgggctgggagggaagatggcctggacgcacagcgtaatcctgagtcccctctctgtggatgacgatgagttacctttgccctccctcctgagatctctgtggttctgcccttcattctccaaataaaatcgctgtggcctcactctggctatctctactttgaggggatgatctcggtttttcccattgacacacactgagttgaccaaacctacagggctggaagagattctgccatcacctcttgaccttcccaccatgcccaccccacccatgagctccttggggggataatggatgaaaaaggcctggttcctcctctcctgactctcaaagtgccacagaaagaggagacatgcaccagctgagtacagtgtcacaggaaggtgacattagtttggagcacagtgggtcatctggtgggtcaggaaagtcttctggaggggtccctggagctggttcttgacaggtgggcgggcactggggtgcacatgcccagggagctatattccaggcagagggcacagcgtggagaaaggtttggggatttgtgagactggcagccaagcgggctctccctaaaatgaggccagccagggcatagcttcaaagaccttgaaagccagtacaaggggttatccaggcagaaacagggagtcatgaacaggtttaaagcaggggaggggctgggtgcggtggctcacgcctgtaatcccagcactttgagaggccgaggtgggtggatctcttgaggtaaggagttcgagaccagcctggccaacacagtgaaaccccgtctctactaaaaatacaaaatagctgggcatggtggcgtgcacctgtaattccagctactcgggaggctgaggcaggagaaccacttgaacccaggaggtggagcttatagtgagccaagatcacgccactgcattccagcctgggcgacagagcgagactctgtctcaaaaaataataaataaataaataaataaataaagcaggggaggggtgcggtctggcgattggtccctggctgtcagctaggtctgaggcctcaggcacctgtccttgcaccctctcttacccactctcccaggtcctgtccaggactgtggccttgatgggtttcccccaagcctccgtgcaaaggtctggcagaggttgctgatggctagaggaaagagctgccctgactcatccactcactgctcaacaggagcccccctccctcacccacataagacccccctatgggccaggcactgtggctgacgcctataatcccagcactttgtgaggctgaggcaggcagatcgcctgaggtcaggagtttgagaccagtctggccaatatggcaaaaccctgtctttactaaaaatacaaaaattagtggtgtggggcacctgtaatcccagctacttgggaggctgaggcagaatcacttgaacccaggaggcggaggttgcagtgagccgagatcacactactgcaatccagcctgggcaacaagagcaaaactctgtcaaaacaaaacaaaagaaacaaaaaaaccctatgatccatcccctgccctttacggggctctcagtcaaagaaacaggtgagactggcagccaggtgggctccacctcaaatgaggccagctcagggcagccccatacccagctctccggagcagcagccatgtccctccctcctccagcccctctcccttcgcgcagaacctagtccccatctctggggctctctgatccaggaatgtctctagacttcatcctctcctcctctaccctgttccctcgcctagttcaggccaccattgcctttgtctggacgagtccattgacttttccctgggtttcctgcctccaactctgtcctctctgatctgtgtccactggggcctgtttgtctgttttacaggtccctatgggacatccagggtgacctccaaggtcaccgggagttctggacaaagatctaggctggagatagagacttcagagtagcatatagctgagctcatagatataggagagagaaaagacagacagaggggtggtcgatggtctcattttttctctccaacacagatttctctccaggccatagatctaatgacatcccaaagccaccttggtttagcctggaccaaaccgacccctctttttctatgcacacaccgctgctcttccccagcttcctccgtggtgcttgacacgcccttctgcccattttcccaagccagaccttcggtccctctcagccctcccacctccccactcccacgttgagtccttccctgagtcctgtggctgctgctcctgaacgtcccccgtgctccttccctctcctttcctctgcctttcagtggcatttaacatggtggatcactcactccttccggaagctgtttcttcccccagccttgaggacacccctgctcctggctcactggccatcagctgatcccctgatgggagtctaaatgtcttctgccttcttttttttttttcttttagagatggggggtctcactacattgcccaggctggtctcgaactcctgggctcaagcaatcctcccgcctcagcctcccaaagtgctgggattacaggcatgagccaccgcaccaagcctggctctgccttcccttcttgagccactctttctctctagtggatcccgttgagccctttggcttcaaatttgggatcacccctgaactattacctggagatggagcttcaggtattaactgccagcctgatggctccatggggattctaacaggcacctggaacttcaactccaaggctaccctcttaagccccggcactgagagcagggagaaccatgagctcaagacacgtgggtgctggccaactctcccttccacttgagttcaggccccatcatctctgacctcgattactgcaacagcagggaaagacagccaggcagaggggactgcctgtgcaaaggcaggaaggagagcaaggttatggcttggccagaagcccagagtgtgttgtggggctccgatagcaaataccttaaatgtaaggctcgggcttggtcctgagagcaatagggagccactgaaaggttaaaatccaaggggagcacatttgtttttacacttctgtcacgcctttgttcattcctcccctcgtttactttgtctgtcaacaaatagctgctgagcaccctctattagaaagtgaccctgagacagtggagaatgtctggaggggcagaactggttggcagagaggtcagtgagaagctgatgacgtaacccagcccaggtgaatgaagggtcttccacagggcgaggcatggagaggagcaatgagctgagatcagtccaggttcctggcttgggcagtggaggaggtaagtaaggtgtgagaggtgccgagcccaaagctcagagcgatggagtctatggtgggaagagccagtccttcctcctggggactctggaaagctcctcgggagtggcttgatctgggttttaaaagaagagtaggccgggcgcagtggttcacccctgtaatcccagcactttgggaggccgaggcgggcagatcatttgaggtcagcagtttgagaccagcctggccaacatggtgaaaccccatctctactaaaaatacaaaaattagctgggcatagtggtgggcacctgtaatcccagctactcgggaggttgaggcaggagaattgcttgaactcgggaggtggaggttgcagtgagccgagattgtgccactgcactctagcctgggcgacagagtgagactccgtctcaaaaaaaaaaaaaaaaaaagagaagagtagaaatttagcaagtagagaggaatgctgggcagaggaaacagcatgttcaaaggccctgaggcaggacggagctcagcactcagaggaactgagaagccagtcgagttgaagctcagcaggccaactggagtgctatggcttgaatgtgtccccccaaaagtatgtgtattccccaatgcaacagtggtgagaggtgaggcactagggaagggtcgctagggatatgagacctctctgaacaagcagaagagaaggggaatttaggcctggtgcagtggctcatgcctgtaatcccagcactttgggaggctgaagcaggcagatagcctgaggtcaggagttcgagaccagccaggccagcatggtgaaaccctgtctctactaaaaatacaaaaattagctgagcgtggtggcaggcacctgtaatcccagctacttgggaagctgaggctggagaatcacttgaacccgggaggcggaggttgcagtgagctgagatcacgccattgcactccagcctgggcgacagagcgagactctgtctcaaaaaaaaaaaaaaaaaaaaaaaaaaagagaaggagaatttaaggaggggctgggaggggacagaaagatgaagtatgtgtttgggtgcgggtggggggccactccagagtatatttttctggaaaaaggcactaaaaggtcccaggaggacacttatgggttgcaagaggaaagggagagaatcttcaggattctgaggaagaggcacattcctttctcatataagaaattaattgaggccagtggctcacgcctgtaatcccaacactttgggaggccgaagtgggaggatcacttaagtccaggagttctaaggccagcttgggcaacatggcgagacattgtctctgtggaaaaaaaaaaaaaaaaaagctggccatgatggtgtgcacctgtagtcccagctacttgggaggctgaagtgagaggatcacctgagcccagggaggtcgaggctgcaatgagctatgaatgcaccattgcactccagcctgggtgacagagcaagaccctgttaaaaaaaaaaaacaaaaacaaaaaaagaaagaaaagaaaaagaaagaaagaaaaagagaagaagagaaggaaggaaataaggaaatttattgaagccaaataaattcccccctgaacaattcccatccttggaacagcccagtcagtgccttcactacctgccccagacgaaagatgatgaaggggccacagggctgactcagggcaatcctaggctcccagctcccctccccagggcagaaagagaggagagagagagaggacaagaatgggaaactgttgagcaccaagtttgtgtctggcacctgccccggaattttatgtaacagccctgaggaacattattgaaatcctccagtgtggtctgcacctcaaatgcacgggttttttggtgtgtgtgtgtgtgtgtgtgtgtgtgtgtgtgtgtgtgtctgtatgttttgttttgttttttgagacagaatctccctctgtcaccaggctggagtacagtggcgtgatctcagctgactgcaacctctgccttccgggttcaagcgattctcctgcctcagcctccgaagtagctgggattacaggtatacgccaccacgcccagctaatttttgtatttttagtagagatggggtttcaccatgttggacaggatggtctcggtctcttgacttcaggtgatctgtctgcctcggcctcccaaggtgctgggattacaggcgtgagcgaccgcgcccagccaggatgctctgttttaagggctttccttgatgcttccaactcatttatttcgcaataaccccacagaatgagtactattatcattcccattttatagatgaggatactgaggctcactcagagaggccctgaagtcacacagtggtgatggagccacctcttcaccacgaacaccacctcaacacaacgacacctcacccaatcctcacaaccacctgaaggggttcccagtgtcttcattttagagtgggcgagtggggctagcaaggggaagggacctgtctagggctgcaaagctggaaggcagcagtagcgtgggctcggatcatctgggggaagaggcggaataggagaggtggtggggtggggttggagtgatgtagaaaggggtgggattggggactagctaggagggagtttcagtttctctttttgttgttgttgttttgagacagagttttgctcttgtcacccaggctggagtgcaatggagcgatcttggctcactgcagcctccgcctcccgggttcaagcaattctcctgccttagcctcccgagtagctgggattacaggaacacgccactatgcccagctaattttgtatttttagcagagacgaggtttcaccatgttggccaggctggtctcaagctcctgacctcaggtgatccgcctgcctcagcctcccaaaatgctgggattacaagcatgagccaccatgcccggcccagtttctcttttgaagggacttcccctaagtggggattttggttggaaagttgtaagcaacccgcattccactggtttggccactcctttcccaaaggtacccaggatctgtaaagaaactgaaagtcaggaagaggtgagaagtgggagagggtaagctccgggcagcccagataaactgggttgaatttctggtgacctcatcaagcctgggggaggtcagcaggtgagctggaattacaggcttctttgctattggggaaactgagccccagagagacagctctatcagatagtggctgggcctcatccagtctatgcaaccaccacacatacacatgcgtgtgcacctgtgcacaagtgcatacacacacacaaccaggggaagggggaggggaagggagaaatgaaaggtctgggtggcctagaattctgaaagggaactttcgaacccctgtccttatgatttggtcactgtctggatggcaggtcccagtgaagggcccctgaggtgcccccgtatccagagcagggctcaaggcctgtcactggcagggacgcagcacacctgggtcttgctgacaaccaagccgggagccagagagcccaggcgaatgagaatagctctggttctgcagtgtccagcccctggggcaggccctgcagctgcctcagctctccttgccagcacctctggcagctcctctcatcctgagctcacaaccctctctggatgcctccagctgaccctagcaccacacacgcctcagagctcttgaaagccaccttcccccagtcctggccttgtttcctcctctggaaatggggacaatggtggtacacatctcacagggccagagggaacatatggaaagcaggcggcacaaggcttgccatacaacaggcacgcaaccaacgccggcagcaatgacggtgattactctctgttcttcctgcctttaaaaacatttatttatttatttatttatttacttatttttgagacagtctcactctgttgcccacactggagtgcagtggtgcaacctcggctcactgcaaccccaaccaccccgccatcccctagcctcccaagtagctgggactacaggcacacaccaccacacccggctaatttttgtatttttagtagagatggggatttaccatgttggccatggctggtcttgaactcctgccctcaagtgatctgcctgcctcggcctcccaaagtgctgggattacagacataagccactgtacccggcctatcttattttttgtagagatggggccttgctatgttacaagccaggctagtcttaagacttctgggctcaagcaatccttctgcctcagcctcccaaagtgctggaattacaggtgtgagccaccgcaccctgcccctattcctgccttttgcctatttttcttttttaagacagattctcattctgtcacccaggctagagtgcaatggtgcaatctctgctcactgcaacctctgcctcccggtttcaagcgattctccagcctcagcctcccgagtagctaggactacaggcatgcgccaccacactcagctaatttttgtattttttgatagaggtgggatttcaccgtgttgggcaggctggtctcaaactcctggcctcaagcaacctgcccacctcggcctcccaaagtgctgggatgcgccctgccccctttctgccttttaaagattcttcccattggtctgcactctgtgctttctcctgcccctagtcagctgctggcttcttcccagagccctctcctgctgctgcccaccaatgcagtgctcctgccacccaggcatctcctgggcgtctgatgcacgacttggctgccgttaccctcttattggcaacaatcagaggcctagatttccaggggtcagtcctgacttaaaaaccttctgtctgttgtccctgtaaagtcactagccagcctttaggaacagcctttggctcaggaaatgtgatcacatgtctatgtgaagtatacagacttcaggctgccttctgcgcatccccctgaatcttccttggacatcgcaaacgcaacagggctagattcagcaactccctcccatgttctttttccctttgatggcctatctcagttgacaggtccacttcacccactgtcaccccaaacagaaaggtgggcagcatcagtatctggtccctgcacgcagccagttaccaaatcctagagatcccacctcccaaaccttgctccagcaaaggcctctgcctccctctgcaccctcacacctaccattcctgttcccactttgtcttgctctgagctcttctccatgttcttcttcctccaggcagcccacagttccttcatctaatgctaggtctggctttcttctccctaagatatggcctgtctcttttctccctcccgtcatgggaaacccctgagggctgggaccctgcctgactcactacttactcttagacgtctaagtgtgagcagaaagaggaactccagtcagtatctgcaactatgaatcacagagcccaacctctcactgtacagatgagccaactgaggccaaagaggagagaggactggctgatggtgacagcaagaagtgcccaacctggggcaagaaccgaggtctccaggtccagctgatgctccccagaaggagatggggactggggctgtgccaagtagctgttccctagggcctccgttgggacctctgatgatgtgtcttcccatctcaaggcctttacatatgccagtccctccgctaggaaggcccatgcctccatctctgactacatattgcccattcacacctcccctggcatctaatccagtcctcarcacaaggctccggggcctgacagaccttaaagtatcccccaacctccttcatggggcattggtttctgctgccccctcccatcttcacccctgccctgcgtctctccagaggccccaggttgcctgccagggaaattcatcccctgctgtccgtgcctgattcatggtggggccgggagcatctcaggccagggccagggccagagcccttactaggagaactgggacagatgaggagttgtatgaacgtggggtctctggtctctgcaccttccattcccccatccatcccagcgtcaccctgtcctcattcctcctttccctgtcactccatcctggcaaacgcccacatctcaaaggttctaaccaccacagccacagcctcagtgacacactgaggcacacacagctccccaccgccacaggaacactcacccagacataaaggagccgctctttgctccacacattcagatattcccgaactctgggcttaagcagtcttcccgccccagcctcccaaagcaccgggatgacaggcgagaagccaccacgcccggcccatcgatattctctcatacagccacacactcagtttcacacccagtcagacacagtcaccaacagtctcaaggaagggcaggcacaaacccagcaagtctcagttaccaggatcaccaggctctctccttcacccttgaatatacagggccaaacaaagatccagacgcacgcaaccacaaatgtgcacacctgggcacacgcgcrcacacacacacagccagaaagtctcacacacacagacacagagcaatacacacagtcacacacagagagaaacagatacacgcagttgcacactggctcccggagacgcagaacaatgggcgcattgtctgggttggcagcagctggggaggaaggagctgcagtgtggaccgaggaggccatggggctgctgtaacctcccacccccaccctgaagcatcctaaacctcttgcctcttccagaagtcagattctgctgggacctggatttgctgagggatcaggctcccaggcgccccctccccagcctcctgggatgtctggtggggatacagggcatcccctggggaycaggctccctctggggctctggggacttggggtctttyaccctgatgctcttcgatgcycctcctgggatcctygggaagatttgcctctcatccccgccaggcagtgcctggggatcagaagccttaggttctgctcttaacctctgaccccaacccgtgcaagactcacacaccctccgtccctctgagcccagccagctggtgcrggcagcgcctggcagcattgtgggttccctattgtggctgagacagagagcaggtcatgacatccttcccttagtggcaagctgtggagaagtcacggtactttcagtgagctgcagtgggggcacagtgcctctccccgtcccaaagctagcccttgcctcccactctgaccaggcagccccagatctcaacagaaaattctgccaggggattccttacagcccttggcccatgttatcaaacctctccaagccttttctcaccctcagctactggtagctgctgtgtgcccttgggcatgtcactttctcttcctgaacctcagggtcccagtctgtgaaatggggcgggggtggggggcaagtgaagctgagatagctgagggtattctgtagtctcagggtgggggtggggatggaggatacaggagtgagtgcagaatgcagaagccacctcagccctccccgcccctctgtggtcagatctctggggagttcccaatttctcaggccctggggtgtctccacacttcacagcctcaggcctcccaggaggcttcaccgtaggagggaggggagggacttgctgagctggctgggacacagccttgcatttgcaacactttgcttccttccagcccccatccctttcctcctgggggctgagggctggcagccggacacagacatccggggccggccaggattctggggttcccaccagcctatccaggccagcagaaggagaggtggcagaggaccaaagctagggagtctccagcccggagcacctccgggctcccttgctctcaggcagggtgggaagctgggctgggcagctttgagggctgtcctcaaggggctgtcccttgaagggacccttggtagcatcctatccctccccttcagaaactggggtgttttgaggtttgttgagtccccagctggggttcctctgccggcctggggcaccctgatgtaggggagcagagttgtgtgtggaggtaaagaggaaggaccagagccaagtcagacaggttgtcaatgcctctgagccttggcctttcaatggggatggagatgcccttcaaggtcacaaagtcccccacgtgggactttgcagtgggtccaggctgagggcaggaggggctcaaggcgaatctgtctgtccccactcagaatgactggccaccaagggactgaaaggaggaatgagggaaaggcctcactagtccgaccagagtgaccccgaggcaaggcagagccctccgctccccggctggccatggcaggcaggcagggacgtgggtgggacctctgaccgctctccaggccggagcgggtgccgagcccagcgcaggggccctgcagcttctatgaccacatttctagagtataattcaggaccagccatctgacgagcctggtcgtgtgagcccttcgaagggttcaagcgggagactgccagcggctgcaggaccaaggcgttgggggccgctccaggctgcgggggcgcccaccggagaggtggagcggagaggatggaatgactgcccgtctccttcctccaggccccccgccccgccccgcccagctcgcgggaggactggcctcgctcctgcccacaccggactctacctgcccctgggattcgggtggggtggggggtacccgaccgccagcgtcgcctgctgcgcaagtggggcctgcgagccaaccccgcctccgcccctcgattgggcgcgcatttaaatgtccggccccgccccgagctccgggcgcttatatataggcagctcggcgggcggcgggcggcattctggcgcggagcggagcggcggcgggcgcagctagcgggtcggccgcggagcggaggtgcagctcggcttcccccggcacccctccccctcgggcgccagccccacccctccgccggccgggccgaccccgccgtactatcccctgcggcgcgagcccggggcggctccaagcgccccccagcagacccccatcatgggcagccagagctccaaggctccccggggcgacgtgaccgccgaggaggcagcaggcgcttcccccgcgaaggccaacggccaggtgggtacgcttggcccggccggccccagcccctcctctcgcacctcgccccttctagggcccggggccggggccggggccgcgcgctttgtccggcccgggacacgcggcgccccctcccccgcccggtccctttgttctcggcgccgcagcccccgcgggcgaagcgaggggaggggcggggagggggcgccggccgggccctgccgccttctttgttcgcggccccggtccccggcgctgccccccggccgccccgagtgccgcgcggggaacaaaggcgctgctgggccacgccaagggggcgcccaggggccgcggagctggggcccggcggggagcgcactccacccgccgacccgacctcggtggcccacggtctttttttttttaagggggagccgagatgcgggagagcctggggtgggtgggggccacttacacaaagcgggaggctgggaaaataggccgtccaggtgcagagagacagcgccccggggcggcttcccgcccaatgtcgcctagagcggctcgcccgcctgcccgggatccgcacagcagatccggagcggttccgcgcggaatagagagcgcgccccgggggacgggggtgggggccacgggaccccagcgcctcctgccggtcgcgccctctgcgcgctcgctccccgcgcgcccgtgaggggcgagagggaggtgtttgacgggatcctgggtgtgggtgaggctgaagccagactttcgggttgcagtagaatcgaatcgaggaccccttcctctagaagggatcagaagcgggctgggggagggggagcccctgccctcattgctattccctctgccctgcaggagaatggccacgtgaaaagcaatggagacttatcccccaagggtgaaggggagtcgccccctgtgaacggaacagatgaggcagccggggccactggcgatgccatcgagccagcaccccctagccagggtgctgaggccaagggggaggtcccccccaaggagacccccaagaagaagaagaaattctctttcaagaagcctttcaaattgagcggcctgtccttcaagagaaatcggaaggagggtgggggtgattcttctgcctcctcacccacagaggaagagcaggagcagggggagatcggtgcctgcagcgacgagggcactgctcaggaagggaaggccgcagccacccctgagagccaggaaccccaggccaagggggcagaggctagtgcagcctcagaagaagaggcagggccccaggctacagagccatccactccctcggggccrgagagtggccctacaccagccagcgctgagcagaatgagtagctaggtaggggcaggtgggtgatctctaagctgcaaaaactgtgctgtccttgtgaggtcactgcctggacctggtgccctggctgccttcctgtgcccagaaaggaaggggctattgcctcctcccagccacgttccctttcctcctctccctcctgtggattctcccatcagccatctggttctcctcttaaggccagttgaagatggtcccttacagcttcccaagttaggttagtgatgtgaaatgctcctgtccctggccctacctccttccctgtccccacccctgcataaggcagttgttggttttcttccccaattcttttccaagtaggttttgtttaccctactccccaaatccctgagccagaagtggggtgcttatactcccaaaccttgagtgtccagccttcccctgttgtttttagtctcttgtgctgtgcctagtggcacctgggctggggaggacactgccccgtctaggtttttataaatgtcttactcaagttcaaacctccagcctgtgaatcaactgtgtctcttttttgacttggtaagcaagtattaggctttggggtggggggaggtctgtaatgtgaaacaacttcttgtctttttttctcccactgttgtaaataacttttaatggccaaaccccagatttgtactttttttttttttctaactgctaaaaccattctcttccacctggttttactgtaacatttggaaaaggaataaatgtcgtccctttagtggtgctttaatgagtggtcttctgggggtagggtgagaagattggtggaaagtagtttacctcaaacctcaagggaggagttaaggcaggcaggtaagtttatggggttttcttgttcagggggttgccccaatactcatggacaccagaacggcagggaagtagagttgaaaccaacccagggacacataggaaacaagctcaggaggatatagaaatgtaccattttattacaaagaggctcacaaaaatgaaaatagtatctcaaaaaggaaactagactagcaacctccacctgcagaattaggagaagacagacagagggcaggcagtgtttcttggctcacttgaggccagtgggaaggtacgaaaacagaaccaatctaaaaatggctgatgttactttaggagcctgaaaaaaacaggagatccttgaagacccagccaccccttctagaatgttcaataagggcacctttccaaagctactaagcaggcacttggcatttcaggagtttgtcttatggttgcataaaagtatccctttcacccagacctggcaccctttatggttcaaagttaagaacgggaagaatgggtggcaaggtggctcctggaagagctcacccagcacagctgccctgagctcggggccttggtttctgtccctggggatatttatatttaataaatttttatataaatacacagagaaatagaaaatataaaatctgaggggttggggaagaaacgtgagggactcagcaggaagccagagctggagaggtccattcaggccaacttgacctcctccttgaccctgtggagagagcagagactggcatgagatgacccagcccagagcctcagggcaaaagtgcagacagtgacttccacaggatcctaggtgactactgggggctggggctcctagctctgcctagaactgcagagctggacagactggtccctgaaagaggcctttgtaagctggaccagctgtccctgtgcctttcctcagagtggtgggacaaaggggctggtgctccaatgccagggagatggccacaggcagctccttcctcaccctttggcttctggcttctcctccttggttttctcctcttcggtgacttctagaacacaagagtacagggatggccaagggcagcacctctgggaagacccatgaggtcttcatttaccctgagaccccttccccaacactacagctcactggacataaagagagaaaagcccatccctggtcctcccagtgagccctgttgagaacaggttggactggtttcccagcctgctacagccagaacctggtgggcggaggcagccccctgggaaactggggtgcagtgctgggaaaagggctggggtggtatgtgagagccgtgctcaggcagtagaggttcattgttttgtgggctctgccacttctgggagccactgaaaggctcaaggaactgaggaagagccccacaggagctggcagggcctgagtcactccctcctcccactgccctacatagattcatcctctcaggctcgagacccaagtcccagctgaacccaaacccacctttcttctcctctgggtctttctctttttcatcctctgttttgactctcttggcttttttgaagttggaagagttcttgcggcccccctctccctcctcttcagaatcggagaactcttcctcacaggcaattcgtttgtcagaggagcagactgggagggagtgggaagcatgggtgagagggcaggcgggtgctgatttagctcagcatctatgcccagtgcttccctgcgtgtcctccaagagacaccaagggaaagggaaccagaagagggaggaactcgggctccctaacctgttcctacaggcactggaactcgaaaacagatttctctacaggtggggagcttggagggagtgtgcagccaggaatggtggtggaagtgtgagctgcctattgaatggaaggcatagggctctaggtctgggtctcactcgagatgcgcttgtcagggtcgtcttcgtcctcatcgccactctcctcagggatggcgtcctcaggaatcgcctgcatttggaccccaggtgcgtgcggcagcattctaaggttctcaaacagtcgctgtctgtggccaatgggagagagtagcagggctctggtcagggacaaaccaaagtcaggaatgttcaaccaaggggtggctggaggatatactcacttgatcttctccaggtactcattcgtgttctggttagtcatattggaaggactgatgtggagcttgaaatctggtccaaagtattcaaagtagtcattgtatggaagctctgattggggcaggagagaagaccgtcaagagacctggccaccgcaccctaaccatttgcacgtaagcaccctaaagcatttgtaggtttctctgggcctatttatccaaacagaggagaatgcctccaagacactgtgagacacgggtacctatgggatttccatctttttaacatcactctcctatgtctgtaccagtggtgtatatgtcgctaggagaaggcccatgtccctggtttaggacacttgaggccatgctcattatgagcgctcccttcactcgctactccagttactctacagagtagaaattccaaagctgtaaattaccaatgagaactttgtccagaccaaaagcaggagggagaggggagagagctaaaaaggactagggaaaaagtgatggttatggtctgctgatcacaagaggacaggcaggagactcagtgactagtatcagaagaggagcggtcatatgaccaacggggaaggggttataaacttaaggacagatgagctccagctcccacccagcccagccgaacctggccctgcagctattaccattagggatctccgtatccagggccacagctgtctcatatgtccagcaccgggcaacgttacgaatggtgtaaccaccgcctcccagcatcagcataggcaggttaaagctcttgacaaattccacacacttggcgtgtcctttggtgggagaaggggtgctgagttacaggagcaccaagcaggaccccgcccacccatccttgtgctacctggtctcacctttgatagttagattgaagcaacctaaccgatccccagatagggagtctgagccacactgtaagaccaccgcactaggctggaacatctccattactttggacatgacctaaaatgatacatcctggtcaccaccaacctcaagaaagcaatacgaggtttggagtggaaaggctgggtgcaacactttcccacccactcctacctttccactctccctcatgctatgtgggagagaaaagggagtgctaggctggagcccttgcttgcccacttgggatttcaattttccaatttaaaaagttctctaagacccttctaacactctagtaacactgaacctagaatggcctccctctcaactccctaagtctcttctgttgcccaagctctagtgccacttcctccaggaagccttcctgacctttagctgcatctactctactcattcggtcttacagacttgaagccttacattatgagcaagcacttttagtttatcttattctcacaagcagagtctaacgttactgagaccgagaccacaactcccacttctgtagcccttattaaatactaggcacatagtgggcagtcagtgtttgctgaatgactacctgaccttattaggttaagcagtttcttactgtttataagtgaagatttaactccttggcatggcattcaaggctccctttgaaatactgagcccagcatacacttcccaccgcctccttcagcactcctcccatacaccacactggcctacatgctgccacactggcacctctgcacttctgctagtgccattccttctactaaatgccacccttactgccatcacctccttcttcacatgggcacctcctcattttccaaagtccagcttaaacatcagcacctctgtgaaatcatccctggctaccctcctgccagcccaggcagtagtttgtctctcattcctctgatcatccctcaaaaacacaggcactaggccagcctacccatggaacatgccacacagcctttccagaatctctggatgggctgactggcaaagggctttcccagacaaagccagtctgcaaagactggagtaagtccctacttcttctaatgtgcagacatcaatgtaaggcaatgaggaacacaaaaaaccaaggagacataccactaccaaaagaacacaataatctcccagcagcccaaagaaatggagatacaaaaacagtactaatcatagactactgggtatgtgcctgccttccccaccatagtccgtgagggcaaagatcatgtcttagatatttttgtatccagcagaagacctgacccatagaaggaaccaataaatatgggtgtttgttcccctaactgaccacacagcaatccagggttcaaacacttctatctccccaccagctttagtaaggagagattcctgaggtatggtgggggtgctttgctcccctccaccgccaaccaatcccctgtttgtagcccaaggggtggataaagccacttaccggcttgaaaatggcctcataggactcgtcatcaatcccgtctcggagcgggtagttaacagcataatacttgcctttgccagccccgatatcctaattaaaaaggccattaaagtaaaactgaaggatgaagcttgaaggaaggtcaaggataggggctggagggataaaggaagaggttcaagagagacaagctaggcccatgatgtgggccaggacagaacagaggtaccttgttagtaccattctcttcactggcaaatctagcttcactggcaaatcatctctggacatagcattaagcctacccccagactgagagctcttgatgggaccagagattgaatagcctaccctatagcacaagatttctaccttgggattgggttagagctggctggcaggtgagtcacagaagtgacagccacccttgacaaccctttccactccagagagctctaatgctcactcctcttcccccatgctccctctctagggtgttgtggagggaaggagagaggtaagaaagtccttcccagtaacctcaaaatagtgagtgcgcctatttaagtccagcactttgggaggctgaggcgggtgaatcttgaggtcaggagttcgagaccagcctggccaacatggcaaaaccccatctcttttaaaaatacaaaaattagccgggcatagttgcacgcacttataatcccagctaaatcccggctattcggaggctgaggcacaagatcgcctggaggcgggaggcggaggctgcagtgaaccgagatcacgccactgcactccaggctgggtgacagagagagactgtctcaaaaaaaaaaaaaaagtgaatgctcatttattctaacgcttgccatggcaaacaactgaattagtgccacttttttacccaagggctaccaggcatggcaaagcagctgatttcaccacattcatgctaatagaagcagatggaacagttcaacgaagtagcttccaaggattcttatcctaaggttcatggatgggcttcagtaaggggacttgtctattaactattctatatcagatgtaaaatctcatgtacttttctggagagacagtccatagttttcagtcaaaaggctaaaggggaaagtgacccaaaaacatgaagaacacttgagatgtccttcagagtcccaattcctacccccaaactcaaggcttatgagacataagaatagtgtgatgcaacccagctgtggccaggaggaaagtacagtgagtcaggagacccctcttctttctctggccctttatgtcccatcattcccttcctccagaataagg

SEQ ID NO: 96622 - DNA, 13231 bp, Homo sapiens
cagctactcaggaggctgaggcaggagaatcccttgaacccaggaggcggaggttgcggtgagcaaagatcacaccattgcactccagtctgggcaacaggagcaaaattccatctcaaaaaaaaaaaaaaaaaattagccgggcatggtggctcatgcctgtgatcccaattactcgggaggccgaggcaggagaatcgcttgaacctgggaggcggaggttgcagcgagctgagatcttgccaatgacactccagcctgggaaacaagagcgaaacactgtctcaaacaacaacaacgacaacaaaaaccaatcatttattatctcccatagtttccttgggttgtgaatttgggtggctctggcttaccatctttcatgaattgtagcccagtgtcagctgggactgtagcgatctgaaagctcaactagggctagaggattcattccaaggttggccctctcaagtggatggcaagttggcgctggcagttggctgggagcctcagctcctctccctgtgggcctctcctcggggctgcttgagtaccctcccaatatggtgaccagcttccccccagagcaagtgatcctaaagaccaaggcggaagcggcaatgccttttataagctggccctgcacacaccatcacttccaccatctttactggtcatttcgggccatcctgattcagcatgggaggagaccacacaaggcctgagggacacctgggggctggctcaccctgcactcataccaagctcaccctggctgccctctattccagctctctgcatttcgtactctcctgttttctgcacttggtgaagagaagaagatgacggtgaacaactatcgtccacttcaacccctgatgaactggaaggtctgggcgtccttccaggccactaatgagggcacaagatcctagagacattaggtccacatgaatagcagaactgactttgaaggaaggaagcgttgtttcccaagtttcacaatgtgattgtacgtgacttctgaaattaaaaagagagaatgaggttattgttttagtcaaagtacgtttcagctgcaagtgaaagaaagatgtgtaagtaccgtggggaacataacgctgggatggaggggtgtgccatggcacccaacgcaagtgcagggtgcttagtttcactgtaacaaagtaccacaaacttggtggcttaaaacaatggagactgattctcttacggttcagtgagccagaagcctgacaccaaggtgtccgcacggctgcttccttctgaggctctaggggaggatccttttccgtgcctttccagcttcagcttcctccttgtaaaaactcctggccgggcgcattgcctcacgcctttaatcccagcactttgggaggccgaggtgggtggatcacgaggtcaggagatcgagaccatcctggccaacacggtgaaaccctgtctctataaaaaacacaaacattagctgggtgcgtgtctgtaatcccagctacttgggaggctgaggcaggagaattgcttgaacccgggaggcagaggttgcagtgagtcaagattgcactattgcactccagcctgggcaacaagagcaaaactccgtctcaaaataaaaaggaattcttgtgaggccaggcacagtggttcacgcctgtaatcccagcactttgggaggccgaggcaggtggatcacttgaggtcagaagtttgagaccagcctggccaacatggtgaaaccccgtctctaccaaaaatacaaccaaaagtaatctggcaggataaaaccagaaaacacacacaatttgatgtcaagacctatttcaaaagctatagtaggccaggcgcagtggctcatgcctgtaatcccagcactttgggaggccgaggtgggaagatcacctgaggtcagaagttcgacaccagcctggccaacatggcgaaaccctgtctctgctaaaaatacaaaaattagctaggtgcggtggctcatgcctgtaatcccagctactcaggagactgaggcaggagaatcgcttgaatccgggaggcagaacttgcagtgagctgagatcacgccactgcactccagcctgggcgacagagtgagactccatctaaaataaataaataaaaataaaaagctatattaattaagataatgtggtacctgtcagagaaggacaaatcaaccaatgaaaaagaatagcatgtctagaaggttccacacatttgtgatccctgagtcatgctgtagggaatggttgggcttttctgtgaatagttttggatcatttggatacttatctatctacgtattgattgatcgatcaattcatctgtcgatccacagggtctcactatgttgcccaggttggtcctgaacccctgagctccaatagttctcctgctttgacctcccaaagtgctgggattacaggcatgagccaccccaccgagccaacgggatatccaaatggggaaccatgaatcttttttctcaccatacctcacacccctacctcacagcacacacaaaaattaattcctgacagactatagatctaaataggaaaggtaaaacaataaagctcctaaaaaataacataggagccaggcgctgtggctcacgcctgtaaacccagcactttgggaggccaagttccagactagcctgaccaacatggagaaaccccatctctactaaaaatacaaaattagccgagcttggtggtgcatgcctgtaatcccggctactcgggaggctgaggcaggagaattgcttgaacccgcgaggcagaggttgtagtgagccgagatcgcgccattgcattccagcctgggaaacaagagcgaaactttgtctcaaaaaaaaaaaaaaaaaaaaaaagacttgatccagaactcaaagttgggtctgagtgtggcttttctgtctctctttcgtgatgttgtctctctctcttggcaagctcattcttttggtggaaagagagctaccactcgtgccaggatggtttccattaattcatgtaacatttattgagtgccaattacatggcaggctctattctagactctggggacagagcctagactgtttcaggtctgaagagcctttgcctcggagctcacgttctgatggaaggaggtagaccacgatgcatcaacacagaaagtctggggtggtaagtcacagggagaggacatggctgggtggggaggtctcttctacaggggccatttgggcagagaccaaaggaggagtgaaccacatggctacccgagggcagagaattccaggcagaggctggaggcaggagcgcccttctggtgttcaaggtgcagcccgagggtgaggcagccaagtgcaggggtgaggagagaggcatgggaggcaagggtgggtactggggcccgataggctgggtggagactttggagctgctgctgggttctgagcaaagggcattttcgagtggaaaggctcagtttggctgtgctgccaaagagttttccaaagtggtcgttcctgtccttgccagcaggtcattgtgtgctttctggagggtgtgcccaggtgtctcctgtggatttaatttgcacttccctaatgattaatgatgtggagcactttgtgcagattcattggccatctgcatatcctctttcaccagacacctacttgagccatttgcccatttttctcttgggctgtctgtggttttcttagtgatttttaggagttctttatatattccaattataaggcctttgtccattttacaaatctcttctcccactctggggctgcctttcaccctctttttttttgttattttttgttttgttttgtttttgagatggagtcttgctttgtcacccaggctggagtgcagtggtgtgatctcagctcactgcagcctcaaccttccccagctcaggtgatccttctacctcagcctccccagcagctgggactacaggtgcaccaccaccacgctgggctagtttttgtattttttgtagagacggggtctccctatgttgcccaggctggtcttgaactcctgggctcaagagattttcccaccttggtctcccaaagggctggcattacaggcgtgagccaccgcgcccagcctccaagtcatctttcacacgcagagcacgcctgagagcagcaacaagactaacgttggggccaaagctaagaagtggggcggagcctccctggtggccggtcgtcagcccagtgcctgaaatgcatgcaaagtctatttttattttgcgtagttgaacctaagcaaaaaatctggccctacaatctctaaccttgctcctaactggcacctaccctattgcacaagaagctatctaggggaggactcagtgagcactcggtgagtttgcccagccatggtggtactgtctccttccctctgcaggcacagcgggaagaatagggtggatggagggctctctgcaccttccacagcccgcagcgtggacggcagattacaagttagtatctgtgcgacctccgcactcccctgccggtggctgcctgggctgctgagatttcgcttggttttatcactgcagaggaatgcctgccataccggggggcgagcaaggtccagaatgacaagccgtggcattcctcagccgcctcctccccggggtggggcctggacattcctggctgcagctagaggtcccagcacgacagggattctgaccccccctccaccacggctattgttcaggattctgtggattccagaggcatctgcccagcagactgtcttgctgtgaacacccagctctgcaaccggtgtttgcgtgtttgccctgggaggctgaacgctcacccagaacaaaggcctccccacatgcctgctgtgagcttccaagtactcgttaggacacacgccaaggaaccccgggttggggggataccgaggagcttcctccctgacccacacacaccctttgaacaggtctttggctgctcaccagtctggtcaatctcggggcagtatttatattccttcccgtttccaggcctaggagccttggcatcctgctctcgcctctaactgaaattacctctcaaccctttttagctaagatgcctctcgcattccccaggaataacaagctttaaagccccttcacactgaagcctgcctttgaatttcccagctagatttgggggtgggggtcttatggctcccggtgaacccccggttctgttgattaaattgagctcaggcagagtgctggcttcccaaagcctgtgttattactgcttctcaaagctacgggcaccggatcgccatctttggcaagattcttttgggatacaatgggaattactgggtggcctcggttcggttcttccctcgtctcagttcgcggctcaccagccacattgatgcagcccccaggctggaaggaggctgcaggagcttcccctcaggtcatcttctcatccctcccccgtgccccaggagctggttgtgggggcggttccatcccctcggcccatccgggacaggagcctaggttcccttcggggggtaccccaaaccccatccttggcctcaggccagccctggtgcactgcccgctcccaggcttgacgagaggctgcgggccagtgggtgaaggggctcgccctgactgccaggccccgcccaggcgcacccgggaggacgggctgggatgacgcgggcgccgggggggtaggtcgcgaggccggggtctccatggcgcaggagtacgggggccttcgaggaccacgcgggcctgggaatcgcctgccaggctaggccggacgacgcacgtgctccgagctgggtcgagggggcggggctgagggccgcggccgggccacggggcggggaggagccgcggacggtgggcggggccagcgggccggggcctaaaaggcggcgcgggcggggttcttgacgcagctgcgggcggcgagcggcgcgcacaatcctcgctcggctgcggctctcgggtgtcccaggcccggccggtaagcagagcatggcsggtgcgggcccgaagcggcgggcgytagcggccccggtggccgaggagaaggaagaggcgcgggagaagatrctggcctccaagcgcgcggacggcgcggcgccggcaggcgagggcgagggcgtgaccctgcagcggaacatcacgctactcaacggcgtggccatcatcgtgggcgccatcatcrgctcgggcatcttcgtgacgyccacgggcgtgcttaaggaggcaggctcgccggggctggcgctggtgatgtgggccgcgtgcggcgtcttctccatcgtgggcgcgctctgctacgcggagctgggcaccaccatctccaaatcgggcggcgactacgcctacatgctggacgtctacggctcgctgcccgccttcctcaagctctggatcgagctgctcgtcatccggccttcatcgcagtacatcgtggccctggtcttcgccacctacctgctcaagccgctcttccccagctgcccggtgcccgaggaggcagccaagctcatggcctgccactgcgtgcgtgagtacggggcgcsggccgggggttgggaggtcgtggtccctgggtccctgcatccttgcatcactacgcccctggctcccacatctctacatttttgcgttcctggaccgtcccggcagttctaggctaaggtcattggtcccagaaaccaagtgcgtttctttcattcattcktttacacttctccccacrggctgggaatatcttcagtgacgggacagcagggtccctgccctgcccttcggtgggcatttcattcccccacttaagcggttcaggcaagtgccagcctcccgttggccccgctgagcaatactcccagcctcttgcgtggcacccacgtggagtaactgagcaaccggtttattgttaaagctccgattgctgactggttgktgaaaasgaaattgcagttgaaaagaaaattattcatttctgctctccacaccagctcgtcaggaatcagtgacacgggctgactcataagaaaacagtagtaataaaatcgtgtgcgggtagtgactggtgctggtttaggctaagggatcccccctgagggttgcccagtagtgagagagcggagcttggctgcagattcagtctgtgttacagtgaatggaggtgcgggtcccaggttactctgggaaacagccatggggctcctattttggtgggcatggtgctggtgtgttcttcaccaggccagagagaactgcttttcaaaatagttttcttttcttttcttttttttttttttttgagatggagtcttgctctgtcgccctggctggagtgcagtggcgcgatctcggctcactgcaagccccgcctcccgggttcacgccattctcctgcctcagccttccgagtagctggggctacaggcgcccgccactacgcccggctaattttttttatatttttagtagagatggggtttcaccgtgttagccaggatggtctcgatctcctgaccttgtgatccgcccggctcggcctcccaaagtgctgggattacaggcgtgagccgccgtgcccggcctcaaaatagttttcttgtgggatttcagggggaaaatcacttgtaccagataccacatgatttggttgggtggcgtgggaaggcgggtcttggcaattctcaggttcatcccatggcaaggatcggcctggatctcagtagtgtgtgtacatattcaaggtgggaagggctaatttacagttggggtcttgagccatgaaatcaggggagtggcttctgactggcaggacctgttggcgctgttttctgccacaccgtactttggggagaagggggagggggaggcatttcttcataaatgtgagaatgccccgagggcaagactcagcagggctctgtgtggtttctctgaggctctgagcggagcagccgcaccaccatgcaggtcaaagccgggaaaaatcgtagtaggacaggagtggggagagcctgtggcttccagctgggcgttggacatgtgaatgtaagggatgactctgatttcttttttttgtcattagaatttcactggttcagtctccctcccgcctaggtacatgtccgcctggtatgtaacgacatggataatagcttatgcagcctgcactcttacctttaaaaaatggatccctgttggctgggtgtgatggcccacgcctataatcccagcactatgggaggccaagatgggcagatctaccgaggtcaggagtccgagaccagcctgaccaacatggtgaaaccccatctctactaaaaatacaaaaattagctgagcatagtggctcacgcctgtaatcccagctacttatgagtctgaggcatgctccgggacgtggaggttgcagtgagttgagatcctgccactgcactccagcctgggtgacagagcaagcctgtctcaaaaaaaaaaaaaaaaaaaaaaaaagcagcccctgggtgctgagtgtctgacttcctgttggtgccaggagtgagttgtgggaaatgcttcattggccaccaggaaggagacataggatggggcgctgcctagttttctctttctaataaaaatcacatcagtcatacatgaattcatcatcatttaaaaattcaaaccagccaggcactgtggctcatgcctgtaatcccagcactttgggaggccgaggcaggcggatcacctgaagtcaggagttcgagaccagcctggccaacatggggaaaccccatctctactaaaaatacaaaaaattagccaggcgtggtggcagatgcctgtaatcccagctactcgggaagctgtggcaggagaatcactagaacccaggaggtggaggttgcagtgagctgagatcgcaccactgcactccagcttgggcaacaaggcgaaactctgtctcaaaaaaaaaaagcaaaaatcagctgggcgtgacggcgcacacctgtagtcccagctactcggaggctgaggcaggagaactgcttgaacttgggagccaagatggtgccactaagctcctgcctgggtgacacatttctcctcctttaccaccccccagccccagagtttctgtggctgacagtgtacgcttccagagctgcttctgttacaaatatatcgctggcctatttatttaaaagatcataatgtacaacttgttctccaccttttttttaagcctaaaatggttttgccatgttcccaggcagtacgcagaggctgccctctttagctgctaagaagacttccctgtgtcggcaggaacaagtgtgctcaccgcccccaccccctgaccccccgtagacccctgtggagggcatttggggtttcccagctttgtgcaaatgggaaaaggttatgtggttttttgttttttgtttttgtttttgttttgagacagagtctgtctctgtcgcccaggctcgttgctcactgcaacctctgcttcctggttttaagcaattctcctgcctgtgcaggattacgggcatgtgcctcagcctcccaatttgctaggattacaggcatgagccatcgcacccggcggggtgtggattctaatgtaatagctaatgtgccttccaaagaggctgtaccaagtcacacgttcctggatttattttgtggtaatagggctttaaaaagtatttttatttatttatttttattttattttatgtttgagatggagttttgctcttacccaggctggagtacaatggcgtgatctcggctcactacaacctccacctcccgggttcaagcgactctcctgcctcagcctcccgagtagctgggactacaggtgcccaccatgcccagctaattttttgtatttttagcagagacagggcttcaccatgttggccaggcttgtcttgaactcctgacctcaggtgatccacccgcctctgcctcccaaagtgctgggattacaggcttgagccaccgcacccggcctaaaatagctttccagcagtccttttggtcccagtaggtaaagcctcaaggcaggctgtagagtgccaaccctctctgacccagaggtgagggttaatgttaataggatccctttcagcgaaagttagggccacacttctcatgtccctaagccatttgtacttgttttttttctctgacccacctgtgtatgtggtgagtatgtgtgtatgtgttgctttttttttttttttttttggaaagtgattttcagtaacagaaagggatgtgctctctgcaagggtgaacctattcttgcccctgtgtgtaaggcaagaaggagaagttgtgttctctgaacaggcagaccctgctgagagagggaggtgtgttggggttcaatcattctggtgggaaagatattagagatagttatagaaatagacacaaatcttggaaggccgagaagttggcataactttggtaattagctctggctgaaggcggcctgatccctttacctttagttaaacaaataaacatagaaataaaagaaaggcagagtagtttacctagctagcttgtttactcatataatcttaagaccctgggtgcttaaatgctttttacccggtaagtccacaatgtctgttacactctaatggtgttgactcaagcttttgttaattaatcatactgaataaatgcgcgtctgactagctgatcagggccaagtagcaactgtttacaggactcagcagggagcctataagcggctggaacactcagctggactggcagagcagaatatctgtgtgtctgtactttattcatctgtcacggggtcacgggtctgtaagggacagactccctgcagctggtgcccccttgaaaggagtgctgtcgcagaggtgggcttggctgagtctggtagaactccaagctgattctcaggtcgttctgacttcagctcggagaagggcagtggatgtcccaggaagggagaccctgcccttgtagggggacttctgacaggtgcagggggcagcctggagcccggaccagtgggcaggatgggcgctccagggtgtgaaggagaggctgggcgttttatctgtggacattgttcctggagcagtgaaaagccatagaaagtgattttatttatttatttatttatttatttatttatttatttatttatttattttgagacggaatttcgctctttttgcccaggctggagtgcaatggcatgatctcggctcactgcaaactctgcctcccgggttcaagcgactctcctgcctcagcctcccgagtagctgggattacaggcatgcaccaccatgcctggttaattttgcattttttagtagagacagggtttctccatgttggccagactggtctcgaactcctgacctcaggtgatccgcccacctcggcctcccaaagtgctgggattacaggtgtgagccagtgtacccagctgatttttttttttttttaaatgatcacacgtaaggttgggttccagaattttctgcttaggaagggaaagggcaccttttacccccttagtccttgagcctgatcctacagaaggtacagtggctttcgggtctggatcctcagccctcgggcctctgaggctgctttgggagagggtacggatttgagaacaaggttctcagttttgctggctgtcttttcagtagcccaggcacgtcccacagaaagtttctttttgtgaaataatcgtgtgaaatgggttggcctcggtgcttagaaccatcccactgacggtgagtggaaaaaatcccttgcttgtcagtctggttaggagatgaggtcctttcacgcgtgtcttcgtgttggtgcgcttttcactggtcataaaggtgagaggaaccagctctatgtgtctctttctggatggccatatggaacttgtcatgacagtagggttgtgtgggttatttattgcttaacgaagacttggcagcgtgtactggaaattcaagcgatgctgggttttatcagaaggcgcaaaggctggagttgagattctggctgggcctggatttggtttgggcagttatctgacctccctgggccccagctggctctgcatagcaagtagggtagcatctactcaaagtcccggccacagccgtggaccggcactggcccaggtgagctctcagtaaataagtgggagctcacaggttcagaagatgctgtgggcctcaggggcttccacctccagggaggtgctctcagaagaagggcctgatgggctcaccgcatcgtggagaagataccccggctcagtctcagtcagttccccaagcgcataggtgttcgggaagtggcctgcagacagctcctccatgccttgaaagcagaagtagccccctcctgtttccctgtcgcagttgggtgaagcatgggagcctgctgggacagtcccaggcgtgccgtcacgcaggggcaggccgtccgtcggtctcgcgggactctggctgcgggtggctgaggacacctggcctcatgggagacggtgccagggtccctggagtgaggtgggtctcctccccatggctgtcactcctcagcagattggtgtgggcgggtgtgcgtttaggaacctgtgagctgagacattgtccagctagcatcaggccaaaagcaaccaaggctttgagaaatccacctggccccgccgagcctgtttctggctgtggaatgggatttgccccagcgccaggtgtctgggaatcgcaggcctccgcgtgtgaaggtgccagttgcatgggctgtgaccgtccctccacatgcttgtatctcctgctcactgtgcatgttgagcagccctcagcctcactgtcttctcctttggcaaaaagagaaggagcaagggaacaaagagagggagggaagagccagagacaggagccagggtttcctttagtctggagctctgggtgcgagatgatgtcacccacccacactcggcacaggcccagggtcggggggctgtgggtggaagtaggaatcgccacaactgtctctgagcccctccctaaagggtgaagggtgtaaggggtgggttttgatggctgtgggcttagctgtggtcagtggactcaaaggccagttg

SEQ ID NO: 96623 - DNA, 14389 bp, Homo sapiens
aaagtcattcttcagccctgaaatcctcaagcccagtcacttcccggagtcaaagttagccaacacaggtgtaatgagcagcaagggaacaacggttaagctattaataaagcagccgctgatgtgaacactaagctgccaggtgaaccagctccaaagtacagctctatagcagaggaaaaggaagtaagttaacacatatactcataactttattttctcctttgactatgtctgcaacagtctcacagcccgactgtgacgtgaggagagaatagggtaaataaatcacagtggctttaggacaccttcttcttcttagagaagaaaaaggcatttagagaaactagagtatggaaaaaaagagattagagcccagagcaggaattagagtctagaagacaggaaagaaaccagggattactgcttccctgacttgaaagccctcaaggcaaaggaactacagaagagttaggaaagcaggtagaagagattcctaccatggagaaaaaagcaaagctagaaggactgacacatggcatcgtgtagtcagagactcccacaattatcgatcctgccccccagccccagctctcttttggatcaagcaccctagtaacattagtgtacctccctgtaagaggtgcatcctagatccccaaatctgggttacaatattgtcaaataagagaagaaaacattttttactgaaaaaataattattcacagccctcttttaaatagtgagcttccaatacagcatttgagtatgattcaatataaacatttcaggaataaatacaacaggcagattgagtcacctgtgaaaaataacacacattagatatatgcccaacactcttctaagcgccttcctacatttagtcatttaatcctcacatcactcttgggggagacactgttagtattcccacttttaaaaggagtaaactgaggcatggagagaacaagcaacttgttcaagagctaagaagtcataaacccgggattcaaactcaggcagtctgactccagaggctatactcaaacatcatgctatactagttatctctcatggggtattctgcccttagcacctggcttcttgccctggcagagaaaagagaccctaattgtagaccctaactctgccaaccccagtatcacatccagccagctgcttctgtccagcaggctccatgggtgctaggtgaagagagattatcattgtcaatcatgaaactgacaagggcatgacatcaaggtcgaggctctgggaaaagctttgaacatgagataattcctggtctcatgctggtcggctgtttccacctgctgagatatatatattccttgactaactggctatatatatatatatatatataaccactgaagtgagaagaactgactgacaggattctgcaggaatggtgccatccagaagcagaggcaagagttagcattccttgaagttccccaaaatatgtggggaacagagtcccagatcttttgggaagctatgcagcctatgatgcttagaaatacagatgcttggggacaggaaatgatgcttcatctcctcgcaaaccctcctgctgtttctatctaaaagacaggcatagaaatgaaaatgctcatgtgaaagctgtcctcaaaaaaatgaacctatagggaaaatagtttacaaagtacaaaggctaaacctgtgagaaagtaagatgcccaagacactgtgagaagccaagtgtcagggctcattcccctcaggcctgtaggaaggaaaccaagcagcactggctcccatctgcaatttctacaatgagcagcactctcccaaaacttagcccaacagataaagctggtaacattaccagctccaagtaattcctgcacctgcaactgtgccttactcattgtgtgtacaataatgttagttctaacttccatcagcaagccagtgtgcaaacatcccaggagacagagattcagtttaagaaagcagtaagaaactgctggactacaccagtagtcaagccccaagaacagacatttcactaagtctacttgttttagacaggacattctaccctggagactttgcattaaatttccatgtcaaataattatttatcactcccaccaagcagcagagtccaggattataactatattcccaagataaaatgctgagagagagcagtccctcctctctgccagaactcacaacatttcttctctgacattcgaagatttggggttttggtttcatagctgttgttgttctgttctgaggaagatgccccagacatggcagctcttcagatgtctgaaacagagaagtagaatgtaaaaaagggaaggggaagaaagaagacataacttaaaaaaagtcagtgcattggatccgtgtggtataagtaaaaacaccctgggccaagaggcaggttcagtcctgtttctcccagttagcagctacttctctagccctctgtttcctcacctataaaaagagttgcactagaaccttacatttatcttctgacttacgagtctacatttacagacgttatcttcttcagtcctaacaataatcttgtaattaggcagattttgccaccattatttcttctcattttacagattgaaaatttgagattcatcgaattaagtgtcctgctcaaggtttcatgacctcagattctagttttaagaatctgggcagagtagtggcagcagttggggtggggtgggttatgtatagacgaagtacattaccaggaaattaactccaatctaacggtaggactcagttttgcaaacagtgaggccgggcacggtggctcactcctggaattccaacacttggggaggctgaggcgggcggatcaagaggtcaagagatagagaccatcctggccaacatggtgaaacctcgtctctactaaaaatacaaaaattagccgggcctggtggtgcgcgcctgtagtcccagctactcgggaggctgaggcaggagaatcgcttgaacccgggaggcggaggttgcagtgagccaagatcccgccactgcactccagcctagcgacagagcgagactctgtcaaaaaaaaaaaaaaaaaaaatgaaaaatgaaaaagaaagaaagaaaagaaaaaagtgagggacgtgggaaaatctcgaacatattccctgaaggaaaaacagtaactggaccccaagacagccctagcacgtcgtcatttctcctctagtgcattctcaagccctgctccgcaccctctccctagttacccccgggactcagtctaaagaacgccggagcgctgaggtggtaaatgacttccccaaggtcacctcaggaagaggggtaagccctgattcaaactggagtgggaaagtcctgagctcatgcccccaattcagacaacagggggctggtgaggacggaagatcctgcgccttcaagagccttacacgattcctttactgaccacacaaatcctccaacccaaacacagactgtggctcccggtcccagaacgtccgcgctgcctgccatgcctggggaccagcacctctccccgcacttcatccgggggcacgcagcccccacatcccgccccgctagaccctacccggggctgcgcagctgtggctcaccctacgatctctcctaagatccctccctgccttggccccggcgcctgccctgtaacgcgaccgaaccgagccgacagcttgtggccgggaccggcgctacagtcgccggcaaatcatgtgagcccgtctggccccgccccctcgcgcgtaggtcctcacctggagagaatcatccaccaatcgggcgcctgcaggacccagggggcggggcagggtcgcaatcgcctaactggctcgggaaggcggctggaagtcggaaccagagagatcacaagctcctgagtttcccagcgccgaggagcctggtggcactgttgcttggtaactaatagggctgggggcggtgttaataaaaagcttgacttttttctgactctcgcgagagtagactattcggtaggcgtcttgagagcgggtgtgccgggtgacgagaaaatgctgcaaagattaacgctctcattcctgaatcccagcagaacctcattagatccataaatgggaacgtaagctttaaagatgtttttgctagaataaactaccacaacacttgagctaattatgccttagggtgtatacatacccggctccacaggtcagacgctgtgacctaagaaaatcaaccactctcatcgttgaaccagaagcttccctggacccacccatacaccccattggagttttttttgttttggtttggtttggtttttgttttttgagatggagttttgctcttgttgcccaggctggagtgcaatggcacgaccttggcaccgcaacttttgcctcccgtgttcaagcgattctcctgcctcccagtatctagaattaaaggcatggaccaccacgcccagctaattttgtatttttagtagagacggggtttctccatattgatgaggctggtctcgaacttctgacctcgggtgattcacccgcctcggcctcccaaagtgctgggattacaggtgtgagccactgcgcccggccaccccggtggacttctaaccactcctaccttccctcctacctaccccctaacccaggctgtatcatccgttgcagtcgtcttgaagaaccaaggaggaaaattgcaccagcaaaaaaaaattgagtcatgaaagatgtgaaaagatggaaacattacatataatttattcagaagcaaagtcttttacagtggaggtgagtttgcaccaagtgaactacacttttcatagttgccccagcgggcccgtttgatgcttgataaacccactcttggcaagtgggacttgctgtctgaatcccggctggataaagaacaatgagtatggatttcttggaaaagagagatataaattcagggatgtctttattcctccttcgcctgggaattaaactaattcttccaaaagttcaaacagttatctcctctttaaggctttttacaactcccagagtgctctagttgccctctctatgtctatacaactctgtctttattcattcagccagtatttgttgaacactttttatttgcgaggcacagtcctgggttctaggcatacacgtttgaaaaggtacagataatctagcattatcacgttgctttgaaattcagtggctgtgtgtctcacaccccaccctgtctcccaactgcaatgaatacttgttacaatgaaggcaggaatgaagtcttcatatttgtatgcccaggaactgaactggaatctgatgacacgcgttacacgactcctccttacactgccaccacctgaatgaggcagctgccctgggcccagatgctgacctcatactgtgctttctgaagtggcaaatagacgttttcaagcacagtcccagggaggcagaaaggccagtcttttggcccctggaaccccaatgagtcaatgtttaatgcagccacgagtctagtcacaagtgtgattgtttttgactggtcctttgactcactgaccattcctggcattcgtttgcgttgtgaactatgattctgtttctcctggtgtagtctgggtgtagtgtggaagccccaatttaataatttccgacctcactaagtgcaaggtcacattccaatctccagaccttcattcaggaactccttcccccgccctcttttcttgagcatatatgctacccacgcggagggcacctcactcgctctataggtagcaagacccgttgtcctttaggaatacggaggtttacatcttcgttctgagggtgggggaaaaatcagttgtcactttaaaagagttcgcgcttgctaaggtactaaggcagaagccgcaccgaagcgtcgcgataactgcaaccacccgcaacttctcgcgatgtttggccccgctaaaggtcgccattttggagtccacccggcgcctggtttccccggcggcgtctcccaacaggctgccgggaccaaagctggccccgcgggtgcctggcctgtgggcagccggaccgacacgatgtggcggctccgctgcaaggccaaggacggcacccatgttttgcaggggctgtccagccggacccgggtgcgggaactccagggccaaattgccgccatcaccgggatcgcccccggcggtcagcgaatcctcgtcggataccctcccgagtgcctggatctcagcaatggggataccattctggaagacttgcccatccaatctggtaaggaatcagggctggggccagggaaagtcccgggaggatggagaggggcgtgagagagaacaaaacaccagtcaaggcaaggtggctgtgagtcggcgggggggctttgaggccaggggcgaggatagatcaaagaacagagaatgctgacgggggccagggcaagtgtctagcaactccttgtcttgacacagggttgaaagggaacccaaagccttgaagacccccttccccattccgctttctggtcggctttgaaactatcccattttgttttccctcggcgtccacaaaaatataaagtagggcctattttctctgtccttatgtctctttttccctatatcaccgatgagatctcaagggtgcaggattttttttttcttgattcatttttgcagtccccttcgtagatacttcgtttgacaggcatactcattttcgagttagcttttaaaacacccactgaaagctctttcaatttctaaccagcagcagttatttctgtgccatatcaaaacttgaacatcagtgtttataattaaaagctttcagttgctgtatcaaggatgttgtaaacactmtagagtagataagtttccggagaaggagaaccccctagcggcctactctgtagtgagcaccttctgtaaaatactgtataaggaaaggaaattttgtttttgaaatgtatctttttaggtaagcttgaagttgtttactccagaccccttcactaaattgggatgcaacctcaagtgttttttgttcttttttcatctwtatgaaaattcagtgaacaaagattcttactggtaacttacttgcaaaactgtattctccttagtaaccccagtttatgctttaactccttcagtttgtaatttacagacttggctagagaacactcggtttcttctgtaatttctttgcagatcgggatttgttttatttttaacaggtgacatgctgatcattgaagaagaccaaaccaggcccagaagttcacctgcatttactaaacgtggtgcttctagttacgtcagggaaactttgcctgtgcttaccagaaccgtggtcccagcagacaactcttgcctctttactagtgtgtactatgtcgtcgaaggaggagtcttgaatccagcttgtgcccctgagatgagacgcctcatagcacaaattgtagcaagcgatccagacttctatagtgaggcaatactgggaaaaacaaatcaagagtactgtgactggatcaaaagggatgacacttggggaggagcaatagagatatcgattttgtccaagttttaccaatgtgaaatatgtgtagtggatacacasacagtaagaattgatcgttttggggaagatgcaggatataccaaaagggttctgcttatttatgatggcatccactatgatccacttcagcgtaacttccctgatccagatacacctcctctgaccattttctcctctaatgatgatattgttcttgtacaagcactggaattagcagatgaagctagaagaaggagacagtttactgatgtcaaccgcttcaccctgagatgcatggtatgtcagaaaggattaactggacaagcagaagcaagggaacatgccaaggagacaggccataccaactttggagaagtgtgacctatgcatgaatgagggttgaagcctactacctcacacatccagaaggctctgggttttccaataagctatggtaaccctaaagaacaaaggatacaatgcttgaaccatccttttaacttaaaaccactaagacactgaaattccttgttaagattaaaattagtgtgcaagtttacagatgtgtgtctacagtggtaaactgtacatacatgcctctttctgctggagtgacagaataggtgatccttgccacctactgacactgacctgaaggttgagattgagtattataaactagcacccagcagctttaacttgtagaagaaagcatcacattttgggtaatgtggaaggcctcctgtgagtccactgggcatacgattgagattgagtattataaactagcacccagcagctttaacttgtagaagaaagcatcacattttgggtaatgtggaaggcctcctgtgagtccactggacatttaccacagtgtctccagtaactgagtctttttaaaaactctgaatgagttaagtttctaaattatgaattgattcatcaaatgaagatactcagaattgtccaaactgattttatattgcaatttggtagacattataaatgtgtgcttaaccactgataagtacatcacaagcaatttttacagggatgagtctcatccttgagaatgttatcacaaaacaggaactgattgtgccctgtttaagatctctagcatataaaacgtagaatgtatgagggaataggtgcctgagcagcttcctgaagctttaaaagaccgttggcctcgtgttttaatgcaattcatgtattggtctttgtcacattggataacattttaaagttaagcagggtacttttttaattgaaattccttgaaattcgagtcctcagttttttcttcatttgcgtaaagtttatcgggggggatttaattttctcagctttttgttaagagcacttcctccaaaaaatttttttcaagtaataatgctctgctttgggttggtttttgtaagattttttgcacacctaaagagtgtttgcttttgtgctagccttatccctccactaaagttattttaaataatttcacatttctgcaaattagcactttgcttatctgcaatcttttactttgatttttgaagttttaaagcaattggagtaatactgttgaatgaactagtttcacttccaaaatagaaaaaattgtaaatccttgccttatgcagctttctcagaattctgcttcttcctagtactagatgtgtagccatttgcttagtggactaatccgcaaggcacaccctctaaaacttagcttcactacaagatcttccagataaaagttttctacctcttttcttaattattctgatcagggatgctaaattataatttgttatgtattatctcacataatgtgaagaggcttaatgtgaagttttgttattttggtctcttttttattaagtatctcacttagaaattcagtggtatactttaaagcacttggatctttttcagcatatctgcctagcaaatgttttaaaattgacatttatttttagcactttcacttggtgaaggtggccatataaaattaaggaacatttgaacaatataagagaaaagaacttttaaggaacaattcacaaagtttgtttgaaattgtcagatgacatttcttgagtaccttttgtgtgcatagttattttagacaatataagctgttatggtcagcataacttaaaagtgtttagttttctattttactgagccttaaaaatagcactgatgagcttatgatacttaatgtttggcaatcataatgtgttcaaattaatgggattgaaaatctctccacacctgactctcatctgatctggatggttttggttttgtatcttttttacttctcccagaaaatactaaatttaaaactgtaaattaagaatataccactagataacaattatcaaattgagctttatgcatcattactcagaaagcttgccttcctttctttgctacttcaggacacagagttgacatttgcttactacagctttagatctagaagtttattcgtgcaacaaatatttattgagtaatttatactgtgccaggcatgttttgatatgtttctgtcatatgttttgatatgttccaacataagtttctgtcactttatattcagtatatattttctacagtgggtaaatttaacaaatggaaaggaatagaacactgatattttacagaattaaaccccttcattgtaagggctttgtttacatattaagtgtcaagtatttattcaggggatcttatttcattgtattttatctgttatctaggttgtccatttaccggttggacactgatactctgtcaaattcctttcaaaaatgactctttagtctgctgaaatttagcactagtactttagtgttctgatcctggaaaattcaaggtgaagctttatttgtggaccatctgatttaattattgaggattaaaaacctaaacctttgctcattctaaactcaagcttttaagcctcacagaatttacaggggtttgctttttgtttgtttgttttttcattttttactgtgcttattaaactcttggaattagttattaaagggagtaaattctcatcttgggaattttgaaaatctatggacttacaactttcaggaggattaaatgtcttaagttttgtactagagcagaatgaaatctttcctattcattgagtttttgcctgccatagaggaatttttttaaaaattaaaatgacagtttatattagtggcaaagtgaataaagacctcactttcccaccccacccttcttcctttctcttacttttctttggattaaaggtcaggtgtagtactatgaagattcactcctgaataaagtgatttcagaagctaaaatttaacatacctggaaattttgtgatgtgttagccaagtgaagacattagtgtgttccatcttttgctaatggttcatggttgatttcttcattgtttcccatgaaattagcatagtcaagtggtacccttgacgcttgactgctggtcagtttgaccctgtttttaacaactaatgtagtcatgccgcttgattattccatgaagtcccagcaaaataataatgaggaattaactaacattatgttatctatctaatttgtctgtgtccctaaatgcccatgcctaacttgcttctctagtttattccttctgtggagggattaaaacgtgggtgttgcaagttgccctaagctaaacatagttttcttacatctttttgggaaaaaaaatggaatgggaagtatgcaagattaagcaagagtgatttttttttttttttgacaaatcaggtggccttcctaaacatactaagaattatgttctttcatgtgtggagacacatttgtttgcagcactttaaaaaatatatatggaataaaagtttacatgttggccctctagggatctaattaaggacattaaagtacaattcttgagctactaaccatcagctcttcttaatcaaagattgccatcagtgtagagtgtatctattggcacaacattctggtgttttgataacagtagaactcaatttcagtaactattaggagcatggtctgtgccctagcattaaaaatgttacttattattatgtgaatatcttgtattattatacaatgcagtattcaaatttgtccttgtagtgcagagatgactgataatttctaaaagattcgatccttaaaacttgtttccaagcagacttataaggaagctgatttttgagtcagaggccttaaacgtgtcatatacaagtggcatcattttaagtccaaagtgaaacacttgatttgaataagctagtttataaactaaagctgttttcttatgttacagtatttcagcacatttcattccacataaaaagaatattaagtgtccctggttgtgggagagtgtttatttttctcaaaattatctagcattttgcttacagtgctttgaatgtttgacttaaaattattattgatgttgaattgtagggtgctgatttaggtcttgattcatacacatttaaaggaggttggtaaccccctcatggtagagtgaagggagaaaagggccaagaagacaaagtaccactgataaagaagagattgtcaaatagatgcattcctagtcatgaattacccttttccaaacatttttaaagcaatgcctttgtgtcaactcaacccttcttccccatttcttgtcatagaatgtagcatggccataggtgaaaaagcttatcattaaagtatgaaaccatgaattataagcattttgccatgatgcccttttatacatatgtttttaaaagtactaaccaacatataggagtttaggaatggtgaagatataatttgattaagttgtaggtaaacagaaaggatcatcttaggctcagaatttctaatatgattacatgagtctactttataaactggtataggctatgtaattagcccgtaagttacttaaaggaccaggggacctaatttttgtcagttttccagtcacattggtgccattcaggactccagctgtttacaggaaatatgtacttagcagaatagtatttttccttgaaaaaaatttgaattcagcctaaatacagaatgaatatgaatagtttgtgaaaagggttagagaacaacaatattcctatagtttctgtattaatgcagtagagacagaggttcctaacgcaaaaagaaaaccacaagtaaagaccgtcaaattagagctttagaatatgacttgaaaaagtagggatgggcaaaacagcataagaaaatattttttcttaatgcagatggacagtgttttcttgttttaaaaatgttttgcctatttgccagcattttttgaagtaatacactgctgctacctggaagatgtctaacttcattttctacaactcttatgtgattttgccattgtcattaagatgcattgattttatttatgaggtgtatgactttaaatatctaaatgctgtattaagtgacttgtttcaaaggaataaatgaagtgaaaacgttgtttgagtatattttgggatcagggcagatatggccactgaacggctattttactcaatatacatattatcaaaagcttaccgaatctttaactaaggtaccaaaatctgccaaatatcaccctttaggcggactcaatgaatgagacaggagaaactaaggtatttctccttaacgaaaggttgaaattcccattcattgactaaatttttttctaaatccaatcctacaagttgtaattcaatatttgttgctgacaagttgtcagtgtggaaaggcttaatatttattttctaatagactgcaatctttgtgaacttagatctgtttgaaaacagcaacatcactataggagggtttatttcatctttggcaatgtcaacatttaaacatgtatttgaagcaaccctgtggctattacaattggccagagttcaggttccctaactaaactaaactatttaacccattctttctcattgaaagctttaaaattatggacgtggaagtataataatatctaatcagtttgtacagcagcataaaatatatttctgggggtcagtgtacatccaacataagaataagtcaagccaaacttcacattacaaggttcataaagaatcggttgggttgtgtgatggaagcttattgaatgattaattgtgcccataaagcaatgcttcccaaagttggtcatcacattacctgggaacttgttagaaatgcaagtgctcagaaggacatcagaaattggtgagacccaacaatcaattttagtaagcccaccaggcgattctgatgcatgatttaaaaaaaaaaaaaaaagtttgggaatcgtggctatcaccatggtggtttaaatgaaccattaatcaacttgcgagagatctcttatggcttataccagttttatgtccttagcctcatgcaattcattttcactcaccacttacagttattaagtttacagataatgtaaatccagagaagatttgtagaacaatgaatgacaattcaaaaatctcaacaagccaaaaaatcctaacgttgaatattcctaaatgtgaagtcctgcccttgaattctaaacaatccattatgtgagttcagcatgagggaaaacctggctttatagttggtttgacaaaagacgaagcaatggtacttaattctaattctgatccgaatagagtactatggctta

SEQ ID NO: 96624 - DNA, 34051 bp, Homo sapiens
  misc_feature (1)...(34051): n = A,T,C or G
nnnnnnnnnnnnnnnnnnnnnnnnnnnnnnnnnnnnnnnnnnnnnnnnnnnnnnnnnnnnnnnnnnnnnnnnnnnnnnnnnnnnnnnnnnnnnnnnnnnnnnnnnnnnnnnnnnnnnnnnnnnnnnnnnnnnnnnnnnnnnnnnnnnnnnnnnnnnnnnnnnnnnnnnnnnnnnnnnnnnnnnnnnnnnnnnnnnnnnnnnnnnnnnnnnnnnnnnnnnnnnnnnnnnnnnnnnnnnnnnnnnnnnnnnnnnnnnnnnnnnnnnnnnnnnnnnnnnnnnnnnnnnnnnnnnnnnnnnnnnnnnnnnnnnnnnnnnnnnnnnnnnnnnnnnnnnnnnnnnnnnnnnnnnnnnnnnnnnnnnnnnnnnnnnnnnnnnnnnnnnnnnnnnnnnnnnnnnnnnnnnnnnnnnnnnnnnnnnnnnnnnnnnnnnnnnnnnnnnnnnnnnnnnnnnnnnnnnnnnnnnnnnnnnnnnnnnnnnnnnnnnnnnnnnnnnnnnnnnnnnnnnnnnnnnnnnnnnnnnnccgggtgtggtggtgtgcacctagagttccaactactagggatgctgaggtgagaggacaccttgagctggggactggggaggcttaggttacagtgagctgagattgtgccactccactctagcttggactaaagagccagaccctatctcaaaaaaaagaaagatgcccagggcaaggtaagttaggaggggcacagagctcccatgccctctgttgaacatgccaccctcccagcatctcctgtgttcagcaaccccagaagctccgcaaaccctgttcagggtgtttatggaggctttattatgcaagcatgattgataaaatctttggccgttggtgattaaggcagtctccagcccctcttcctcctggagttcagtgcatgaggctgaaagttccaagcgtctaatcatgtggttgcttccattggcaatcagccctcctcctgaagaaatctaggagcttgcagtcaccacgtcatctcaacaacaaaatattaaaacaaaagatgttcctgtcacatctatcactgaggtctttgtaagagctttagaagctctgtgccaggaaccagggacagagatgaaatatatatttcttttcttttttttgagacagaatctccctgtgtcatccaggctggagtgcagtgatgtgatcatagctcactatagctttggccttctgagatcaagcgatcctcccatctcaacctcccaagtagctaggactacacatgcatgtcacccatgcccagctcatttttgtagagtcggagttgcaccatgttggccagatggggtcttcttttgttgcccaggctggccacaaattcctgggctcaagtgatcctcccacctcatccttgtagagatgagatttagttatgtcgtccaggctgatctcaacctcctgggctaaatcgattgtctcacctcagcctctcaagtagctgggactacaggcgcataccaccatgtcaggctaatatttatttttatttttttctggaggtgggggtctcactatgttgttcatgctagtttcaaacttcgggcctcaagtgttcctcctgccttgacctcccaaagtgttgggcttctgggtgggagccaccatgctcagcagtcacaagggtctttataaaagaaagagagtaggagattcagaattgaagcaggagatgtggtgatgaaagcagaggtaagagagggagatttgaagatgcttcacttctggctttgaagatggagtcaggggccatgatccaaagaatgggggtggctcctagaagctagaaaagccaagggaacactttagagtctccagaaggaatgcagccctgctggcaccttgactttagccttaatggacctagtttgggtttctggcgcctagaactgtaagatggtagatttgtggtgttttaagccactaaatgtaggaaactgcaaactatgttgcagcagcaagaagaaatgaacatgaagccaggcatgatggctcatgccggtaatcccagcactttaggaatttaggcaggaggatcacttgaggccaggagtttaagaccagtctgggcaacatagtaagaccttgtctctacaaaaaatgaaaaaactggccaggcatgatggctcacgcctgtaattccagcactttgggaggccgaagcgggcagattacctgaggtcaggagttcgagaccagcctggccaacattgcgaaaccccggctctactaaaaatagaaaaattagctgggcgtggtggcacgcacctgtaatcccagccacttggaaggctgaggcaggagaatcacttgaatctgggaagtggagtttgtagtgagctgggatcgcaccattacactacagcctgggcaagaagagtgaaactctgtctcaaaataaaataaaataaaataaaatactaaagaatttagccaagcatgatggtgtgaacctggagtcccagctactcgggagactgaggtgggaggatcgcttgagcctggaaatttgaggttgcagtgagctttgattgcaccactgcactccagccttggtgacagtgagatcttgaaaaaaagaaagaagaaagtaaagaaagaagaaatgagcatggtgggcatggggacagatggcaatgttaaatagaatggtcaggggtggcctcctaagtgaaaattgagtaaagacttgaaggaggggaaggagctggccaaggtgctgagggaagaggctcgtagacagaaacaatagaataaagtgtctgaggtgtgtctgaggctctggaaggaggcccatggagcagacggagagagggagagaattcggggagggggccagggagttgctgggtggggatcagtacagatcacataagccctgggaggttattgctggggctttggcttttagtctgactcagatgggaactgcgagaaggttctgagcagagaggcgacatgatctgtctcccattttaaaagcgttctctggctgctgagttgagaaaagactatgggaagatgtgggtagaagcatgggggccaagctttggcaacatccaggcgggagatgatggttgtcctgaccagggccatggtggtgttgagagatggtcagaggggagaagtaggggaggaggccagggagttgctgggtggggatctttagtacatgtcgaagacagtcaacaggatttcctgacagactggatatggggtgtgagagaaggcaggggnnnnnnnnnnnnnnnnnnnnaaaaaaaaaaaaaagaaaatgacatggtgcatgactgggggactggggctgcagagggtggtgcccagctgcagggcaggaggtgggagggcaggagggagggagggagagaggggctctgacccaggatccaccaagagactctgaacctttccagggaaccactaaggccacactttcaaccatgacacaaagccactggacacttgagccctgccccctaggccatcttctttggttagtgatggtcatcattcccctaatcaagctaagaacatgtcttatccatatttttttgccataaatatttatataaatgaatgaatatatcaaattcaactctaaggggtgagagaaaaagcctagtgctcatgttccatagccagggtccagcacttcatccaaaacagccactctttagaaattctttatcatttcatggccgggcatggtggctcacgcctgtaatcccagcactttgggaggctgaggtgggtggatcacgaggtcaggagtttgagaccagcctgaccaacatggtgaaactccatctctactaaaaataaaaaaattagccggatgtggttgcacacgcctgtaatcccagctactcaggaggctgaggcaggataatcgcttgaacctgggaggtggaggttgcagtaagccaagattgtgccactgcactccagtctgggcaatagagtgagactctgtctcaaaaaaaaaaaaaaaaaaaaaaaaagaaattctttatcacttcataaagtgaataaatgctatccctacatttctgacaccgcatcctctacaccacagattttggctagctcaccgattccttcttcactgatgaccgtgctgtcaacatcaaaacacacagcatnnnnnnnnnnnnnnnnnnnnagcgaaactccctctcaaaattaaaaaaagatttcttaaaatgatattttcagtattttatagatgatgtgtgagcagcaatcttaataggacgttatctgactctttgcaggactggaagatgacagtggcagctgatttgatccagatgtctctaattcttttttctttctttcttttttttttcttttttgtttttttgagatggatccttgctgtgttgcccaggctggagtgcagtggcacgatctcggctcactgcaacctctacctcctgggttcaagcaattctcctgcctctggctcctgagtagctgggattacaggcacgcgccaccatgcttggctaatttttgtatttttggtagagacggcgtttcaccatgttggccggtctggcctggaactcctgacctcaggtgatgtgcctgcctcggcctctcaaagtgttgggattacaggtgtgagccatcgcgcctggcccagatgtctctaatgctaacatgagatgtattgcaggatcatagcagagtgagttgctggtgtatccacaaggaaatgagcatggaactctcacaacagctgtcctgagtagtgtgtgtgtgctgttcttgaatatctcactgctcatttatacacagactttctagtgactgagtcaacagtatctgtttcataaataatgtaaccctatttcttttctttcctttctttcctttcctttttctttcgacaaggtcttgctctcttacccaggcttgagtgcagtggtgttgatctcggctaaccgcaacttctgcctccctggttcaagcgattctcctgcctcagcctcccgagtagctgggattacatgtgccagcactcctggctaatttttgttttctttttttttttttgagacagagtgtcactcttgttgcccaggctggagtgcaatggtgcgatctcggctcaccgcaacatttgcctttagggttcaagcgattctcctgcctcagcctcctgagtagctgggattacaggcatgcgccaccatgcctggctaatgttgtatttttagtagagatggggtttttctattttggtcaggctggtctcaaactcccaacctcaggtgatctacccttcttggcctcccaaagtgctgggatcacaggcataagccaccgcgcccagcctaatatttgtatttttagtagagatggggtttcaccatgttggccaggctggtctcgaattcctgacctcaagtgctccgcctgccttggcctcccaaagtgttggaattacaggcgtgagccaccacgcctggccagccctatttctttaagtctacacattttgcacgtgttaaaagtatttgaacatataattatccagcttcccttgtttatgtatgcttgaattttgtataatcttaaatttgtttccaatctaagctttattttatcccctttcttctatatttgtatagctttaggtggctgtcttcattgaaagttttttctcaaaagcctgaaaatagaatatagttcttggcatcaatttgaaagttatttgaggagaaggggagatttataatgatgactcaaatgaagcaaactaaaaaataatgaagcaagacaggaaaaagcagtattcacttgagcacatcccaaaagaataaaatttcaaatgaaactagaaaaaagtatgctgaagatcacaatacagaaataattgttaatactcaaaatagctttaaagccccattcagcttttgaatgttgttgacccggaggtggctgtaactctaagatggttccttcaataatcaccattttctttttcaaggtgatgattattctccaccttctaagagaacaaagaccaacgagccaccacagccaccagtcctggaacccgccaatgctggggaacggaacatgagggagttcaactctggtaagttctcagcgaaatccacgaccttttccttcatcttctggactctcaatgtgactgatgaaagttagaacatgttctgcagrgggaaatgctttagcattactacattataatctcatctttgtaaagccaggagcattttgaaagtcacattacagacagtgtttaaacatagtttgaatttaccaaagcataggacgttgtatcatctcatattaattagttggctcgaaattagtgctaatgacttagtaattcaataatttctcttagctttaaaaccttctttatttcagaactgtttcacctcttggttttcatttttgctgtgtgtcactgcctgccagctgctaatttattaactcccagtggatcatgtgtcctgtgaagggactgcatgagattttagkggcaaattatgttgatgatttgtattttaaataaatagtttgaataaatagaacattaagcttgtatacattttgaaaatagtattttaatattttactgtgtcatagtcacaatgattggatatatattgaatttatatgtacattaagttgttctatgtttatgttctttagcattctaacttgcaactgtatatctcttacgtcttttttttttttttttaaagaagattagactctgatttattgaggcatctgttaagtggctagctgtttgtttgtttgyttgagatggagttttgctttgttgcccctgctggagtgcagtggtgtgatctcaattcattgcaccctccacctcccaggttcaagcacttctccctgcctcaggctcccaagtagctgggattacaggcacctgccaccacacctgcctgtttttgtatttgtagtagagctggggtgtcaccatgttggccaggctgttcttgaactcccaacctcaggtgatctgcccgcctcagcctcccaaagtgctgggattacaggtgtgagccactgcacccggcctgctggtggttcttgagcacagtgagttctgctttttcccagctttaatgaatgtctggttcttccttttttgtgcagtgtgtgtcagcattgtttcagtagtaaatacattctggatcttagaaataattttactcacaggaaaagaaaaaataatactgcctattttataataataatatttaataacccaagctattaaacccattaaattgagaaaacttgtattcctgtgatttcgacagtaaaggaagaatggtatgccagaatcactaaatgaagaaagatggtggatcagcttttctgcaaaaaaatttggtaagtctcttttttcctctttcaactcaagtatattactgagtaatgttttttataatgttgttttattttaggaaagtaaatataatgagcaggactcagctccagttttttcttactgttttgtttttgagacggagtttcgctcatgttacccaggctggagtgcagtggcgcagtctcgggtcagtgcaacctccgcctcccagattcaagcgattctcctgcctcagtctcccaagtagccgggattactggcacctgccaccatgcccagctaatttttgtatttttagtagagatgtagtttcaccttgtgggccaagctggtcttgaattcctgacctcaggtgatccacccacctcagcctcccatgtgctgggattacagttgtgagccaccacacccagcctctcttactctttttttttnnnnnnnnnnnnnnnnnnnntggctcactgcaacctccgcctcctgggttcaagcaattctcctgcctcagcctccctagtagctgggatcacaggtgcataccaccacacccaactaatttgtttttgtatttttagtagagacggggttttaccaccttgccaggctggtctcaaactcctgacctcaggtgatccacttaccttggcatcccagaatgctgagattacaggtgtgagccaccgcacctggccaggagtggattatttttatggttcccctttttagaccatatagggtaacttcctgatgttgccatggcatttgtaaactgtcatggcgttggtgggagtgtagcattgaggacaaccagaggtcactcatgtcaccatcttggtttcggtgggttttggctgaattctttactgcaacccattttatcaacaaggtctttatgacctgtatcttgtgctgatctcctctctcaccctgtgacttagaatgccttaaccatctaggaacgcagctcagtaggtctcagcctcattttacccagcttctatttaagatcgagttgttctcgttcaaacacctctgacagtgttgctgctttctctaaggttcctgaaagggagagaggaaatcttagatttgtcattgctgggaaccactgcaagtattcaggaaatattcactacttccaacctcataatcctgcagtcatttggcacctttgagtcaggtgcggggtggagggagccgggcagtgcagaagacagtgccctgccccgtgcattctggagcattcaatctgctggggaaacgtatagtaagtaggggatatttactctgtaagaagatataaggtctgggaaagaattaagtagaataaggggaatggggaagcaggggttgtgattggggcagccttgatgatatgtgatgagcacgttctgtagttggcctcgcctctttctaaacttcactttttactctcaactccaattggttcttttttattttataaaaactttgttagaattaggcttatatatttccttgttgaattaacagaataattttatttaacatcactctctagtgtgactgaaagcctctaatcctttactatgatttgtttatgggcatatttctttttacagctatgataattatttcattttgtgtggtttctcaaaaatacatgtgtttctgatctcagagagttcctgtactagagcccttcagatttggtgctaatatcatgaagtaagaatttgagacaaatcttgagatgttagaggaaagccgatctaagaacaaagacattaattattaataaataattaaattatttattaattaattaatttcaagttgacatttaagttgaggtgtggaggtgaaggagacagttggataaataagtctggaagtaaggagaaagatctggcaatagatataattttggattttgggtttttttgtttttttgtttttttgttttgttttttttgagacggagtctcgctctgtcacccaggctggagtgcagtggtgcgatctcggctcactgcaagttccgcctcccgggttcacgccattctcctgcctcagcctcccaagtagctgggactacaggtgcccaccacatgcccagctaatttttttttgtatttttagtagagacagggtttcaccgtgttagccaagatggtctcgatctcctgacctcgtgatccgcctgcctcagcctcccaaagtgctgggattacaggtgtgagccaccatgcccagcctataattttggattttatagttgtgttttgatagcaattgttgatatcaccaaaataattcatcagtgagctccctgagagctccccgacttttctttttaaagaaacagggtccactgggtgcggtggctcacacctgtaatcccagcattttgggaggctgaggcaggtggatcacctgaagtggggggttcaagaccagcctgaccaacatggagaaatcccatctctactaaaaatactcagttagcggggcgtggtggcatgcacctgtaatcccagctacttgggaggctgaggcaggagaatcacttgaacccaggaggcagaggttgcagtgagccaagattgcaccattgcactccagcctggacaacaagaatgaaactccatctcaaaaaaaaaaaaaaacaaagaaaaagaaaagaaacaaagaaacagggtcttatgttgtctgggatggactagaactcctgggctcaagttatcctcctgcctcagtctcctaaatagctggggctacaggcacatgccaccatgcccagctttgagccactcccaaccatcaggctgcaaaatatttaaatgttacatacagaggtacaagggagatctatatataaatagcacgatataaattgcttgaatctttctttttagagttttgtttggatgtggcttcagagcagggattagtcaattcatttttacttttttttttggtggattctcattctgtcgcccaggctggagtgcagtgtcacgatcttggctcactgcagcctctgcctcccaggttcaagcaattctcttgcctcagccttctgagtagctgggactacaggtgcctgccacaacacccggctgatttttttttttggtagagacaggctttcaccatgttggccaggctggtcttgaactcctgacccaagtgatccacctgcctcagcctcccaaagtgttgggattacaggcatgagccatcgctcctggcccttgttttacatttttaaattacagtttttatacctattcaaaagtagagaaaatagtacagtgaacgctaaaatacccattcctcaatttctgtgatcattaagattgtcccacattttgttcttctattcctttacctccctttgcaggaatattgtaaagcaaatcagtcatcaccatcattttatctgttcagtgtgcatccccgaacagcattaacattttcttacacagctactatctcatcacatctgacaaaattacaatgattttttggtgtcagctcatctgtaacccttagttgagtttcctcactcttttttttttttggagacaaagtcttgctgtrtcaccctaggctggagtgcaatctcagctcacagcagcctctgcccccygggctccaacaattctcctgcctcagcctcctgggtagctgggattacaggcgcacgccaccatgcccagctaatttttgtatttttagtagagacagggtttcaccatgttggccaggctgrtctcgaactcctgacctcaggtaatctgcccacctcgtcctccccaagtgctgcgattacaggtgtgagccaccatgcctggccaagtttccttactcttacctgaacagtatctcatttcctcattatctgaaaaattttgctttaaatctgggtccaaacartcttcatgtgctaactttggttgttatgcctcttttaatcaaaactggcctctgcttactatttttatttcccatttcatgaattctttgtggaaagttatttcttttaaaacagcatrctcatgaggttgaaggggtaaagaacattgatcttgtggttgcagtgtggatgaaaattcagcctgaaatatgcctgtttgcagcagccagtggaggagggttattaatttcacaagcagatagtggcaaaaggctgcttccaaatagtatttgcaggccagctgcggtggctcacacctgtaatcccagcactttgggaggtcaaggtgagcagatcgcttgaggtcaggagtttgagaccagcctggccaacatggtaaaaccccatctctactgaaaagtacaaaaattagccaggcrtggtggcgggcacctgtaatcttagctactcaggaggctgaggcaggagaatcacttgaacccaggaggcggagcttgcaatgaaccgagatcatgccactgcactccagcctgggtgacagagcgagactccatcttggaaaaaaacaaaacaaaacaacaaaaaaaaaaacaaaaaaaaaaaaacaaatagtattcaggttgtgttctttatcgtctataatttttttctcttcttcctaagaatattgaaaaacaaagtttaatattttaagatcttagagttattaagattgtcttaggatcaggacacttaaatctgccaaaatctggttggtaataatgggtcatttatttttattatttttttttaatttttaaaatttttatttctcagccttgagattctgatatgtaaaaatgcaagtatcttcaaagatagaaaacatatacagatatcactaagatggcagaactcagtatatacaatcatggagcagtgccttataccagccctccagctaactgcagctgcaagcatgactctcatgctgtcttgtacttagtgttcaactagtgacccagcttcctcaatcatggggaagggccatcagcaaatggcactcaggcatgggggcttgagaaaagatcccacacactcaatggcatgttagacatttcatgaaaggattaggtgtgttacccccrgctttctcccccagagtttatcgagactgataataaagtaaatgcattataagccacacatacaagttgtggagtcaaggaaacagagtgacttttctgtgtgtcctattttataggctttaattaaattatttgtggccttggattgggggcaggatttggttattattattttttattatactttaagttctggggtacatgtgcagaacgtacaggtttgttacacgtaccatcgtggtttgctgcacccatcagcctgtcatctacattaggtatttctcctaatgctgtccctcccctaaccctgcactccccgagaggccctggtgtgtgatgttcccctccatgtccatgtgttctcattgttcaactcccacttatgagtgagaacatgcagttgttggttttctgttcttgtgttagtttgctgagaatgatggtttccagcttcatccatgttcctgcaaaggacatgaactcatcctttttcatgtctgcatagtatttcatagtgtatatgtaccacattttctttatccagtctatcattgatgggcatttaggttggttccaagtttttgctattgtgaatagtgccgcaataaacatacatgtgcatgtgtctttatggtagaatgatttataatcctttgggtatatacccagtaatgggattgctgggtcaaatgttatttctggttctaggtccttgaggaatcattacactgtcttccacaatgattgaactaatttacactcccaccaaaagtataaaagcgttcctatttctccacatcctctccagcatctgttgtttcctgactttttattgtttgccattttaactgacatgagatggtatctcattgtttttgatttgcatttctctaatgaccagtgatgagcattttttcatgtttgttagctgcataaatattatattttagattattcctgctttctcttatgggcatttagtgcattagtcatttagtgctataaatttccctctaaacactgctttaaacgtgtcccagagattctgatatgttgtgtctttgttcttactggtttcaaaggacatctttatttctgccttaatttcgttatttacccagttctcattcaggagcaggttgttcagtttccatgtagtgcggttttgagtgagtttcttaattttgagwtctaatttaattgcactatgcagtgagagcctgtttgttattatttccattcttttgcatttgctgaggagtgttttacttctaattatgtggtcagttttagaataagtgtgatgtggtrctgagaagaacrtatattctgtggatttggggtggaaaattctgtagatgtcttaagtctgcttggtccagaactgacttcaagtccttaatatccttgttaattttctgtctcattgatctgtctaataatgggtcatttatacttgcctttgctttaagcctgcttcaatagttagtaaatatgtttctagagtttttccaatttaaaaaaattgacctgcaccttgctttggattgtactaaaatctgatttcaacacaagcatagtctcctgaattgctttggttttgttcagctgaagscttggggagcactgaagccaaggytctactgtaccaaaaatttgaaggccatgcraatgatctgtatgyggaaggactaccagaaaacattcctttcagaagtccctcgtggtatggaatcscaaggctggaaaacatcattcaagtgggcaatcraattaaatttcttattaaaaggtaagatgataatctgcagaaacaaattcagtgtcttccctaaggagagattaattcgatgaggaagggccttttgttcccctctcattatgacttccttatatttacarttaacattyagattcacttattgaacaaacatgtatttagtataagtatcagatgtgcaaaattgggtctagcaagaaccctgtccttgggargcttaatattatgaaaaatgcaatgaagagttrttgagcatttttaggggagaaggcaaggatggcatacccagatcagtcatttgtgcatccagaagggagggaacgtgttccaaatatgagtaaaggcaggragatgtcaaatatgcccacatattcwcatacctcacccattctgtgtggagkgaggagtgccatgtgggcatggtgggattgcatagatagacttgggtggccaaatggaggaaggccttagatcctacaaaagcagtggcagtcattaaatggtctcatagcagttccctcttaaaataatttggatctrccctttagaaaggttattctggcttaattttgaagggtaatacatgggtagtttgagtgttggggrtaggaacagaaggcctctctctactcrtgaaaggaatgttgaagtgggttgagtcttgcttactgattgaggttgtgcatctgtgtrtattcattgggamtgagttrtatatggagrggaaaggtttaagatgatacagcaagctgcttctggctctgctrtgasacmsttcatctaagattcagaaacagaattgagctggtttggggsaaawgtgactyttgyatatttatcttwaaaaaagatgactttggagacatccagctggtctcacctgaatatctgaaaattgctattttcaaaattcaagtcaccaaaatgattattttcactataaaatgaaggcagaatggattatgtttaaaaattggccaggcacagtggcttacgcttgtaatcccagcactttgggaggctgagttgggtggatcacctgaggtgaggagttcgagaccagccttgccaacattgcaaaaccccgtgtctactaaaaatacaaaaattagccaggtgtggtggcgtgyacttgtggttccagctactcgggaggctgaggcaggataattgcttgaacctgggaggcggaagttgcagtgagtcgagatcgcaccactgtactccagcctggacaacaggatgagactctgtctcaaataataataataataattagcagtgcacarctgtgtgagaaaggcctgtaaatttcttctaaatgctttattataatattaatatcaactatgtatttatggtccagaacttcttactcacaatacaactgtagttactcagccaagaacaaatacaacaggtaaaatagttgtgaaatcctttttaaaagyacagrttaatcttgaagctttwaaaaattaatcttttaaaatgatggaactgctccttccttcacctccccaaaaaatcttttgcagaagctcaatacaggcacttcttgatttatcaatatgcacatatgcagtgtagggataactgaagctttttttctttcttcctttttttgatacagagtctcactctgtcacccaggctggagtgcagtggtgtgatctyggctcactgcaaccaggctcaagcaattctycttcctcagcctcctgagtasctgggattacaggcgtgcgccaccatgcctggctaagttttgtattttgtgtagagacaaggtttcaccattttggccaggctggtctcaaactcctaggctcaggtgatccttctgcctgagcctcccaaagtgctgggattatagatgtgagtcaccgcacccagcattaagctttgaactttggccagtggtatccaagagaaatacaatgtgtgctgcaaatgcaagccacatacataattttacattttcgagttcaacctgaaatcattataaataaatacacaatgaagtatttaacattctttacttcatttgcgtatgttctttttgttgataattgatgtgtctttcatactcacagcatatttcagtttcaagtagccacacaactgttcagggatagcagttactgtccgcatttggaccttaatgtttattcatatgagccctgttcctaaaatggcaaatactgtaactctggcctgcacacgaatatcacagcctaataggaaagatctaagaagtccccattgaacaaataatgttcttttctttctttttttttgagacgaagttttgctcttgtttcccaggctggagtacaatggtgcgatcttggctcaccgcaacctccgcctcctgggttcaagcaattctcctgcctcagcctcccaagtacctgggattacaggcctgtgccaccatgcctaactaatttttgtatttttggtagaggcagggtttcgccatgttggccaggctggtctcggacccctgacctcaggtgatctgcccaccttggcctcccaaagtgttaagattacaggtgtgaaccaccgtgcccagcctattttctttgttagagctctttattagagctttctttctttcccatctttttgtttgccattgtgcactgtcagagtaagtgaycacaatttgtagattatctaccaccttaggaatttaagttgccaagaaccaataactagccatttagtatgaaggtttttattgtcaggaaataagtgttgggaatcaagtatgaattatgtgtgcatattaggtctttacaaatttgtgcagttaatcattctcattaatactacagtgaataaatgttctcaagttgggttaatgggtgtgtcctgaaatactgctccttcagctctcacagtaccttggggcaattagtgaaggtcagtcagtgtgcccaatagattttgtgtggattatggcatggaaagtggttgagaaattctrtagtagggtaagaaaataatccttgtccaggagtcctgcagtggagaagacaaaactcagtgcttaactcataggttaagcatgttttttctttctttttttttgtttgagacagagtcttgctttgttgcccaggctggagtgcagtggcatgattttggctcactgtaaccttcacytcctgggttcaagcagttctcttgcctcagcctcccagtacctgggattacaggtgcacaccaccatgctggctaatttttgtatttttagaagagatggggtttcaccatgttggccyggctggtcttgagctcctgaccttgtgatcagcctgccttagtctcccraagtgctgagattacaggtgtgaaccmctgtgcctggccctcagcatgygtttgatttagccaaagaatcaaagcattggtgaagaattgaagattggaagttacacattttttgctaagggaagtaatagagaaagaaaaatattcctggaggtaaatcttcagtttggattaatgtgaacatgaagaaacctgtagaaaccttcatttctcaagacaaagctcaaattcaaggttgtgaggaatgcagtcactgcttttgttaggggcagttgtgacagtgattgcagaaactgagaytgcaaagcccgtattatataaagaatgtgcaagtgccatagaagacactgcaaggattgggtgctggagcastgctggacctgccrtcatcaccagagtgcagcagagagaatctcctcyyttgccatcactaacccagcacttgactttgtcccactcctaaaagatcttggaaggaattaaaggtgcttggtggtttctcattccagcataaccttacttggcctgaccatgaaccatgcattagtctttggacagggcaattcaaatcacagaccacataacaaaagaattttgtggccatcagaactgtctccttaaacacaccatgggtgcactgtgtcctcagcttggtgaaaggtagatgtcacacrcgagaaggtggtggagccaggcaygtgatggagcctcgaagagtgrgaggtggcagctggctctgtgaggagggtgtgaagtcctccctgggaggagcagatgccagaaaaggaggtgagggtgggcagaagaggaggctgagcagcaagtgaatagacgtgctcgacctcagaggaggagagtcccrtgtctttattggtaatattywaatgtggttgataccrgagttattttctgtggctgaatggttcaactactctgaaatccatggggaaaaacaaaacaaaacaaaaaaaaactcatactaaaaacccttgagatgctaagttttaaagtaaaggaaatgttacaagattttctgaaaccaccaacctttagcagtattttcagaccttctccaacattttccactgcctttgtcagcaatcagagatgaccttcacactgaggcaatcttccacttcccttacccttttccttttctctctctttctctcctttcctcatccagtaactccagtcagactccattgtctccaggtcgactttcgtcatcatccacaactcctccacacaagccctgaacacgtgtccatgtaagtgacatcctttgtctttatttttttattttattttattttattttattttattattttattttatttttttattttattttatttttttattttattttatttattttattttattttagagatggagtctccctctgttgccctggctggagtgcagtggcacaatcttggcttactgcaacctccacctcccgggttccagcatttctctgcctcagcctcctgagtagctgggattacaggcacccaccaccacacctggctaatttttgtatttttagtagagacggggtttcaccatgttggccaggctggtcttgaactcttgacctcgtgatccacccgcctcagcctcccaaagtgctgggatcacaggcgtgagccactgtgcccggcccatgatttactatttataagaacrtgggcttactacttgtgtaatacttatccctgtattttaggtgggagttgctgaggtttggtgactacatctggcctctcagggaaatggccaagttgttcacatctcacctgtataatgtgaagttgtttgtcagcttcattggttactactgtgaaatgagttataaagggaaatttttatttttatttttttatttttagtagagacgggttttcaccgtgttagccaggatggtctcaatctcctgacctcatgatatgcctgcttcggcctcccaaagtgctgggattacaggcatgagctaccgtgtctggccatagtaaggaaaattttttataaaaagaaatagatttaggccgagtgcagtggctcacacctgtaatcctagcactttgggaggccaaagtgggtggattgcctgagctcaggagtttgagaccaccctcggcaacatggtgaaaccccatctctactaaaatacaaaaatcaaaacaaaacaaaaaaattagctgggcttagtggtgagtgcctgtagtcccagctactggggaggctgaggcatgagaattgcttgagcctgggaggcggaggttgcagtgagctgacatcatgccattgccagcctgggcgacagggcaagactctgttagtaaaatatgtctagtaccagatgctttttggtctcctaatgacctatcaaactgcagggttttctggctttgtaatatattcagttccacatttattcaagaattgaggactttttatatcttcattatgtgccaagtactgggtgggacastaggtgacagagatgaacaaatccctratcccaggatttcacagtggatgttggaatttagtgccatttagcytcattcaattctgcagwagtcccaagattttccaagatcatcctgtcctccagtgtcctgttgattcaacttcagaatatatcccagagtctgtccctcttcattcctcactgctgccaccctggayccatctgccatcatctctcacctggtttatctcagtagtctcctaactggttttcttgtttccatgcttgcctccttcagtctattctgtctttttttttttcttttttgagacagagtcttgctctctcaccaaggctggagtacaatgctgtgatctctgcttactgtaacctccgcctcccaggttcaagcgattctcctgcctcagcctccctagtagctgggattacaggcacaaaccaccatgcctggctaattcttttgtatttttagtagagacagggttttgacatgttggccagactggtcttgaactcctggcctcgagtgatccgcctgcctcagcctcccaaagcgttgggattacaggtgtgagccactgcacccagcctgtctactctcaacacaacagctagaacagtcatttttcagtggaatttagatcatgtttacccctctgttcaaactctccagtggctttctgttttctacatgatcttgccccctactacctgtctcactgtgcttcctgctattctgctcttactcctctgtataaacactgagctcatggcgtttcctttaacatkccaggcatgcttgacyctgtcctgtctctgggccttgctgttccctctgcctggaacattcttcccctagtgtctgcatggctcactgtctcactgctttggattgaggctcaaaaatcaccttatcaaaagtgcctccagggtgctctgcgtaaaatgtatcctcaactcatttcctatttgatgtctgacwcccccactcttcttcactaaaacgtaagctccataaggaaagggattttgtctgttttgttctgttgtatccctaaatacctagaagrtgctcagtaaatatttcttggttgaatgactaaatcagcctattattgaatcagtcaatgtcctctgtaggagggacttctcacaccagtggtgcatatctgtatgttagctggtgtagggagggacatggtcagaatggcyctgtctgtgtggaatagttttgcttagcataatcccagcaggctcctattggggttaagccacagttttagccttattagtatcactctttaatcataaagtcagaggatgttaaaattgaaagggatttgggagactattcggttcgctttctcattattgatgtgagactaacagagcctagcaaaagtaagttaattactcacaatcgtaaagctgtacaggtcaatctgaaattaggcttctgacatcactctgtagtctttcctacgtgagttctcccctggctgagacagttcatgggctttcaggtttgacaattttctctccagtctctaaacaggagcttctatctggacattctaggttagcctagatggatgatgaccctgtgaggtgtggaaaatcccaaaggttgaccactgtgaataggaactaccctagatgtgtcaggagcaccgcaggcacgctcactcctccatttgctggagtcatgtagggtggacgaaacccaaatcaagaccatttgctgcttcagttcttttattgcatgtgacagtccaatgtgtctccatttaaattcagattttttgatgaatggtcagaccagctgcaggccctttgggccggaagtcttgatctcgccaactgttcatattcttttytcttttctttccttttctttcctttgcttttctttctttctttctttcctttctttttttttagatggagttttactcttgttgcccatgctggagtgtaatggtgtgatcttggcttaccgcaacctctgcctcccggattcaagtgattctccttcctcagcctcccgagtagctgggaatacaggtgtgtaccaccatgcccsgctaatttttctattttttaagtagagatggggttttaccatgttggccaggttggtctcgaacccctgacctcaggtgatctgcctrcctcagcttcccaaagtgctggaattacaggcatgagccactgtgcccagccaataacagatattttttgagcccctgccaagtgccaggcacagatctaggtgctgggaactaaggggagaatgagtaagacagtctcttttctcggggagcttccgttctagtggtggtggtgtggtggtggagaagcaggctatatacatgcaacaaatgatatgtgttcagacggtgataagtaatttgaagaaaataaatagagctttgggagttagaaagtttgggcattaggatgggcactgacctattggggtgggcagtgaagacctctctgaggaggtgacatttgagctgaggcagctcactgggcaagagtggttgtgatgggtagaacatgaagtgcagggacctgagatgtgagtggacttggcacggtgtttaagcaccataaagatggtcagggtggctggagcatagtggatcctggagaagcaagtaatactcagatgaggatggagcaccttctaggctatggaaaggaatctggataattccaatggagtaagaagcactgcaattaaatcaggggtcggcaaactctgtggcccatgggtcaaatctagcctgatgcctttttttatgaataaaccatattggaacacagtctcacccatgggtttacatattgtccatggctgtttttaatgttacaagagcagagttgagtagtttcaacagagaacatatggcccagaagcctaaaatatttactctctggtttttatagaaaaagtttactgacccctgaataaaatctcagttttgaggaggagacactctgggtactattggcatggtgtacccaggtatacttttgtctcttaccattcccagactgggtattactctgtgaatgaatggtaagagacaagagtgtacgtgaatagttcagataagaaataactagatgtttgctgggtgcggtggctcacgcctgcaatcctagcactttgggaggctgaggcatgtggatcacgaggtcaggagatggagaccagcctggccaacatgatgaaatcccatctctactaaaaatagaaaaattagctgggcgtggtggtgcacacctgtattcccagttccttgggaggctgaggtagaagaattgcttgaatccaggaggcggaagttgcagtgagccgagatcgcgccactgtactgcagcctgggtgacagaacaagactctgtcttggaaaaaaaagaaaaaagaaataactagatgttgagccaccagaaaacaaagatcacactgtttttattctgtttaaaaacacctagctatgcttcatactcattaaatattgttgaatgagtgatgagatgctgaataggaggtgccagtgaatatgaaggggaagcgaggttttgagagatatttaggaggtaaatatgatccacctgcctcggcctcccaaaatgctggaattacaggcctgagccactgtgcctggccaaaggcaggtgtttttgtttttgtttttgtttttttagatggagttttgcttttgttgcccaggctggagtgcaatggcatgatcttggctcactgcaacctccgcctcctgggttcaagtgattctcctgcctcggcctcccgagtagctgggattacagtcatgtgccatcacacctggctaattttttgtatttttagtagaaacggagtttcaccgtgttagtcaggatggtctctatttgctgacctcaggtgatctgcctgcctcaggctcccaaagtgctgggattacagacatgagccaccgcgcccagccaaaggcagctttttaaagggttgcacagcacttcatatgctacttaaaatgagattattcttcttcattcttagaatgccagttggttttattcgttgataaattcccagttagtcatactcayaagcgcaacattgttgatgggtstgacatcccttcgtaacttaagaatcattagtatgactgccctatggaggcatactgctctatctcaggtttatttcaataataaaacctttggaagttttaataatgaaacctacttaaggccctttgctcaagaagtctgagtcactaatcaccgcaattactcccatggcagctgtagagcaatttaacaggataatagtgaataagataaattacacttcagattcttaatggattgatgtgcaaaagtatgttagggaagatgggggtgggagaagagtrcctttcaaatttctgcacacagtaatacaatagggaactgggccattgtagccattactgctagggattagtcatctagtaacaacctctggggctcagtggtgagtagaacatcctgtttattatagacagcaaattgggttaattctcttgtttgtgtgcctctgtggagggggtggaaattctaggtgatctgctaattgtctgatttagaatactcccctttctactaaagaattagtatctttgatgtgaaaatagggaggcagaccagttttacaaatagctactggccaggagaataagtttctgccaggtgagtggttaaaaaaaggcagactggaaaaataactgtgggatggtaagtatttcttatttacaaggctaacataagttctctccatgtgttggggatggaagaagggatggattggttaagaagtgagtactatgcttgctttgagtgtccctcgatttgtgtttaggggagaaaagtgaggatgtggttatatgggtagggggtgggcccagggaaggggcccaaggaaggaaattcaggagacttgactgcagttccatccttatggacattccttggcacctggtcacattatggatgtctcaccatctgctgggtattgatttttcttttttttctttttctttttttttttttttttaagacagagtttcactcttgttgcttaggctggagtgcaatggcgcaatcttggctcaccgcaacctccacctcctggattcaagtgattctcctgcctcagcctcctgagtagctgggattacaggcatgcgccaccacacccagctaattttgtattttttctagagacagtgtttctccatgttggtcagactggtctctaactctcaacctcaggtgatccgtccgcctcagcctcccaaagtgctgggattgcagacatgagccacctcgcctagccagtcacgattttaaaaaaccaccatagcctagttaatgatgtttaatagctcatcaycacgaatcattgtgcacactcgctataccagaggctctaaactacccaattttttttttttttagattgagttttgctctattgcccaagctggagtacagtggcacaatctccgctcactgcaacctctgcctcctgggttcaagggattctcatgcctcaacttcccaagcagctgggattacaggtatccaccaccacacacagctaattattgtattttttagtacagatggggttttacattgtcagccaggctggtctcaractcctgacctcaagtgatctgcctgcctcagcctcccaaagtgctgggattataggtgtgagtcaccatgcccagcctaaactgcccaattttaaagggataattgggaaaacaattgtttaaaaaggaaatgagggagttgccatgactgcggttagcagtgtgaagaccctagaaaaccagtgtgaactcctgggggttcacagtctactgcctgttcaagagccttagaaaaccaggagccttaggagaccaggttctgaaagcttcccagggctgtataaacttctacattaagttccatgatgcccgatgagtagtcccacatttccacagtagacatgctgttgctgcctccttccttatcatgaaaagagcagaagatgcygataatacatgaagcaggaagacaaaggggagacactgaacttgtcacctacctttggatgcccctcatgcctcatgtttcccattgagcctcacttatcagtgacacagggaatggtccctttgctctccactttccctgtggcttcctggaggtaggggaggcagatcgtgctacttgctgatattatgttgctgtggattcgttggagcgacaggaacaggaaattttcctggtggtgtatgtgtcactggggctcacaggggtactttttaatgttctcactggcctctgtgattctgtgaccctggttattacatgttcagaaagtgtcagcttatttgaaagtgatactcttatcttctatttaaacattgccaaaaaccatcacacttttttttaaattaaaacatttttgtattttttattttctggagacaagagtcttgctctttgatgtagacatgaagggactcatagtccttcccctacaatatgtctttaatttaataacatatcaatgaagggtcatgtctgaatgaattatagaaattcaggacctaaaaaaggaaggtcccagaaaccgggctttggtttatttctactactacacttgctattgaaaccaagcagacaacttcatttctcttggattcagctttctcatgtgtcagaatgggagaggaagggaggcattgggataagtgtcattccaccgtctgtacttctaatctggctaacacacgtgtgaaaaatactgagatttgttgacagcagtttcctggactgctgtcttgaacaattctgaggaggtttagcaagaaagtgtgtttcagttgattgggtgtatctgtcatggagaaggaagtaaggagtggggagcacttgcagcattcccggacattcctgtccattatctcaatacctggtgctgacgtttcctgccccttatcaggaatcctgactactctgtgtctgatgacttgaacttactgagtactgcttagttgcgtcatagataccacctgtctttgaacagctaccctgcctcttgatgagaatgcaaaggctgctaagggccactgctgtatggaatggccttcggtcatctcttcttagaacacagaggtcattttgactgataacataactctccttttgattgaaagtgttaacatgggccgggcacgatggctcatgmctgtaatcccagcactttgggaggcygaggcagatggatcacttgaggtcaggagattgagaccatcctggctaacatggtgaaacctcatctctactaaaaatacaaaaaattagctgggtgtgttgacgtgtgactgtagtcccagctacttgggaggctgaggcaggagaatcacgtgaacccgggaggtggagattacagtgaactgagatcacaccactgcactctagcctaggcaagagagcaagactccatctcaaagaaaaaaaaaacaaagaaaagtgttaaaatattcctcctgaaagtacttatcttttaggcttgttcttcagatttgcccaatatgctaagcaaaatgccttcaatatgaagtgactattgctcgattgtagggaacttgttcataatgtacttgagaatgcagatacaaataaaagaatgtgtgtgtcaaattttatcttctacaaattatgttctcctgcactttcagctcaagctcttggactcactgaggcagtaaaagtaccatattctgtgtttgaatcaaaccccgagttcctgtatgtagaaggcttgccagacagaatttcctttccaagccctacctggtttggaattccatgacttgaaaggatcgtctgtggagtaataaaaccaagtttgttgttaaaaagtaagttccaggccaggtatggtggctcacgcctgtaatcccagcactttgggaggccaaggcaggtgaatcacctgaggtcaggagttcaagaccagcctgaccaacatatctactaaaaatgttaaaaattagccaggcatgttggctggtgcctgtaatcccagctacttgggagcctgaagcaggagaatcgcttgaatctgggaggcagaggctgcagtgagcccagatcacagcactgtactctagcctgggcgacagagtgagactctgcctcgacaacaacaacaacaatattaaaaaagtaagttatatttgccactgtagtcatttctggaattaaaacaataaaatgatatttctactaaaatgtttttctagctagaggtgacaggcgtggctgtaagtccttgatggaaaagcctggctctgagctgcagtcctggcactctccattgcccctgcagtcccccatcctgtactcagctgtctttgtcagtgcaagaatagtgaccactgcctccatggtgttgagaggcaccatggtggctcacagtacacctaagtacttgaatgaagtctaatttgctgggttttagctgctgtgttattcctgggtcaatcttgtgagcaactaaatattaatgattgagtttcttttcttttttgtttttttgagacagagtttcactcttgttgcccaggctggaatgcaatggcgtgatctcgactcattgcaaatttcgcctcctgggttcaagcgattctcttgcctcagcctcccaagtagctgggattacaggcatgcaccaccatgcctggctaatttttgtgtttttagtagagacagctaatttttctgtttttagtagagacagggtttcaccaagttggtcaggctggtctcgaacccctgacctcgggtgacccacccacttcagcctccaaaagtgctggtattacaggcatgagacaccgcacctggcctgatgtgatggttgagtttcttattatatctacatttctgtagaattttagtggctgaagaaagtatactagtgttaattttttttttcttgaaagaagtaatttactcttcatataattacttgccagtcatgggaaggaaaagtcagggtttttgtccacaatgatagaaattattgttacattacaggatgattctgcgaactcctttagggaaaaacactggtcacatcacgactgttttactagctgtgagaccaccattgtactggctaccataacatttcttggttttctttctagacctgaactagttatttcctactcgcctcctggaatggctaataaaataaacactaaaggtaagagattacctgtacttcctattatatttcactgcgttaagacatcctttctcagcattccttaaatcacacagaatcactggccactctctttgtggaactggcagttagtttcttggctttttaaggtgttttatttaatggacctctttttccttctttttttaaaaaaaaaaaaattattggaaatgtcacatttgcaatcccacttcattcatgtttccatggctttgttgagccccctgtggaggattacactacaagtttaattctgcaggttcctttgaaaagagccaaactgaataaattttaatactctgctcttataaagcatctccttctgtattttttcctacaatatactaaagtaattctgtgcttatttttcagctttgcagtccccaaaaagaccatgaagccctgagagtaatggaaaggttcctgaaattgaggtcactgtggaaggtaagggccagtccttggcatgtttctgttgattctccagtttaatagttatgtcaattcactagctacatgtgtatacagatgaaggtaaccaaattagttttacgtgtgaacagctgcctgtgataaagctaaatttccgaatgtctttaattaatttaatttctgaatgtctttaattaattaattaatcaatcagagatctctcctctacacgaggtgccatcctttcctgaaggagctccttgtaaagtgcatgaggtgttctttttttttttttttttttttttgagacagagtttcactcttgttgtccaggctggagtgccgtggcgctatcttggctcacggcaacctctgcctcctgcgttgaagtgattctttggcttcagcctcccgagtagctgggattacaggtgcccaccaccacacccaggtaattttgtatttttagtagagacagggtttctccatgttggtcaggctggtctcgaactcctgacctcaggtgatccatctgcctcggcctcccaaagtgctgggattacaggcacaagccactgtgcctggccaaggtgttccttttggtaaaaagtcacactccgtgaccacacaggcctgagcctgaatttataaagatttgaacaaggtgaacaatgacactatgtagaagggaggttaattccaaggtgacaggaactttatgaagtaaattacacttaaattaggccttgctggaagagaagaatgtcaccagggagagacaaagctactcctgatagaaggaatagcatgagcaaaagtgcagattaaaaagtccaggtaatgatgacaatctcattctagggagcatattttattccaactatatctggttttagagtcagaagaagtcctgggaccagctggttctagggtcacagtagttgtactctaaagcaactcatccatactgtcttcaattgatatattagtgagggaagcaactgaagaagtaatgaccccaaagcttcaccaggatagtgagatgagaggccaccacaaagaccaagacgttcagaaggaaaggcaggacagtgagaagacaagctgtcctgaagccaagtaacacatgcttaggttgagaggtggaggagaaggtgttttatagcatggtgacacattctgcaaaagcactgagagctgcacaagacagtggtgtgagcctccgcaaggagagagtgccaggtcagcgagccctgggggaatacagtctcctttaaaatattctggacagaggagagcagctagcaaagtgagtctgatttctactctttgtttcacctcctaactctagtataaagtgacattgtatatgctggtgctctgatctcggtctgtggatattagatattaagattggggagaaaataaaacagccagttaaagtgcaccatttttacaggcactgtcagtagcatataagaaatagcatgtttctcaaaagtaaattggttcatagtagtcagttggcacattcagcgtgtacttctatgagatttttttggtatctttaaactcttcattcattaatcctgttaactcaaagcttatttaataacataagctcttggttatgaactagatgttaggaacaatagagaaatgtagagctaatgtcatgagttaaaaggattggggctgtaggaataatgttaccaggaataacttgaggaatgtttgctactgtagctagctgtgattttccaaatagggaggtgcctgtttttctcacataaaagtaattgtgcaggtaggctgaagctgacattggttcagttgctcaaacatggttaagactggcttccctgtgcttctcttcactctcctttctggtgcacgatgaccaagagagctcctgtcatcatatctccatccatcatgtctccatccaattataagtaaagaaaatgcagcatgagccctgcctgcacccatggtcaggaaaagcaagaggctttttttgaatcctagcagaattttgcataagcctcttggttttaaaaaagatgaattttaaaataataaaataaagcacaaactctgaggccaaagtgataggatttaaatctgtgctctgccacttagaaaaattacttaaattctctgttgtttagattgcacacctgtaaaatgggaggaggaaaataatatttgactcatgatttttaaaatttgagatgttatttctttaataaacagctgctatcatttcagaacacttgctatttaggcagttaggaattttgcactagaaggaatgtaaagaaagacggtgggcatttgtaatggatttaacattcatcatttggctgcctgactgacccccagagctgtgattttactcatgaatttttcagaagtcccttagctagcaatgagtgtaaccagcctcccactctcaccattcagtgctcttttgttcttctctgtttcccctcaaacttgtttatcctcacagagtgattaaaacttgcatttcttttctttcctttttagagacagggtcttgctctgtcactcaggctgtagtgcagtggtgtgatcatggctcgctgtagcttcaaactgggctcaagcagtactcccacctcaacctcccaagtagctgggactacagacgtacaccaccatgcaaagctaaattttttattttttgttgtagagatgggatagtgctgtgtttctcaggatggtctcaaactcctagcctcaagtgatcctcctgcctcagcctcccaaattgctgggattataggcaggtatgagccacctgtgcctggcccccattccctttttttaaataacaactttattgaaatatagttcacataccataaattcatttatcaaagtatgcaattcagtagtttttataatattcatggagctgtgcatctatcatcacaatccgttttagaagctttcattaccctgtagagaaatccacacttcttagccacttctactcccctcatccccctgtgttcccataggcaaccactgatctattctctgtcactatagatttgcctaatctggaccttttttttcttcttttttttgagacagagtcttgctctgtcatctaggctggagtgcaatggtgcaatctcagctcactgcagtctctgcctcctgggttcaagcaattcttctgcctcagtcttctgagtagctgggattatgggcgcctgccaccacacctggctaattattgtatttttagtagagacagggtttcaccatgttggtcaggctggtctcaaattcctgacctcatgatctgcctgcctcggcctcccaaagtgggattacaggtgtgagccaccgcacccggcttggaccttttatataaataggattgtgcaatatgtgattgtttgtggctgggttttttttccctcttagcacagtgttttcagagttccttcctgtcatagcatgtgtcagtatttcgttccttctatggctgaataatattccatggtagagacacaccacattttgtttattcatcagttgatgaacatttgggttgtttccatgtattggccactgtgaataatgctgctatgaatattcatttataagtttttgtgtggacgtatatttttatttctctgggatatatacctaggagagaaattgttgcattctatgatactgtacatttagcattttgagaaactattttccaaagtggttacaccagtcaggtgcagtgactcacacctgtaatcccagctacatgagaggctgaggtgggaggatcacttgagcctacaagttaaaagagaccagcctgggcaagatagtgagatcctatctcgattttttaaaaaatcaaattaaaatgacaaaaaagaaacacccaaacaaagtggttaaaccattttttgttcccacctataatgtatgtgggttccaatttcttcaaattttcaccagcatttctttttttgagacaggatctcgctgtgtcacccaggcaggagtgcaatagtgtgatcatggctcactccagccttgaactctcagacacttgggatccttttacctcagcctcttgagcagttgggactaca

SEQ ID NO: 96625 - DNA, 13549 bp, Homo sapiens
cttgatttttaaaattatttacaaccatagaaaatattactctatattcttttttaatacataagggtttcaaggtctgtgtattatttaactttatactttaattttcctttttttgtttattctcttcattcttcctttgtcttgggtattgtccacatttgggctgagaactaaagaccccattttgagccaggcactcataggtttcactgcaagtcattctttctttgccatgtctcttacctgtatgtttctgtgttgccttttctttcccctggcacttaattatataaaacctaatgtgattgtatgagatttttccaaggtcaaagttcacccttgataagctcttttgcctttaggtttctgtataatctgttcacttatagcttatgtacaatttattttaaaattgtacactacaaaaatagtagtgctaggattcctttctcattctgacgtacttttgttagtcttaatgttaaagattcaggtttgacagatgaatttactgcttttatctataaagcagtgttttgtttggtaagttattataaattatataaattgtattcatccaagtttccagacaatacagtcagcaatacccaatgttatatatattcacattcatatatatatattcatatatacacatacatatgaaaaaagtatatatctttggttactgccccaaatgagtaaattgcatagattggcttgggttatattcagtgaatcaaatcttctggagagattaaggtataaaatagatttgtgtagcctttgattttaaaaaattcgttaataggctgggagcagtggctcatacctgtaatctcagcacttgggaaggctgaggcagctggatcatttgaggttaggagttcgagaccagcctgaccaacatggtgaaaccctgtctctactaaaaatacaaaaattagctgggtgtggaggcgggcaagtcccagctacttgggaagctgaggtgggagaattgcttgaacctgggaggcggaggttgcagtgagccgagattgtgccactcagtccagtctgggtgacagagcaagactgtctcaaaaaaaaaaaaaaatttatgtaatactctcacttattttgcttaaactgtgatctcaaattaaaatgaaaatgccattagatgatgatagtttcactatgtatggttgtcttagtgcagcttgatgtaaaaaaaaaaagtaggaaatgaagtttttttgaaatgtaaatactgaagctactgttatatcataggcaaaaaccgggtattcagagtttactgtgttaggcaaaatggatgcctactgttgactggatccctagaggatttcacactaagtgtactgtgatgtagataattttgagatgatgcctagctttctttgcccgaagaaaaatgtgatttcgtatatgtttgtagtgtagaggacgttccagttgagcacatttatggagactggttgttctggtatgttctaggaggatggcagactgtcagtatcatacataacagaggaatgcctgaagaagctggacacaaagcagcagaccaacaccctgctcaacctggtgtggagggactctgcgagcgaggaggtcttcaccaccatggcctccgtctgccacacgctgatggtgcagcaccgcatgatggtacccaaagtcaggcaagtgtccgtgggcgtctgtgccagggggtgccagccagagaacataccttcctccctgggaattgctctcctcttaagttttgtctgctcttttctggtagagattgatgtaggatattctactgtccaagcgtttcataaaaaataatttgtgtttttcttttctaaaccaacaaatactgagaccttttcctggcccgtgaggctctcaagtaccctatctgtaatattttctgtagtaccttatgaatgtgagtttattcacccatctgaaaggctggactcatacctgcattagtgaaacactatgttacatatctttttaggcttttttcatagtactcgtgttttatggggttttttttttttttcttcttcttcagacagcatctcactctgttgcccagagtgcagtggtgtgatcatagctcactgcagccttcacttcctgggctcaagcgatcctttcaccccaaccttctgagtagctgggaccacaggtgtgcaccaccacacctggctaattttttgtttttgtgtgtgtgtgtgtttgttttttgtttttttttttgagatggagtcttgctgttgcccaggctggagtgcagtggcgcgatctcggctcactgtaggctctgcccccctgggttcatgccattctcctgcctcagcctcccgagtagctgggactacaggcgcccgccacctcgcccggctaattttttgtatttttagtaaagacggggtttcaccatgttagccaggatggtcttgatctcctgaccttgtgatccgcctgcctcggcctcccaaagtgctgggattacagacatgagccaccacacccagccttcatagtacccttttaattagattgtccttgacaatttatccctaaaagtaaatttttgtttttcagcctttgaaataaacttttggttcagacaaaacaaaacctgcaagttaaaaatatggcctgtttgtgcttaaataattgtgacaataatcttgaactgttttctctccctccaatttgagtgatatgttagtggtttcttgagaatttaacagaaaagtattcaattggatacagagtaaaatatatgtagtagttctgctaggacccaagggactgatgttgcataggcaaaagctgtcagtaagtaagcaggtctgacgttaattcacgttaccctacagaattctctttgtttttataaaatgccatcccatcatatgaaaagagtgatttctgttggctaagaaagcattctttgaaatgaactgtaagtaaggaacccatcggttgaaatggccttgtaaacactaatgtggccaactaatgaggtgctgtcttcactcactggtgtttattaccatcggaggaagtagatgtcagtgaaactgtggctcctagattaggtccttagctctttgccggctaattgcatgagagcaggatgtgagatctgaggatcgcagcagctgaaccaggacacttgcttttattgtcgcacaacccattgctgtggatggtaattgctggatttcaatgcatcactgccctgggctgaggtttactagagaaccgcttccaaaaggtgtttaatgggtgaaggaactttctgtgtaggcttgattttatgagtacagcacctatttcctctaagaaactactctaggaattttatttatggcttaaacatattaggttctagtatttagaaagagcaagtaggcttactctaactgttacagattttaactgctttcaattttgatttttttaaaaaagtatttgaaagatgattagtatattcccaggctgataactcattcacaggccctcactgattaatattagtcccttttattttcagagttaggatttgccatttaatttctgtttaacactgattgtcagggtgtacaaatgaatgtggagacctttgtaccctgacatggaaagatttccgagacagatgcgtacatgaaaaccgggaagacacaggacagtatgtagaagaaccggcttttcctataagaaggatggaaaaaataggaatatatattcatattgcataaagaaacttggaagcatatacaagaaactcatgaaagtgaacactcgtgtctgaatatgccgaggaagctggggctggagcagaagtgctcttctgagtacactatttttatatcacttttaagttttggattaggtgaatgacttaatattttaaaattggttaagtaataaatgaattgccagctccttttctgagaggaaattttagatatattaccattggacgtggaaatttggatttaacatttttaatatccactattttaaaatatgattaaatattcactggctatattttaagggggcaaaaaataaaggctctactgcagtatcagacaactaaaataagaaagtaggctaccaaagatagcctgttagaaaagtgcttggctttcatctggcatacgtggggtttttagtgggtactgtttcagagtttcattgactgcatttgtgaccctacttacatgtagatgaggcctgcggtgcccactcagccccgcggcattcctggcctttgtgtgtatttcacattcctcgtccttccttttcctgactctttcaccggcttctttcatagataccatattcatgtgatttttcctttacttgggcttctcagtttcctttgtgggttcttttttcccctctttctcactctttcctaaacttctttttgtattcagttttttagggttgttagtttgtgacggagtcttgccttgtcgcccaggctggagtgcagtggtgtgaactcggctcactgcaacctccacctccagggttcaagcgatcctcctacttcagcctcccgagtagctgagattacgggcacccatcaccatgcccagctaatttttgtatttttagtagagatggggtttcaccatgtaggccaggctggtctcgaactcctgacctcaggtgatctcccgcctcagctttccaaagtgctgggattacaggcgtgagccactgcgccctgcttagttttttagttctttatttggtcctctgggtaatctctttcatacaagtggcttcagctacattctagtgactctcacatttgtgtctttagtttaagtaactttctggagctccagacacaagtgtacctgcttaataggagatgtccctggggacctctcctctgtcccctcccagggtctgaagttgagtccagcatctctccctcttaagagcctcctctttctgtccctgttttggtgaacaggcccgtcatctacttggttgtctgtacctgcagcctgaaactgcagtgtcctgcatggtagccaccagtgacgtgtgttttaaagtaaattaaatacaagcacagactcaggtcctcggctaccaaagccacatttcaagtgcccagtagccacatgtggccaggggctaccttattggacatcacagattagaacacacccaccctcacggaaggtgctggtgggcggtgctgcccagggttttggctcagtattcccaccatggtgctcgagagctgtattctctatgtcatggtttgccagcctgacttgtggaaaatacaaccctgattattgcattctcttgaacagtgtagactccctttgcttttaggaaaaaattcacattccttggattattgatttgtgcagtatccccttgttatcaagcatttgtttacctctcaactttatttctagcacaaaatactttttctccaaccataaatgaggcaaaaaggcatatcttgcattttcttgatcccattgcgcttttttatgcctccatggtgtttcgtgcccctttccttttgcgtatgccagtctcttccagttaatgtctgggctggcatgttctcaggggcttggctcttttaccccattgatggatctaaaagttttgaagcagaattttgaagatagtgttttaggggtcgaagaggttgatgttataatttgcccgtagtttcatttaaatacataaatcataagacacctagttttatttcaacatatgcttgatttttccaccaaaaagtagtacagtgaagcagcttaattatgtcttgtgttgttaatcattgtgatttagataaacagcggtgcgcctcgaagcgcagtgcttcttttctgtgcacgcgcgtgtgtatgtgtgtgtgtagtgtttgttggttttgtctttatttttgtttttgttttctgaaacaaggtctcactttgtcacccaggctggagtgccrtggcgtgatctcagctcactgaaaccccgcctcccaggctcaggtgatcctcctacctcagcacccttgagtagctgggacgataggcgtgccaccacacctggctaattttttgtaatttttgtagaaacggggttttgccatgttgcctaggctggtctcgaacacctgggcccaagtaatctgcttgtctcagccctcagcctcccagagtgctgggattgcaggtgcaagtcacygcgcccagcccctcgtgtgttttctaaccatttctttgccatgtgttttctaagaactgtggtgtatgtggtggggatgaatgctctttagctctgagagatttatagcttcatatcttatactttaataatttgggataaaatgattacacagatgacttcaaagcagaaaaatacagatttgtttttcrttgtatgtgtagaattaaatatatataccgtccatgtgtttgtaaacaagtttttataatattttggaaaaaatattgaggatgtgcctggagagagaagtaaattttgtctataatttcatagctgcttttattatcagtgatattttcattataatcaatagaattaataagctattgattcatgttaaaaattgcattctctttcatgaagttcaaataacattgatgagcttttaaacatttcagcacatagtgatcttaaaattaaatgtattttgaaatcctatctagattataaactaatttccactagctgttgttagacacatcaaataaataaaatagacttgccttcgtcagcttcagcaatatcattcatagttctgaatcttctaagaattcttagaacatttgtgaatgataattgtttcccgggaaatatgagtacacttggaagaagcatattccaccaaagtgattctaaatccctaccacgtttttaaagttttcttttaagcttgttaagaaatagtaagagaaggggcttccttttcgatccgccatctgcggtggagcygccaccaaaatgcagatttccataaaaacccttacggggaagaccatcaccctcaaggttgaacccttggatatgatagaaaatgtaaaggccaagatccaggataaggaaggaattcctcctgatcagcaaagactgatctttgctggcaagcaactggaagatggatgtactgtctgactacaacattcaaaaggagcttactcttcatcttgtgttgagacttcgtggtggtgctaagaaaaggaaggagtcttaccccactcccaagaagaataagcgcaagagaaagaaggggaagctggctgtcctgaagtattagaaggtggatgagaatgacaaaatgagctgccttcgtcgagagtgcccttctgatgaatgtggtgctggagtgtttatggcaagtcactttgacagacattattgtggcaaatgttgtctgactactgcttcaacaaaccagaagacaagtaactgcgtatgagttaataaaagacatgaacttaaaaaaaaaaaaaagaagggattatcaaagaagacatttgaggtagtgaatgccactttcccccattttaatttaaactgtagcatgagggaaagtatgttttttgaatctgtaaatcttttaattaaagaaaatcagttgccagtaagaagggctggctgtttaaattggttctggtgtcaatgctggaatgctagcgcgcctgagtgtctaaggcttacctcctactcttagctcctagtttgtgaagagcaatttttagcagcttgtctccagacgaaatacaccttaaaatttttattagtaaggacattggaatttattttgaatcttgcattatctgatgcaaattattatatatctgttttattgctttttatggcattagaagtgtccagtaatatttttttaaaaagaaaaatttcagaagaacaaattattgcctttgtacttgtgtgctataagagttcgacagatcattgggtgtctcgctgtttcttttacctgtggcacctggacttagaggggaattctcagaggatgccatgctgtggtggccttgactccttgtgtgggagccagtgtcttccattgtgttctctttcataactcaagagagtccccgtggaaaactggcctgaatttatgacccggcttactgattaactcataggattgttacagctaaataaagcttaatgagtaatttttaatctatcccactatgtgggagaagaatatcacttctttacattttagaagtagagccccagactaaataaccttcagaaatttgtctttttttttttttttttggtgaaaacattctttattagtaagcagacatttgaaactttttgattacatgcatcatgcaaaatgactgacctcacacatggttgtctgttcattgtgacatcttttttgagatgattacaaatttaagatgactgcagtagtaaaaataattcatgaaaatgactctcaatgaagcaaaacactacatagcacacatgaaatactgttcatccctcctggatgtttaattctctcctaacgtaaatctctattttggaagactattatttacaaaaatggcagttgtttttgtatgtgcatctataggcactgaactgatatgaacaaaatttcaaataattttacaaggtttggttgttttttcctgttttgttaatccaaaacaggacaatgccctttgatttacaatgttcagttcttttaagaaatcattttctttggaagatgattttgacccatgaaaaagttgttttacccctggtaatctttttgaaatggggctggctgttatacattatacaggttgttttcagttaagtgaaaaggagttgggcttgtcttgagaagaattcctctaaattatggcactgagaaaacttctctgcagtggtgggctcaccacttccatcctgtggtagttctggtagcactcctggtatgaaaaccctagcacaggtaatttcacctctttgaaataagcagtgatcctggagaaaggtgaatattccaaatctagtagcatattcaggtcatctggcagagaagtaggcataaaagacttttctaggtacttagaatgctgctgtaacaaatatctaaaaatggaaaagtggctctggaattaggcagtaggtcgaggctggaagaattctgaggcgcatgccagaaagaagccaaattgccttaaacagactgttagtagaaatgtggaatgttaatgctagggaggccttgaaggaagaaaggagtatagcagagaatacctcgattgcggtaaaatatctaaatcatcatgaatagactgttggtagaaaatgaggaatatgttattggaaaactggaggaaaaggggtccttgttacatagtggcaaaaagctaagctgaattgtgtcctgcagttatgtgtaaagcagaatttttaagtgatgacttcagtattagctgaggatatttccaagcaagctgtggaaggtacagcctgctgtcttcttgctgattatggtaaaatatggaaggaggtagataaattgagggaagaactgttgaatataaagaaactaggacttgatttgggaaattcgtggcctattcaaggcaaaagccactaaaactaagagattcactgtcaggacagccttctctagagaaagtgatgaaggtatggctgtataaccttctgctaatacttcagaaacatcaaaaggtctgagtatcaagtcacacaaaaggctctttgaggagattaagagtgtgaatcatagatcctcccagctatttcagaaaaagccaaaattagagacgggattttccaggaaagatatgtgaggagcctcctgtgtaaatgagtgaatccccatgacatatgtaagagacccacaagtttctcgacaatgttatagcagcagaaacaccactatttttaacagaatgctttagagaatataaaagaagaaacaaactgataagctgatactcagctgcaaacatgtgctaccttttgtgaaaaagtaaagatgattgagacagtcacaagcccagagaactgagcagtgagctgaagattactcccaggccttgaaactgaaaggagggtgcctggctggttttgtaaattgatggtgctgatggctccttttttcatcccaatttctgctttttgaacaggaatgtgtatagctgttactgtatgcctgtcacaccatcatacatgggagcagataacttgttttctaggttcgcaagtgcacagatggaggagaattatgccccagaaatcacacccagatcctctcccaaatttagatggctttagtgtgagatttgagacttttgagttggtgagactcagataagattttggatttagagttgatgctgtaataatgggttgtgacttttgagcacctatgagtgacgtaaatttatttgtgatggatctgaatcttttaacacaggggtggagtggtggcggggcgggggttgcactgtagtaggcaagaagaataatgttccatgtaaaacgttaatgtcctaatctccaaacctgtatgtaaccttaaatggtaaaagagattttgcagatgtaattaaggttactatggatttcaagacgaggcgataagcccagattatgcaatgggactaatttaatcatgagtcctgcagagaacctctccagggtggtgtcagagagatgtggtaacagaagggtcatagagatgaaacagtgctggtttttaagatagaaggccgcaagccaaggaatgcggatgttctctagaaggtggaatgacaaggaaataaataattctcctatgcaacgctgccgacaaactgatgttaaaagcaccgcgaaacccgtttggactcctaacctatagaattgttaagataataaatttgtgctattttaagccacattttgtaacttgttatggtggcaatgggaaactaaccagaagtgataactaaggatgaagtggtgtctgggaagaagggaaaccttctgacttcagaaatacaaacatttatgctggtagttctttagatctagtctgtccgacagaatatacattcctgtatttctacactagtcttgttctggagaagacgttctaggttgagcacatagaagagtgtttagtgtatatagtgagtttcctagaaaaatgtgttgaatgaataaatgaatgtgatcaaggcaagctctgggaggaactgtaattacttgattttaaaatgctgttgctgtttatcatatcttcttaagaattgctgacctttaggccaggtgcagtggctcacgcctataatcccagcactttgggagtctgaggtgggtggatcacctgaggtcgggagtttgagaccagcctgaccaacaaggagaaaccccgtctctactaaaaatacaaaaatgagctgggcgtggtggtgcatgcctgtaatcccagctactcgggaggctgaggcaggagaatctcttgaacctgggaggtggaggttgtggtgagcggagatagcgccattgcactccaggctgggcaacaagagcaaaactccatctcaaaaaaaagaattgctgaactttatgtgtttctgtttaagttcacagcagtcataattctgcaaaatacaaggcaaaactgtcgtttctgatactagtaatatatctaaatcagtaagtaaaaaggatgtgtaacatcttaataggagaaataattattgtatgatcaaacaatttcaaaatcaaactagacacttttcagtatttactacagacaaattttcaacttatttgatcaaaagatttcttaatggctgttagtcaatgctgcatcaagaaactttagtgcaaattttaccaaatgcatttatcaaaaaggggttttcatttttttctgcaaacaaaacattaacactaagtatgtaacaaactgatttgcctacaaatccaaaaactatcaacataagccagtccttcaactaaaaactcaaacatacttatcttaaggtctattcctaatccagatttgtctatattcaggttggaagacagaataacaataaaaccaaaatttatctgtaaaaataataaaaataatttgtttttttttttttttaatgctggaggtattgtccttattaatacgacacatcatctgttcccacatggtactgcatggataggaacaatattattttagttgatggagtaacacagtgttaagaatatctgcttctagcagtgtcaggctttcatctgttagctctttattcggaaatgaagtcacaagaataaagtcaagagctgcaaattcaggacaagactgtacaataaagttccggacatccaggatcctgtgtgtactattgaatctttgtatcaaacgactcccatctgctaacctgatttgaatttttgttgttggcactgaatcatcaataagaacaaccgcgttaagtattgatttatcctcctcttctggagaggaaggtgtactgactatttcaggtgtaagccttccaagtttttgcccttctccactaaaagccttgaacctcaatctaggttttatgtattcttgatcctgatggtcctccatatcccaattcacttggccaccatgaacaaggcactgaagctccagggggatctctcctcttttaacaaactccagaaattgagcatttgttggttcattgtaaggtctcaattctccatcatctaaactgaaaccattgctccacagtttaagcaaaatctgaacatcttgtagctgattttctccatgcatatattcagaccgcttacaaaaggaattacccaatctgtatcctccacctgtaaatgacattgaggtggtgtccgtgggctcttgaagactgcagctttaggtctgtcagacttggaagatttgcgcttcacttcatcttcatacagttcttccaaggccagtttatttcttgatatgtcatccctttggctgttttcaagtttctttgcaggttcttcacattaagttctgcaaatcctgtgcgctcggaggccacagcctggaagatctcctctcctgctcaccgagctcagggccgccgccctccgccatcttccgctggctgtatttgtctttttttttttatttttttcgacagggagtcttgttctgtcacccaggctgaagtgcagtggcgccatctcggctcactgcaacctccacctccaaggttcaagcgattctcctgcctcagcctcctgagcagctgggattacaggcatgcgccaccacacctagcaaatttttgtatttttagtagagacggggtttcaccatgttgaccaggctggtctcgaacccctgacctcaggtggttacccaccttggcctcccaaagtgctaggattacaggcgtgagcacctggcccagaaatttatttttaaaagtttaatagtttgttttattattgcttattg

SEQ ID NO: 96626 - DNA, 55898 bp, Homo sapiens
ctggagcagagcagtggccacggcagctgccatcccccccagcccctgggcaggtcagctgctcctgagcccaccagctcacacagaggggccttgagaagcccaggcgggcggggaaggtaggacccccgagggtggccactcacccgggggcttgcacatgcggatctggctctggccctgcagcagggaggctgagggggcagccgtgagcttctcgcaggaggtagttctgggggccaggtcgggggccggtgaggccggggagcactgggcgtggcagcggagctgggccagcgaagggggcatgccctggtagtgccgggtggcgctcaggaggtcgttcaggatctgcaggatggtgccgatgtcacgccgcggccgcccgctgctgtcttggcagttggggtgtagcgtgcctgcgggcagaggtggccgtgagtgcccggcacgggcacagtcccgcatgtccaggacgggcgtccacgggtgtgagctcatgagctcaggcaatggcgtggacatgtgggctgatgtgcacgagggaccacggggcgggagcgggacacgtccccagtatgcaggcacctggtgacccgcggccccccgggcagggccaggcgtgtgtgtgggggattcctgggggacatgtgaagtgagcagacggacacagcctgtgtatgcccagaatatgtggagtcgcctgtgggtggatgtagaccccaaatgcacagggtcacgggacacacgtgagctcacacatgtgctgtgacacctaccagagaaggtccctgagaagacccccggggcgtgattcacaaagctctcgatgacggcgccgggttttcgggagcggggggcagggctggcccctggggtagacgtggtgctggcaccaggactggcactgctgctggccgtgggggagcagtccatctgctgatgggaggaaggggcacatgagcacggggtccaggatcaggggatcaccagcaacccagggaccagagatcacccaccagcccaggtcaggagatgacctgtcaacacagggtttagagataaactagcccaaggtcacgaggtcacaaccaacccaggacacagagatgacccatgagtcaaagatcaagagatcatctactggtccaggtcatgtcaggcgatgaccgtcaactcaggatctagaaataccccaccaatctaggctgggggatcacccaccagcccgaggtcacaggatagcccttaatacaagggactcacctgggactaagagtccttgtcctccccaagacctccccaggacggcccaccctttggattccaaccaagggtcacccttcccttccccaggctcacctccgggcaggtggtggaggctgcgtgggaccggaaggagccggctgtgatgggcgagggagatgcaggggacgggctggtgggcaccggggggactcgggcggcactggacaccggccggcagggcgaggacacgggggaggctatgctggggtccccccgcgcagcagcggcggcggccgcagcggccagcacatggcggtgttgcagtggagcgtgctgggccgcgagctgcagctgcacgaacatcatgtggtcgcccacacgcaaggccagtgtcagtggcgaacggcccgacaggaagtcactgacctgcaaggagagcggtccgtcagctgggagccccagcttgcggcgcccccagcccagcccggcccagtccccccgcgctgtgacctggggcctctcgccgcccctctctgggctctggggtccctgtcggtgccacggacgcttaaataaaatgaatctgtatttccggaagcctcctccgccagcccggcccggcccgggcgccgctgggggctgtggggacagaggcgggtcagacgggggcctgcccctccctggccaactaggtcggtcttgcaaggggaaactgaggccagagggggcggggcccagctggcagtcactgacctcaaacaaccttcactttgcctttcccccaccctcatgggcccctagatcctctctgcctgtggatacgggaggggctccacctcaggccccctcccagctaagtcaccagggccagcaagtgggtggaattcctgcacgaattcttctgtcctaacctttgctttctcaagataaatatttatctgtcctgggcggggcggaggcctagggggctgtggcaaggctgcaggaaggggccctgaccgccctggggctggagtcccggagggcacaacctgctccaagcacagaaaccctcaatctgcccccgttcagggtgggtgtgggttgaatctcaccctgtcctcgccaagccccctgctctgggtatgggccagagccctgctctccccagtggccgggatggggggggggggtggcggaggtttctgagaagtgacataggctgggatgactcagaaccgaccgcctcccagctctccctcccggctctcctctccactggcagtagctggcgtaaccttctctgcttggggcccatggggagggaggcagggaggagggcagggtgaagcccccaccctgcggcccagcctgcccggccccctacccccctgccccaagacagcctttgcaggaagggcccggggtggcttcccgagagcagctggagtccccaccaccacccgccctgcaacttcctccctggggaaggctaatgggcgggcatgactcggtgccaggcagggaagcaaccctggggagcccagtgtctccgcccagcaccccctccagccccccccaacccagctccttcctgacgcaggcgcccagggaggagggtgtgaagccaacacgccctgggccccctgccaaccgcagccccccagcggcggggagctctgctcacactcgccccaggaaatcacctgcagcccccgccctggctcgggaccccggctctgcccccacgccactgctgctgctgctgtggccacccccatggcagaccacccagctcccggcccccgccctgcccccgcgatgtagggaaagggcaggactctacatgccgctgggaaagcggaagggggtgcgggcctcggggccagggaggcccgggaagccggccaccccttgctggggcgggtggcagcctgcgtcccccaccctggcagcgggcggattgctgaggcctgtgtcaccctcctgggaggtggccagggcccttgtctgaggaaggcttggccgcagccaagaaaatgaggaaagaaggagaaaaaaaaaaaaaagtccgcagcaaaaccgggaaccgggtgagggccagccccagcctccctcctggccgcttactaaatattttcctaacatcctgtctaggcctcactggccccagggctgggcacccccgccccctcccctttcggggtagagaacaaaggccagagagaggaggggagggtgacgagatccccaccctctcacgatgggggtcacggaaggcggaaggagtgtcacccaagccgccacccccagccctcagcagaaatgtaaaaaaggagaaactcgctctggggaagccacagcggctggaggggggctcctcggtgggggcggagggggctggggatgcaggccagggtgtgagcggggatgaggccccataggccaaggtcatcctgcaggcagtcttgtgaaagccaggcccccttcccccagggcagccaccgtgggagagaaagccctccgggtcaggtggtgaatcttgggggagaggaggtggggaggccaggccaggctggcacccaggcggggtggcgcgtcccctcccctcccccagcctcctgggagcacagacaacccccaggccccgtcggtggccaaggcaccctgctcccagggctgccctgttaggaaggggctggcgaggtcttacctgcgtctccgtgagactctcgagagcttgcatcacggactgttccggccttgaggcctgagactacaaagagagggaggagaggggcctgagtgtggggtcggaatcctgggctggaatagggggtggagagggccctgctggctggcggggtgggggccccaggtagtgtgtgtgcggacaggtaccgagggaggggctactgcctgtgtgcgggggcctctgggggcacgcagccccatggccatttaccatgaggcccgcttccacggtgggtaccaaggtcagcttgctgccatcacccacgccgaactcctgcagcttccccgaactgagccggctggggggaggaaggaagagcatgagactccgcggagacgacacagggacgcggaagcagaggccgcgggggagggctgtgcttgtgtggggagagacggataagttcccacccccaccccttcccggcttccagatccagggccctaagcgcgtgcagagaggtctccgtctggtgctgggagccccatcctggcgattcggaccccttccctccagtggaacccccgccctggactctggcaccccctctgcaccccaaccaggcactttctcctcctctgggccccagtgtgctctatgccaccttcccccacgaccccagggcagcccctgcccccaattccctaattctagtcctggctcctctttgtaggaaccacgggtttcggcccgaggagaggcctgggggttgcgccgggccgggctccccctcctcctccctccccggcgcaggcggccgccgccgcgcagacaaaggagaccctccccctccgcccctcccccgatgggcccctccactgggatggacactgcgtgtccccggaggcccgcggggggagggctccgggcctgcaggcgatttaaataccaggggggaggggaggctgcggggagcgctcggaggcgagaacaaagggggggagagagacgcaagtggggggagacagccagacgcagaggaggccgccgagcagatgcggaagccggcgcggacgcaggcgggagggggcggtggcggcccccacacccgcagccgggacccccgcaacgccctgggattcctgcccgcccccaaggggggccgccgaagcccggcccgggacgccctcgcagccgcctttgtgcggcgaccccgggcgggggagggggccgaggcaggcgaggccgagcagagggcgcccgagagcgcgcggcgcgcccccgccccctgtctggccgccccctgccttccccgcgcggcgcgctctttgttcccgcccgggggccggggcccgagggggcggccggccgggggcgcgcggtacctacgtgtctttgtggagaagagccaggcgctccttgggcactttgaggcgctgggacaaccgcttgcgcagcccctccaccgtctcgtcgggcggcacggccaggtcgtagcgggtgcccgtggtgctgtggatggcgaggctcatgggcgccgcctcggccgccgggcccagctcgcaggcgccgccgggggccccgcgccggcagctccgggcgccgccgggctgcggctccatccccggcgcgcgctggggggctgggggcggcgggcgccgccaatcctcgccgcgcctccgggacaggggcgagaggctccccggatgccgggtcctccgggcactcgggggcgcggagcagcgcgcgtcctcctcgagaaagtcccggccgcggaatgcgagaccgaaatccaaaatccgagtggcgctccgaggtcgctccggctcctgggggcgccttccgggggtggggacggcacttgcttctccttcaaagggcggcgggcgcgaccgggacgcggcgcggttaagggtcctggggagggggcgccgctcggctggtggcgctgggtgccgtctgccgcccgggtcgcgcttcctcgcgcgtcccctcccttagcaacagccgtcgccgccgctcggaggatctgggggtgaaagtaacaagaaaaaaaagttataatgtatcaacgttccagggggcggggccgccgccccctcccattcactacttactccgccggccgggcgccggccaatcgccgcgcgccgagcgcccagtcggccgcgagcccgggcctatgagagccgccgcggcaccgccccacgtggcagccgggcccgccccctcgccccgcccccagcgcccaggcgaccaaggggagcgcagcgggggcggggctggcgcctctccgcgcccgcccccgccccgcccgcgcccgcagccattcataagcgcccggagcccgcaacaaagggcgggcgcgccccggggggcgcgggacccaggtctggagacgggtctggtacccctcgcgatcccaagggagcggccgggagcgggagggggcgcgggccattgttcccggcgccgggaggggcaggaagtcgtggggccaccccgccgccttcgtccgggaaaagccgcgagcggaagcgggagcgcgaagtccgcgcctcgtggccggggtcccggggcgggcgggcgacggtgaggctagggccgcggccccggggagggcgtggtgcgtgggggcggagttgtggccggggcggggcgcccgcacctcggtgacgtggccgggtggctgccgccgggggccccgcgcgcccacccgccggccgcgggcagaacccgtttccccgaggcgcgcccgctcgagccgtgacgtgacgcggcgtccccggctgcgcccgcgcgcgctcggggatgcggtgagtcagcagctcgggcgcgccctctgccgggcccgcctgggagcgccgcccggagtcccggggagggggcgccgcgctgcccctggcaggggaggaagacgactgggctgcgcgcgggggaggaaccccgatcgggaacgaaagactgtagtcgggagactgggaccgtgtggctgggcaacggagggcggaacggcaaccagttcaaggtcacccgcggtgaagggggagtgccccggggggcggggcgggggctgaggtccggccagggcggcgctggctgcgcggagcccctcccaccccgcaccccggggggcttcccaggaccggaggctccccgatccctcctgtcccaagaacaaagaaaagtgcgggcatcctgagccatctagagtgggcacccttcctcggcccgcaggtcccccccctccacactcaccgggcgcggccggttctgcgctccaagtgctgcgagtaccttcgtccggggccgaatgcgcgctggccgggccggtctgggccaagcgcgcggccctcagcctttatccgcgccgccttccctcggggtggagttagggcgggcaggggggcggggggccgggcgggcggtgacgcagactggcccccgcccctgcctgccggccctggccctggggcgccttgacggctgggccacccgggacccaggcttggcgcagttcatggggggactccccttgaatgccccgagccaagggtctcggcccgcctcgccgcgggctgagatgcaccccgaatcgtcagcgggacagggttttggggtgtacagcgcgactcgctgccccgcccccttcctgtcgccccaggcccggtgcttccgcctgggggcgcccgcgtgggggggacgggaagaggggcctgagtcagcggctgtcgtccaggaaaacaggctggagtcacctgccgtagagtgggggtgccctggccagccctggcctcctgcatctgtcaatggtgacctcagagggcatttatggagcgattagccagtgccaggcctgccttgtgcccagccagtcaccagccggctatgctgtgaccccgggaggtaactggcctctccaagcctcagtttctccagggtgggtgggagtgtggtgaggggatgcggcaggatcactttggggccatcaccccccattaatgcaggacatgcactggttcccagcctttggggtgggcattaccccattttacagatgaagaaactgaggccacagccaatgagacacgaatgtggtgtgcatctcacccttccccgtcggctttttgaggatggtcctggttgaggtgggccccgtcctgcccctctatttagagaaggggaccccattcctacgggagcacctcctgtccactcatctggcccctccctttatctggcctgaccacctccacccccaccctggccatgggcgcccctcccagggctgcgctcctccccaggtctccttccggctgccacccatgctcccggcagccstggcccccaccttgacaggcacacccagccccgaagggtcagggctaggccagagagggagaggctgggataacccttggaagggggtcacaggggctgcggtttgaggaatgactaggagtttgtcacataaaaaagatgatgcggtcgggcgcggtggctcacgcctgtaatcccagcactttgggaggccgaggcgggcggatcacaaggtcaagagattgagaccagcctggccaacatggtgaaaccctgtctctactaaaaatacaaaaattagctgggcrtggtggcatgtgtctgtagtcccagctactcaggaggctgaggcaggagaatcgcttgaacgcgggaggcggaggttacaataaacccagatcgtgccagggcactccagcctgagcgacaaaacgagattccgtctcaaaaaaaaaaaaaaaaaaaaaaaggccgggcgcggtggctcatgcctgtaatcctggcactttgggaggccgaggcgggcggatcacgaggtcaggagttcgagaccagcctgatcaacatggtgaaaccctgtctgtactaaaaacacaaaaattagccaggcgtggtgatgtgcgcctgtaatctcagctacttgggaggctgaggcgggagcattgctcgaacccgggagacggagattgtggtgagctgagattgtgccattgcactccagcctgggcaataagagcgaaactcctctcaaaaaaaaaaaaaaaaaaaaaaaaaaaagacgatggtccaggaagtgggaatggcttgagcagttctgggagcttagtgaactggacccagttggagggaggaggggcagggtcgatgaatggggcttggatgaagggctggggccccaggtgggaactacagggccaggctcattctgcttccagtgagaacaaaggtggcggagggagccgtggactggtgccaaatgagcagcccaagcaggacactggggccccctgtgagtggccagcagcccccacctccctccctgcctcttgcctctcgtgtgtggctctgccacctgcacaccgtcacctcagtctggtcgggagtggaatggacaccgtcacctcagtctggtcgggagtggaatggacaccgtcacctcagtctggtcgggagtggaatggacaccatcacctcagtctggtcgggagtggaatgggacacgggttgtmggaacttgctgggcttcacaggggccactgtgtggccctttggggaccagatgcccagagccagtctaaatgaataaacatgctaaaacgcttccccaccatttcccatactcggcgtccccatggttgagtgggttgttcctgggtgtgatggggacaaaccctgtgctctgttctgcctcactaagccaggggctgccctcactgaagggccttgaccgcctggttcccggccccaccctgactgcctcctgctccaggacgcatccagccagcacgggctgttccctccgagtgtcaggtgtctcgggtgtcctgaggcctggctccaaggttcacaccctccctggtggtgggggcaggggaggtccccggagtgagcagctcctcccgctgggcccctgctaagtcccagctgtgcccttggtcttatttatagggtcctggtggcctggcaggaacttgaagacctggggctggaactgggggcgggggggagggggggcctgggcagaggctgctcctgtggcctggtggctgacacaaccttccctgggctgcggattcctggagaagtgggggcctggtcactcgtgtcccgaggcccaagtggagggggagccaggcaggggaccgtgggctgttccagaatacctgatctgctgaccggcggcctcagagtcgcaaggcccccaacggcacctcgcctcaagtgaagctgtggcaagtcacccgcatagtgccatgacgtgggagtgagctgcccgtccgtgctgacaggcccggggcggcctctctgtcaccatcccagctccagtgacacaggcaggcccaccctccccactcacccccctggaattccctgcctaccccactgcacagggccctgtcccaaggaagggaggaggtcaggagaccccagcccccgccgtccacacaccagctggagccagtgttgcccgcccccagggttatggaaaggagaagaggcaggcccaacggggcagtgccagggagccgccccctcctgggcccaccccactccatctggggccaacccagaagcctaggtgcccacggaggtgccaaaaacactgcagattcggcacccggccaggcagggccacccacaggaccggctggcacagggcggggccagcgtgggagcgggtggggcccgcctctttccagaggctggtgggcagggccaagggccagcagggctcagggtcaaggcctggagaccaggaactcggcagaggcgccaggagcagcagggacacccctccctgaccgatgtccccatcactggtgaccttcaccctccccaccgttgtagggtgaaggtcagcagcctgcccgcctggctgcaccccacccaccccctcgagcctgcttcctacggacctccaggtgccctaagggacatagtccaggggagctcaaaggccctatttgcaagggacayggaggacgtgagcaggggcccaggacgctcccggcttcaccgggccaggtggaggaacaagagccgagcacacagtcaggcttccgggtctttaatggggcgggggctgggggcagttcatccaraggtggctccgaagctgaggtcaaccttggcggctggctctgcagggcaraggggatggtaagcggcccgtcaggctggggggatcttgaraggcggaaggagagccccatgggtggcagccacagctcaaagctgaggaggagcttccctggcccagtccccaragctttcaacacaggcagggcctggggcccaggcagaagcctgcactgccctctggtggcctccttggcaggcgcggcttccccaggtggcsgggaccccaggagctggctgggcccacctggcatccctgcccagcccctggccgggcctcgggacaccgggtacgcaccgcctactccagggccttcaccagggcctcgttggcctcgattcggatctggatctctgcccgcgtggcctcgtcagctgtccccaccagctccgcctgggccttctccaagtttgccttggctgcctgcaaggggttgaggggcggtgaggggccagcarcgaccccagcccggctcctggtcccccagcgctccctcccccgcagcctggacagctccaacctgctgagcctcaggtsccctctgacactcacccccaggtccaacatgtccagcgtcacggcctcttcggycaacaactgcaccgaagagtcggcgttcactgcgatggaaccgctgctcactgggggaatggggcgkggggaaggygtgagaccccaaagggctgcacagcctcagggactcccctggtcaagtccagagccccctgtgaaccaggagctccacaaacatccaagtctgtgtcctgagtgtgcaaacagacccacaggactggccctgggcccaacatggcgggcaactgctagagaagaacaaaacaggggccgcaagaaaggactagaagctggaggaacccccaaaagcactgcctggggacagaggccctccctctgacccaccacccatgggttgagctggggtcagggccaaaggcaagctgagttcaaatctggccaccactggaaaccagtgaggcttagaactgctttttttcctgcacaaatgaccttcctcccctaatctgatcagccctcccaacatggttttttgaggggtttttttggcacagggtctcactcttgttgctcaggctgaagtgcagtggcatgatcttggctcactgcagccttgacttccccggctgaagcggtcctcttgcttcagcctcccgagtagctgggactacaggtgtgcaccactacaaccagctaattttttgtagtatgggatttcactatgttgcccaggctggtctcaaactcctgggctcaagagaccctcccaccccggccttccaaagtgctaggattacaggtgtgagccaccgcacccagcctcgcctggtcagtttctttttattttttgtagagacagggtctcactatgttgccaaggctagtctcaaactcctgggcttaagcgattctcccacttcagtctcccaaagtgctgagattacaggcatgaaccactgggcctgggtggttttacatctcttgcttcgaccatcctacattggttggtccagagccagtcataaaccggctgagagcagggtcccctctggttcgctttcatcaccggccagcccaggctcctcagtggacaaacctgctaaaactgtatttttcttatttgagatggagtttcactcttgttgcccaggctggagtgcagtggcacaatctcctcagcctcctgactagctgggactacaggcacccgccaccacgcctggctaattttttgtatttttagtagagacggggtttcaccgtgttagccaggatggtctcgatctcctgacctcgtgatccccccgcctcggcctcccaaagtgctgggattacaggcgggagccaccgcacccggccagttttctgtatttttagaagagacggggttacatcatgttggccaggctggtctccgaacttctgacctcaggtgatccacctgcctcggcctcccaaagtgctgggattacaggcttgagccaccgtgcccggcctaaaactattttttctcgcagcctcaactgagacggagactgacctgggatgtggagccccagcctggcctggccctgcagccctccaccggactcaccaaagtatttggaggtggtgccgtcctctgcatgsaccacgaccagccccggccgcaggacctgcagcgtgggcacgtgggccgccaggatgccgaaggctccggtcagcgtgggcacgtccacctgccggacgttggcaccgttgaagaacacctgcagacaacagcgtggggaatgatggcggggcaggccggccccgcgcccaccgggcactcggcctgtcctgctaagtaatgggtcagggcaggacctggcgctgatgtgaggcactgagacaacccagcgcagggatccgaagttgcagctttggtcctcaacagttgcgcctcattctactgatccgcgaaatgggaatgcaacgatccggcgacacccaggctttggccagggagatcggggagggcacccaggagacgcttatctcggggaggtgcccgggacgagggcagcgcagggctcgggcagcagaggcagggccgagggtccagggctgagtagcctcggcttccggggcgcgcgggtccgggggcccggaagcgggggtcgcgccctgggggtgrggaccctggactccgggggcggcggccacggagggtcccgacccgcagcgcccgaacctgcgtgggagaggcgaaggtgaaggacatctggttggggccagaggcggcagccggggcggcggcggcctcggcataggcacgggcgtggcggacgaggcggccaagtcccgggcggcggagcagcgcggcgggcagcatggcagcggcgggcggcaggaagcgggtagctggcggacagcggactccggcgcggcgcgggcggcctggagggcgaggaggacgacgcgcagggacgtctgggaggaggagtcccggcgagagcgcaagcgcgaactacgactcccggcagggcgcacgcgacgttgacgacgcagtgccccgtcgtgaggtattctgggggttgcagttttgttccggcccgggctgcggcagaaccagggggtggtcagataagggcggtgaaaccgtcctgggaggtggagtaaaacgaacttcagtgaaattcaagattcggctgcgtggtggctcacgactgtaataccagcgctttaggaggctgaggccagaggatcacttgaggccaggagctggaaaccagcctgggcaatagtgtagatcgcccccacccccgacccgtctgtacaaaaaaaaaaaaaaagatttttggggcgctcattggatgcagggccctggatagacatcaagaaaacatcaagtttccggctctgggccaggtgtggtggctccaacctgtaatcccagcaccttgagaggccaaggcaggagaatcacttgaccccaggagatggagaccagtctgggcaacagagggagaccccgtctctacaaataatcaaaattagccgggcgtggtgatgcacgcctgtggtcccagctactggggaggctgaggcgggagcatcgcttgggcctaaggagattgaggctgcagtgagctatsattgcgccactgcctagcctgggcaacagagtgagaatcccactctggggccgggggttatttagcagacatttgagatcattaataagcaggtcaggccgggcgcggtggctcacgcctgtaattccagcactttatccgatctggagggcgaggcaggcggatcacctgaggtcaggagtttgaaaccagcctggtcaacatggcgaaacctcgtctctactaaatatacaaaaattagccgagcatggtggtgggcgcctgtaatcccagctactcgggaggctgaggcaggagaatagctcgaacccgggsgggggggggggggggaggttgcagtgagccgagatcgcgccactgcactccagcctgggcgactgagcaagactctgtctcaaacaaaaaaataaataaaatttaaaaacaaacaggtcgtagtggtaggtggtggcaaaagccaaaaataaatcacagtaaaagccgagaaagtgtgcaggacgggacagggtggaaggctgcaggtgcagctgttctaggaaacggcgaccgcggcgaggggcacagcgcgggcgacgcgggagggctcgctggggatcccggaccccggcgcgctgctcctcgacgccggcagagggcgctccgcgcccggagatgcgctcgccgaccccccacctcctgcctggccgtcgcccccgtgcgcctctgacgcaggagcgcgtgcgcgggcggctcggggctccgctgccgtcagccagcggcccgcgcagcctcgctcgcggctatgacgtcaccgccccgcccccgcgctcacgcaggtctgcggcacccggccgggcccccagccccgctccttaggctccgggaaaatgcggaatcggggatggcgggggttggggctcgggctccctggaaagggccttgagcctggcgcggtgggctggaccccaggggtgcagggagcaggggaggccctggggctgtggctttacaagggtgcagccagggagatccaatgcctcctgctgtgggcgaatccgacacgatccgtggctccctacatccggaggctgcaccctcgccccctgcccgtgttcaggccagtgcaatggcgggcgccactgtcccctggaacccaagcacctgaagaaggccctgctggtccgactcaggatgaaggcgtgggcctggctcctcccaccgggccarcgctgtgacggtcacttggagcctggtcatcctggccctggctcggggggtgcagaggaggaggcctgttcacttttcgagtcgtgacctgtgcacctcctggctctcaggaccgcatatccagctgccactccaggaaactgggaggcctaatagactcagtctcactcgtggaaccacttccctccagtccccactccagggtcgcccacgggtgagggcgccattactccagccccaaacctggggttcctctggaattccgccctgtcccggcctgtgcacccagcatggccaccgcggctaccatctcttgcctaggaggccccagcctccccccgtttagtacaggtaccttttcttcacacagccagagggagtctttattaaaaatcagaaacctggcggggtgtgggggctcacacctgtagtcccaacaatttaggagactgagacagaaggatctcttgagcccagaagttygagaccagcccggacaacatagcaagattccatctctacaaaaaaaaacaaaacaaaaattagctgggcatgatggcgcgcacctgtagtcccaactaccttccgggctgaggctggaaaattgcttgaatccgggaggtggaggttgcagtgagccgtgatcacaccactgcactccagcctgggcgacagtgcgagactctgtctctccaaaaagcaaaaccgaaatacaaaaaaccctgaagcctgcccatgtcatggtcctgctgggaacaagacgatttctctgcttccttcacaggcattgacttgcaaacttttttgcctcaaaacctttgcccatgcaattcccatttgcctggcaccaggttccctggggctgcccttggagttcacagctatcggagtggtggccccacagcacacaggaacaggcaaggcgcaaggcatagggccttggagggacgtagcagaggaggggacccaggcatgggctggragccaagagcagaagcgccgagactgtgaagctggggaaggagttgaaggaaaccggggtgaatctctggctgcatggacagaggcctgggtacagggcacctgcaagggcagaggcggggaggctgagctgggccagccacgtgccagagcggtgtcagcctttctttgggacgagaaagaggaggcgctgtggggtgttaggcgtgggctcagaggggttsgggtggcgctcgggccaggctggtggcaggtgtgtggcctgagtatctgcaggatgaggttcgatggtctaagagggagaagcgggggcagctttgggctttgggtttctgcgggtgtcgttctgatgtcaccccacgaggagcaggcctctgtgagtgcacgtttgggccccgatgggctctgctcagctttgtgccggggtctgtgatcgctgtcacacaggggagggggcaggagaggcatggcgagtcctccacagtgccagaggggacctgcgtggggaagcaggcggggcgcctgtgtccagagaccctgggctgtgcagcttaaaggggaattgtggccgaggggcsctggctgtgccgccccagaacccccacggaccaagcaacgtgagaggggagtccgtgcccccccggaccccaccccctcctgcgcacgcggcgcacctcgggctgcagagtcgtgaattccaggacacccccagctgcgtccctgggacctcaggaccgggcgaggtgaatcgtgccgatgggccgggggcggggctcggccgccgcggcgggtgcggggggcggctccgcgtgcggagtgggcgcccgggagcgcaggctccgccccccgccccgccggaagggaaggggaggcggtggccggcgcggagccagccagacccagcggcgagcgcagcgggggcggcgggccggggaccgggcagcaccgggcgcgcggagcgggcgcgccgccaacgcggtcacgtgcgcggcccctcctctcgcgccggcctcccccgcgccgcgctctccattcataaattctccgcctgctccgcggccaccgggcgccggagccagccgcgagcgccacgcagccgcccgccgccagcccgccgcccatgggccgctcgtcccggcgctgaggtaggcgcggcgggctcggggctgcggggggcggacgggggacaggccggggatcgcagccggctgtgggctaagcggccggagggagggcgcggaggagtccggcgggcgtggggaccgagatccgggccttgcgccccccacccggctgcctccagagggacccccgctcaggccccgccccagcctcagtttctccctgtgaggtcgggcgaggacgatggcgtctcggctcagccctggcgtcgggtccctgcctcccctggctcgccatccccacccttggccggctcgggggcgcggtgctgccccgtggggaacctccgccctcggctcccgcagccgcctcccccaggagcccccctcttcccctcggcctcctgccatcttccccggcctccggtcaccatcctgcgcctgtccccaccccctccagcctgaactcatttcccgacctacatatgcggccccttcccccagtaccagggcccgggcagcctgtgaccgggagcgctgaggacaccagcccccgccgggaccctgcccggctttgggcctcagtttcccgctgtcgcgtgtgggcggaagtccgggaagggcaggagcggctgccgcctgtgcgctcctctcgctccgggaaaggtctcgcgcgtgcggtgctgacctggggccgccgagcaccccggcgccagccccgaccccctgcgattcccgggcctccccacccggctgcgccgcacagcgtccaggcggctcctttccctggtgccgcgccccgcctcagtttcccccgagcgtaaggcggccggggatgctccgggcgcccgggctgggcacggcggggaggcggccgcggccatcttgcggcttcgcgcccgcccccccgaggccgccgcccccccccaggccgccgcccccgcgccccctccccgccgctccctggcaacccgcccccccagccgcggcctgctccgcagtcgccatgggaaccagcttctccggggctgggaacagatgcgccttctttgtcccttgcactcccaccagcactcagcaccggggagacctccacctcccggagtcgtgacccgggagcacgcgcccagcccctgcaccctccctggcgcgcaggcagcgggaggtctccctctacccaaccatggccgggtgggccctgccagggtgtagctgaacttcttggggtgggggtagccccccacccccgtgatggggcggacagggcgtctggagtccttctcgagccggctgcaccgccttggcgtccccattcctccgagtgcttgccctgcccagcgctgagctccagggcctggcgctaccttgcaggacaggccgcaccggctgtgtgcagttgtgatgggtacaggcgcaccctcagagggccaggcctcctcccccgccatggggatgggagatggaggtccagagagagcccccggggcccgctgggcagagccaagccgggtggaggctgcctccggctctgctacctctccatgagtcactgccccctgtgtgggctcctgctcctgcagggaagacccagcttgtctgcagtggctcctgcaggagaagtaggtctagctggagctgaccaggcttcctccccacagggccctcctccccagttcagaatgcagcccacagccaccatggccacagccgccaccaccaccaccaccaccactgccacagtagccctgacgacgtcgtgggacaatgccactggacgccccacggtgggtgcaggggacaggtgggaggggcaggaggtcgtccaggccagcagcacctgaccccccctgcacacccgcaggcagagccagaccccatcctggacaactacgtgctgctggtggtggtgatgtcgctgttcgtggggggcacgctggtggtgttgtctggcgtcctgctcctctgcaagcgctgctgggacgtccaccagcgcctcaacaggtgcgaggcccccacctcggctgggcaggtgcatggtggttgtgggtgccatcgggtggtggggggtctacctcactggcttctgagtcacagggtgggctatgcctctggagactgggtgatgcgcagggcttggcttggggcaaagagccgagacccactgtggctatctgggccctccgtgccactgggctctcccaacgtctctcccagggccatggaggaagcggagaagaccaccaccacctacctggacaacggcacccacccagcccaaggtgaggtgctggycagcctggctgtgcgctcgcctgtccatccgcccctcggccacccgccgccccctcgggctgcctgaccgtctgtgtctgtctgtctcccccaccagactgggcgcagctcgattccgactcatctctgtttccttaacgcccaggcgtaggtgggcccaggcgcgtgctgagcgagtgagtgtgtgagcggatggacgagtgtccctcgccccgccagcccggccgcccgtgccgcggccccagccctccctgccgtggccgcccggaggagcagccctcccgggaccaggcgcctggcgtggcccgcccggggcccaccctctcctgcctctccacgcagaccccgacttccggggagaggaccccgagtgccaggatgcggagaccgaacgcttcctgtccaccagctccacrggccgccgggtctccttcaatgaggcrgcgctgtttgagcagagccgcaagacgcaggacaagggtcgccggtaagcggggcggcgttgggaggcaccccagggcctgtctgaggtcctggccgcygggacgggggaggagctgggtgcggaggctgcagggaccaaggcagaggctcctggactgggaccgtggggtggggcggccttggccagttgcccccctttcgcctgcccctgcccaggccggcagggtggatggcagagcacggcagctggggcatcgggcatgggaggtgggcgggctctgatggccagatgctgtcgcaggtacacactgacggagggggacttccaccacctgaagaatgcccggctcacgcacctgcacctgccgcccctcaagattgtcaccatccacgagtgtgactcaggcgaggccagctcagccaccacgccccacccggccacctctcccaaggccactctggccatcttccaggtgagcctatgggcagcagccccggttcctcgggggacgggaggcagccccggggactcccggacccccacgccctcacccactctttttctgggtggccctcatctcgggatgggcggggtggggtggagcagggcagggggccaagcccagcatgctcctcacctgcccatgtccctcacccacccatgctctttgacctgtcactgcttcctcccccacctggctctgtcccacagcccccggggaaggccctcaccggccgctctgtgggccccagctccgccctgccaggtgacccctacaactcagccgcgggcgccactgacttcgcagagatcagcccctcggcatctagcgactctggggaaggcacctcggtgagggcccctgcgtgtcccccatggtgtccacagccgrggaggctccttcccctccctgtccccagtccaggaccaaggtcaacctatgacctgccagccaccgcagccctccttggcccgccgggtcattgcacacgggagaaagagggagccggccgcacaccggacacaggcgtgtcctcacacatgcagggggcaccccaggctcccacctcatttgacattccctaggttctggagagggtgcgccacccctgccctccctcacctgcagcccacgccgtgggcgagagaccttctagacacgcacctccttttctctccaaaccccatatccagggaccttccccagagggcagagcaccttagtgtagcccacccagccactgagcgcccctcctcccgcttctgcccctctccgagcaggtacccctctctgtcccagtgatggggggcccttgggactgtctctcagacctasggccacctggggccagcacacgggyccaggaagaagtcttagcctgagcgccatctctgttccctgccagttggatgccggtaccaggagcaccaaggctggagggccyggggctgcagcagggcctggggaggcgggcccgggatccggggmaggtaccgttctgcagttcctcacccgcctgcgccgccatgccagcctggatggggccagcccctatttcaaggtcaagaagtggaagctggagcccagccagcgggcagccagtctggacacgagaggtgagctgtagcacctggtggagagtgggcccctgtgggctgggtgctggctgccaggggctgccctggacatccaggagcaggaggttgtgggctgggtggggagccggtgctctggggctgagtcctgcccagtctgccagcgggcgtgctgcctgaggttctgcaggtggctgggagggctgagtgtgcgggcggcctgagccagacccacccagctccgggaacctgtgcgggaaggctttgcgcgccccgactgctctcgggccattggggcatccaggatgaggtggtaaaggagggtgtcgggggccacctggtcactgtggagcgcagagggtggggcctgtggcctgcatcccctcccagccakgctcggctctcatccctgggaatgtgagtggaaggcgggttcccccggggcccctccctcgcccgctggcagaccatcagctgctgtgtgaccttggccgaggccctctgcctgtctgggctctgacttcctctaacacgaagtaagtgttggactgggccaggggtcagcagacttttcccatcaggccccggatggtggtgttcgtggggttatggtcagagaggctgtgtctccacaactctgctgctgttgaggcgaggaagcagtcagaggcgctgcatgacgaatgcacgtggctgtgtgccagtaaaacttaccgaagctcsggggcagggggtgcttttgccctctgggctgtagcacatagatccctggactgtttgacagtagcccttcaattctgcaggccttgggtcaggcaggatcctggagacagggctgccttatctgggctcgaggcaggagtttgtgtggggagcagaggtgtcccrtctgtagcactggcagcaggcaccagccctgctcagccagctcagcagggccagggcagcccagaggggctggggcccgctctgccttgtggacagggtggcaggtcctgtcgtcaggtgaggccaggataggggacaagtgcagagagaaggtgctgtcagcatgacagaggacacatcatcasacagtgggagaccctgtgttgtggctccagccagcgggggtggggtgagttctcccagcccccacccccaaggtagctaggggccagggaggggaaggcctcctctggctgccccgctccagctgagagaatccagatcttgaaatgaatggggcccaggggtgactagagacatttagagtccaatgtggttgcagcacatcccagaacctgtttgctggggcctgcccactcaagctttgctggggaggctgttgggagaagggggccgaggcaggggtggggcagtcccccagcgctctccagaccagggtggagctggcaggagagggcacctctctccctctcctcgttggcccccaccagcctgtatgtgactctctcatgccttccgtagtttcagccaggctgtgcaggccaccaggtgtccaggacacgcccttatgagtggccacatgttgaccagggctgccacaaggcactatcggtgccagaggcccttccactcactcgcttcctggccctgccctgctcaggctctctggtcccagcacctcttccctccgtgcctcagttttctcacctgtactccagggtgtacacacagccactgtccgcacccacctgacccggggagatgccagccagggtctggcccaagccagggcccactcctgtgtgtgtgagacagagacagggcacacgcgttgtgtgtgtgtgggggccacaggtgttctgtgtgtaggagggtacaggcattctgtggggggggcacaggcatggggggtgcacaggcgttctgtggggggggcacaggcgtgtgtgtgtgagggggccacaggcgttctgtggtggggggcacaggcgttctatgtgtgtgtatgggggccacaggcgttctgtgtgtggggggggcccaggcgttgtatgtgtggggggcacrcgttgtgtgtgtgtggtgggggtccacaggcgttgtgtgtggcgggggggcacaggcattgtgtgtgtgtggcgggggggcataggcattctgtgtgtgtgtggagcgggtggaggcacatgccggctgacgcttacggcacatcccgtgcgcaggttcccccaagcggcaccacttccagcggcagcgggcagccagtgagagcacggagcaggaggagggggatgccccccaggaggacttcatccagtacattgcccgggcgggcgacgccgtggccttcccgcrcccccgcccctttctggccagcccgccccctgctctcggcaggtatttttcagtagatggaggtgctaggggtggacctgtgggcccttgccccccttcgcccccccctaggcggcccagggagcgctctccaggccccgtggacacgcgctcgcctgcctccagcggcaaggcccctcccagaggcggactcactggggccacctctccagcatggaccagaggagggaagcagggagagactgggtaagggtagggcggtgggtggggaggaggggccccccgaggatggcgctggtactgctgcttgctggtggagtccgaggcctgaagggttctgctgtggtcccaggccctctcccacccccgccccgcccatgctcccaaggctgggcagactcctctcagaagctgctgtgaccactccggccagcagcacccctcccccaacccaagggcaacttycctgaagcccagggcccacgtcggtgggatgggaatggggcgtggggctggggcagagcagggttcctggggcagccctggtatggcgggtgaccctcacgtctgtgcactgtcctcctgctggttatccagcatgggtgggcagagagccctagcctggagcaggggctgagctggactcaaccgcgtccagtccatcccctgcggctcccacgtccactgggaggctgggaaaacgtgactcccggagagaagcatgttgacttttcctgggggcttccaagggagggggccccgccgtctgcagtccagcatggaggcaccctgcttaataagcaggcgccacagctcagggtcaatgcaagacgcatcccctgcaaaacacactggctcattttaaagctctcaccttccaaggcccgcccgagtcccaagtcccacccgcgtccaccctccctgatccagaggcgggatggccggccgggtagggggcgcggggctcggcggggctctgacggcgcggcctggcttgcaggctagaggcggccgaggcagcgggaggagcgagccccgattcccccccggagcgcggcgcgggcagcgcggggcctgagcagcagcagccgccactggagccggacgccgagcgggacgcgggccccgagcaggcccagaccagctaccgcgacctgtggagcctgcgcgcctcgcttgagctgcatgcggccgcctcggaccacagcagcagcggcaacgaccgcgactcggtgcgcagcggcgacagctcgggctcaggctccgggggcgcggcgcccgccttcccgccgccctccccgcccgcgccgcggcccaaggacggcgaggcgcgccggctgctgcagatggacagtggctacgccagcatcgagggccgcggcgcaggcgacgacaccgagccacctgccgcgcccgcccggccccgcagcccgcgcgcctggccccgccgcccgcgccgcgactacagcatcgacgagaagacggacgcgctgttccacgagttcctgcgccacgacccgcacttcgacgacacgccggctgccgcgcgacaccgcgcccgcgcgcacccgcacgcccgcaaacagtggcagcgtggccggcagcacagcgaccccggcgcccgcgcggccccggccctggccggaaccccggcaccgcctgccggcgcggcccgacccgcgcgtgcgcccttgcggcgcggcgacagcgtggacggcccgcccgacggtcgcaccctgggcggcgccggcgacgaccccgccatccccgtcatcgaggaggagccgggcggcggggggtgccccggctcgggcctgtgcgtcctaccatccgggtcggtgctggacaagctggcggctggcctcgacgagagactctttccgccgcgcctcgccgagcccgtcgtggcgactcccgcgttggtcgccgccgcccccacgtcccccgaccacagcccggcctaagtcccgcgtcctgggcccatctctctggcagcttctccggcgccgcacggggcctcggcggcgggagagacgtgggggcgcgacgccccgacgcgaatgcgcggggaccgcgggcccttcgcgcacgcgccgggcgacggaggcgcgctcgccgcttcagggcgcaggcgcagagccccggccgccctcgcgccgccgaagtgtgcactgctctttccggtgcttgccgggtgctgggcgtcgtgaggcgcgggccgcggagaccccggctgggcgggaaggaaggggcgtgaacggctctcagcttcgggctcctgaggacaacgatcactcgccctcagtcccggacggggcggccgcttagtcgcagggcccgccacccgagggtcgcgcagcccactgggcccgatggagccgccgcgtgccgggcgcgtgcgcgagctcgcccgggcgggggccgcggggcgctaacggtcgcagacgagttcgccgccctgggccgggaggcggctcaacaccgtgactgccgacctccgagaccgtttacctcactgcggcgtgtgctggcggcagcccgcgccgcctccgagcaataaccgcgccgccaccgctgctgccgccggccctgagggagccggccccggccctcccgcgccccgagtccccactgccctccgcatgtcaacggcgcccgccccgctgccgccccatccacgttgagacgcgaacaaaacccagacggccaggtccaagcttcccaagctttatttattgccaaatttgggcggcctcgcccgcacggcaccctccgagtccccgccgcgtctgcaccatcccgcgatggcgtttctcgtgtttttcttttctggatgatataaatattgaccgcacactcctgcttgctccgggttttctctggggtcccaagagcgcagtggccttgggggagaggtgagggtcctgccctccggccgggccgccaaagcrgggtgacccgagagcgcaaaggcggccgcgacgtgagcccgaccccacagcccccctgccacccagcagctcccaaacacccctcacagccacagctcaaatccaccttttattttttcttaaaaaaaaaaagaaaaaaagaaaatggaaccaaccaaacaaaaaaccaaagcggccgcgcggcttccaggtggcgctgcatgcatggcggggtcaggagcctggtctccacacccgccagctggtctgcggcggggccgccggacggcgctgggcgccctgcggagcacgaggccacgggcggggccagtagtctccacataaagtgcatggaggccgcctccctcctcccacgcccgcccgggaaggctccgcccggggctgcgaagtcaacaagccgcgtgcactgccgggcggccgaggggggagggctgcgcccggtccctgctgtccccctgcccggccctgcagggcgctccggaggtcctggggcgtggtcggcacagaagcatggcggccacctctccgggagggcgggcggaaccggcaggaagactgagggcctggcgcgggcacctggcggggctcctggacacgggctgcagggtggaaggaagacggaagaggtcagcctgggcaccggttctccgcctcccgcgggcccctgggaggatggagaagctgaggtacagtcatggggctaccggactcctggggggcagcaggggaggccagggaaggccacccttgagtcactcccggggtacattgtgtggccttttgcagtggggcctggcgggctctgacgctggtggatgggctgtgggcacccatttgggggacagacatgtaactcaggcggtggcccccaaaacctgggagaggggctgtggcaaggcaggggcttcagcctcgggcccccatccaccccgcatcctcggcaggtgacttaagggtctctgacacctctgggactccgtctcccacccggggctggggctggggctgggagaggaggcaggcacacagggagagacagggcagcgtccggcacgactcagcctcagccatacttggcagctggctcagagcctgcggcaccccggcagagccatggaggccgcggcccctccccaccacccaccacccactggtgctcaaaagcctctgggctgagcccagcataagcctttcctggaagcggcgcgggcatggggagggggcgccaggcccagggcagggtcctcggaatgcacccactctgagaggtggctgtgaggacggcacgcccccccagagccccgccacacgtaggcctccatgaccagcacgctggccagacaccaggccccgagacggcaccctccacggggatcgctacgtggccaagccacccaaaggccacatggcaaccacgcrcagccacgtgacggtcaccatgactgactagcgcgggctatgctcacggctggctgtggcatccaggcgttgtccccacatgccccacccgggccccgccgcgccccacctgcaggcggccagcctcactgctgcttgcaggccgacagccggcggatcttgctgctggcggagcaggcctwgcgggcagggttgggggcccggccctccgccctggatttggtgctcagctgcgccgcctctgtgccgttcatacacacggccttggggaggccccggcgctgtccattgtgactggcctcctcttctgggacctgtcctgggagggagacggcaagtgtggcctgagctgaggggcgcaaccccagagccacagggacctggctggcccccaccacggggacgcacttacagctgctgcccaggccatgcccgcccccgggtcaggcccaggtgtatccagcctgaaatgctgccccccagcagctctgggaggcaccccccggggctgagcctcccgcagatggcctgggcaggagtgtcccctccaccacgtctgttgcacctgccatggccgcaggtgggaccccacccaggtactgactgcaggaacctcacgagtaggaggcaagctgacaaggcaggaccctcccgtgctcccctggggcaccctggcccatggttggttctagaggcccaggagccgccacatgctcatctgtgaggacacaggagggccaggctcgggccaggctcaggccaggcackcgaaatgccagcacagaaccacgcggggagcagagctcagcctgccagggcccccagctgcccccagtccctgctagccaccaaccatcaccagcaccctggtgaaacccacaggcctggggctgcccaccctgcccaggtggacactgttctcacaatggcaggggaaagtgcaggaagctgcccacgtactgtccctgcgaggagccgtggtggttggcgaggactccgcgaacacactggctgccgagccatccccgaggcccctcccgggcgaagtcagtgggaggccgccccgggctgccccagagctcatgtgcccagtgcagagccccagctccgagaatggaccagtggctgactcagcagcttccagaacttgccacacacccaccccatgtgcacaggaagtcactagctttaaaaaagcaccttgggccggtcgcggtggctcacgcttgtaatcccagcactttgggaggccgaggtgggcagatcatgaggttaggagtttgagaccagcctgaccaacatggtgaaacccccgtctctactaaacatacaaaaattagccgggcatgctggcgcgcacttgtaatcccagctactcaggaggctgaggcagaattgcttgaatccgggaggtggaggttgcagtgagccgagatcgcaccacagcactccagcctgggcgacagagcaagactctgtctccaaaaaaaaaaaaagataaaaaagaccttggtgaggaggcaccaattgcacccataggtctgagcttgggcccagcccgtctctggtggggcagaccctgtggacaaggtgccccagctcygcatcagcgggcacagccgccactgggcccttgccccaccccacactcctgtctgcactggtgcccaggatctagcccaagccccttccctgggatctgggtgttggcagcaggacccgcatcctgggtagggacacgtgrggccaaagtggaggcacgcagaggccgatgcagcagccccggcagagcgcagaggatggcctgacccgagggcgccgggctgtcctgccccarygcaagggggctctgcaggtcagggacggggctcacgctgaagcctgaagttgagcctgtccccagcatctgagcagtgggaggggcgtccacctgagtacccagtactgagtactgaggcctcagccatgccgagtggtctggcggcccttccccctgctgggtactcctcctcaccacccacagtgggcttagcagggtcatgaaaaaggtggcccagcccctgctctcctcccaggcacctcaccccagggcagcccaggtctcacacaggcctgagggtccccaggagggaagccagtgccggrtcctggctcagggatcctggcctgcaggggcggccgtgggggtcagcgtgtggtccacgtcccagtagggactctcgcaacctgcctgggctggccctgccctaactgrccctcctgcctgggatttgcctggctgcccgtctcagggcaccagggctctgaaaggcagaagaccctgggcctggggtcaaattgcagccaggccccaaggatgggcaccatgaggggcccccacctcccagcacaccctagtgaccagggtacccagcagcacctcccgttccaacagaccagacgcgatggtcgtggtgctgcaaatccaagagcccaggagctgagaccctgtgatcctgggggccccacacacgctgtaccctcctggggggcccccacatgctgcatcctcctggggggcccccagacactgtaccccccggggacccccatacactgtgctctcgggggcccccacactgtactctcctggggaccagctactgagctgagcctaggggtttgatgaggggcccaggagtgctgagggacctaatggggggctctctgcagggcccccactattctgggaccctcgggcccgggggtggaccctgtgcactgggtcctcacatcccaacctgcctggcgtaccccccttctcaggccggcccctgcccaccacttcccgctgaaacagtaaagcagaaagccccctcaggctccagcccgagcgcagcaagcatccaccctgcagatacactgcaaaactctttatgacacggcccagccctgggccgaacacagccaagccgggagcatggcggggaggggctggctgccaatgtgggccgcccctacgctaaggccctgagctcctcctcaggcactactgcggcgccggccgagaggcttcctctcctgaaaggtctgagccctcgctcttctgcaagccgcgctccgctctaagccctgcctcagacgcctcctcgccacctagggaagaagggcggccggcatcagggccagcgggcaggcctcagggacgacgggagggagggccactggaccctctctcatgccagctgtctgaggggccaccctgcaccctgactctcacctaccctcccccgaccctggggctcccccgcctgctcctgctgggactcaggccaaggccggtgggtggtgcctggctgggcagcacccggagagacgcctgaggaaccctcctggccagacaggcctgggctggtgcccccgctgaccccacacctttcagccatgtcccagcggcccgcagggcggaggcagcctgcaggtgggctggaggctttggggacgtgggattggccaccagagggcagaagctgtccttgttgcagacaggcaggcaccctgctcccgtgggacatcctggccgagtcagcagagccgggcaggggcccccgccagactcaccgggcaccgtgaagtcctgagtgtagatgatgtcatcctcgatgtcgaagaggtcctcgtcctcgtccgcgccgtgcaggtcctccaagtacggcaccacagtcatgctgcgccaccggtccttggtgtctgggctcrgtgggatgggcactggtgcttcagccggakgatgtttcttccggaamyagctgcaaacgcccagaagcagtggcgcctgtcaggctggcaccagggcggtcyagtttyccgacccagctcctctgggcccagggtacctgccacacactcaggagctgggaccaggccgtgcaaggggtggctgtgaccacagaagctcagccatgtcctctaggagcaggcaggctgacctgactccaagcctgacagatgtcccctccaccctgaggcctgtgtcccaggtggcactcagaagccagcacccaccagatggatgctggctgcaaagccagcaaaggccagaagggggtctggggggccctgagcacatcccagcccaggaggctatcggggggcagccccagtccccgccaggcgcccakatgacccgagctgtgcagagacccccaaggcacaatcagcaccagcgcctcaggggtccggacactcccactcccagagccggtctcagtgggtggcctcggggctcggaggggctccagcagacggctcaagggcctccaggggctggtgcagaggagcagagcccacgaagtgagggaggcggcactgtggggcctgctgaccccgtccgctgctctgtcttccctgtcatggagctgggggccctgggctggatcccagccacaccctgctgctgggagccccaggaggaggrgaaaaagagaggctctcgccagtgtttgggaccagctgtgcccttcctggcgcatctccatgcctagggcagggacggacgcatgtcctcactcagaccccagttcggacaaggcgcctgggtctggccggtaacaggacactgcccagagaccccactcgggccccgagaactgcgggcgctgcacggggtctggccccagcccagcctggcacccccaccacgccctgctctagcgcccgctcaaccagctgcccacatggccggcctccctgcagcctcggccccactgcccccaggggcsgctcacctgtrctgccrgatctgccggatggagaacctcttggccggttcgtactcaagcatccctgaggagaagccggcgaggagcctgtcagctgggcacaggcctgagaccccaccaaccgtccccgcctgcccagcctctgttgtcaggccctgggtgatacctggacgctcctaagggggaccccgcgcacaggcggtctccctgacagaggccactccactcctgggacatgccggggacagcctgtgcgcggctggcagggagacagggctgggctggacggccagggcggttccgttctcccaaggccactgggcagatggacggacggccagtgccacctgctgccatgcgtaggaagtgcagcaggacaaccctgacagaccctgcaagccagggagcccccgagggtggggctgggggaggcgcagggcagcactgccctctggggtgggagttcrgagggtgaacagggcccagaagcagggtggagctgagggacctggcaaaccaggccctgcrgggaggtcggcctctccactcagtcctctcaatgcctgctggggtctcggggccaatagccccccacctgacacccccaaccctacatttctgcacaaaagccccgcctccctggggctgcgggcagagggatgaggctcccacctttcagcaggtcagagagcggggggccacagtcgcccgggatggcrtagctccccttcccgatgttctcaaacaacttgtagatgttgtccccttcgaaggggtacagacycgtggtgatgttgtagcttcatttcgaggggagggaagaaaggcgtggtcagtcaaggtggttgacrccctaggagccccagctctaccccagggacagaggcgtcccgtggctgctggaccagaggccctgtggactcaaggacacctctgtcttcaccaccttccactagtggaggctacggggtaggaggggagtgtcctctggacccacccggggaaggggcctggagctgctgtcacccgcccagcttccctgtggggctctgggaggagggtcggccgtgccactctgtgaagatccctgacgggccaggctgcacttcacacgggtgaaccaccatctgccgtatgagttacatttccataaagtaagcaccccctagcggctgtggccagagagggtctgggccggtggccacgccctgcgcccacaggccggcagctgcccaagacgcagaggcccctcggagtgtgcstgtggtgagtgcccgggggggcggggcacttacagggtgaccymagccgascagatgtccaccttgaagccggagaaggtgtccaggccgttggcaatctcgggcggctrgaaagccggggagccctggctggtccggcaggtgtcgtccgccgcgaacgggtgcagtgcctgtggcggtgccgtgcagccctcagggagtgcccgggagggggcgccccagggccccccctagcacgtgcctacctcggccacgcccaggtyggagattttgagggtgccaccggtggtgagcagcrggkwccccggcttgwtgtycttgtgcacaatgccctrgctatgcaggtactccaggccgtcaatcagctgacagragtacctgcgggcagcacacacccgtcctggggccgaggcctccctgcccctcacrggggtcccctttgcagctgcctgggagcctcccaaacaccacaggcccagctgggaagtcacagaagtccaggcacacaggacagaggaaaggctaggtccagcagggagccacacctgcgcctgcagtggccaccctcgtccggccgagccacgtctggcagggccccggatgtccacaggtctcattttcctgtgggccacaggccggctgcaccccaaagtcttgctggaacagcaggcccctccctgcccctgtggtcctgcagcagcaaggggccctgactctgaggccacagacctgcatccaggagatcyggtcagggcaggcggctgccagcgatgggctggaagcaggccactggcctcaggcagcaggcccagcaaagatggaggcgggaggttggcagcagccctgcctgtggatgccacacatgggggaccccaaaactgtttttaaaaacttgggcctttacaaggccgggcgtggtagctcatgcctgtaatcccagcactttgggaggctgaggcaggcggatcacgaggtcaggagtttgagaccatcctggctaacacggtgaaaccccgtctctactaaaaatacaaaaaattagccgggygtggtggcgggcrcctgtaatcccagctactcgggaagctgaggcagaagaatggcgtgaacctcggaggcggagcttgcagtgagccgagatcgcaccattgcactccagcctgggcgacagagtgagactccatctcgaaaaaaaamacaaaaaaacaaaaaaacaaaaaaacttgggccttcatgtcaatgaatatcaggacaagcagtgtggcctcacggaaaggagcctgccctgcctggcccccggcccccgccccaccctggcccctgccccgcgcacgcacccgtgggcctrgcacactgggaaacgcttctccggcacgctgtccagcatttcctgcatgccacacacgcagtactccatcaccatatacgtggggcgctaaggacacacagctcagggggcggccccactcacaggcycagggagcacgggggccagaaaaggggctctggagggaccctctgcacccaccttgcccctcctcgggaccagggcccacccygccctcagccacccctctgaaaaggcccaggggccccagcgtcccaggaggaaggagcctayggggaaggggaggacagggctgactcttggggcagcgttcctgcggggctcacgtcccccaccctgcccatgggcgggggatggtgcctcctggacgcccccccaagcaggctcgggcccatgcaggacggtcccagggcccctgaccgcgtggctcagggaacacagccccagcctcaggaccacttctggctcttgctctgggcacagggccttaggaagcaaagtccccgtagggaggctgtgcccgtaagacccatgggggtgtccacagatgacacgaggacacgcccagccacgaccaaaatggcccacaacggtcagcccgcgtggcctgtctcaggcagaccgtggctacacccctggttagcctgggaggagactctgagaaaaaagggacttgacaccccacgggcccaagacacaggggccagggctcagggcccctttcagcaagctgcgcagccattgccacaatggctgacttccggggaaccagggaaggccacggccctcgtgtgccagtctccttcaaggagacgggaagaggagcaggcctcgaggcaggcggacccagggccccagcccctcccacggaggccccgmggtcccaacaccggaaaggatatattttctgcttctcttcgttktataacacatccaccagctggatgacatttttgtgccgtaacctcctcagtagttgaatttccctgggacagagaggacaggggtgtatcagccracccaacgtcaggatgatggcctggatccctggagtcggcctccccatctccctgtggaagtggcgtacctcctcccttccctagagagaagctgtgagttcacagtgctgtgggaaagggccctgcaggggccacgcgtccaggctcagggcggtagggggtgrgagcacagcgccctctagtctgtcatcggccggcgagggctttggaggacacagttaggacacttttttttttttctgagacagagtcttgctctgtccctaggctggagcacggtggcccgatctcagctcactgcaacctctgcctcccaggttcaagtgatttccctgcctcagcctcccgagtagctgggactacaggcacgtgtcaccacagccggctaatttttttgtattttagtacagacagggtttcaccatgttggccaggatggtctcgatctcctgaccttgtgatccgcccgcctcggcctcccaaaggacactcttaattgagctttgtaactcagtaacagttttgcttcctagaaaccagactactgcaatggtagcacagatggagcccagactgtggcaggagccagggtgagttggagccctggtgatggctccgtcacacagtacagtcccacgcagccaagggctcccaactccgagggtcccactccttggagggtgggccgcaggtgagctggaaggatggcccataggaaggggcaggcgaagaaggagacgccacagaaagagacattgtggggtcctgccacacccacccgcctgtcactgccccctctgcagctgccgcccagttggccacscccacctgcctgtcacaagggtggggcacaacaggccagagagcacagccccctctgcagctgcygccctgtcgcagacacttcatttctcccagcactataggaggccgaggcgggtggatcacctgagctcaggagttcgagaccagcctgagcaacacggcgaaaccctgtctctactaaaaatacaaaaattagccaggtgtggaggtacgtgcctcaagtcctagctactcgggaggctcaggtgggaggatcacttgagcctgtagttacctgtgatcgtgctactgcactccagcctggacaacagaataagaccctgtctcataaaagaaaaaattaaacaaaaacaaaaatgacgaggagcaaggtcctcacacccagtgggtgggcgtggaagcgtctgcagcttctccaaaggtctgttaccctgtgagccagcagctccactcccaggtacacaccctgaggaacagtacacgccacgcagaaacggagcacgagatgctcacagcagcaggacgcacagcagccgagatgtggaaccacccaggggcccttccacagacgaggatcagcacagcccatccacgcactcaacaagactcagccacaaaaaccagtgaggctctgactcgagccacagcctagctgcaccttgaggatgtcacagtgagacactaaaggacacacagtgtgtgatgcacttttttttttttttttgagacagggtttccctgtcgcccaggctggagtgcacctcccaggctcaagcgatcctcccatctcagccccgcaagtagctgggactacagacgtgtgctaccatgcccagctaatttttgtattttagtagagacagtttcaccgtgctgcccaggctggtctcgtttgaactactaggctcaagtcatctgcccacctcggcctcggaaaacgctgggatgacaggatcccatttcttgtttttttttttttggagacggagtctcactctgtcgccaggccagagtgcaatggcatgatctcagctcactgcaacctctgcctcccgggttcaagcgatttctcctgactcagcccctgagtcgctgggactacaggtgcccgcaaccacgcccagctaatttttgtatttttagtagagatggggtttcaccatgttggccaggatggtctggatctcttgctctcgtgagtcaccgcgcccggccgacaggatcccatttctatgcaatatccaggacaagccaatccagagccaggaagtggattcagagtggccaggagctggtggaggggatggagagtgacacaatgggaatggggcttgcttttggggtgaccgaacgttctggaattagaagtagtggttgcacagccgtgtgaatgtacttaatgccactgaattgtacactgtgaacgaatgagttgtacagtatgtaaattccatctccatagttttttttttcttttttaattcttaacaggaagcccaagcatggagcataaaaaacagctggggggccaggcgcggtgactcacgcctgtaatcccgacactatgggaggccgaggtrgatcacctgaggtcaggagttcgaaaccagcctggccaacatggtgaaaccttgtctctactaaaaatacaaaaattagccgggcgtggtgatgggcgcctgtaatcccagctactcaggaggctgaggcaggagaatcgcttgaacctgggaggcggaggttgcagagagtcgagatctcaccactgcactccagcctgggtgacagagcaagactccatctcaaaaaaaaaacttggggtgtcaggggtatcccacgacccagccttccccacccccagctcagggctgcctcttgcaggaagccttggctcacctttccctcccagtgcaccagtcccagggctcattgctcactgccctcagggcaacctcagaaggccaaggcctgagctctgccagggctgcaggctgtgctggggctgggcctggacaaggggccgccagtctggggaggggctaggagagcaggatgaagggaaagcaaggtgtgatggggacggggcacagagggacacagtcccccagaagcggagccagtgagcaactggttccggcccctggctgtgcccggtgccctgtcgggctgcccagccctgaaagcgtcccccacttccactggtcaccgcaggcctggtctgctcgctgagaagccctgtgtttccgttctctctgggctatgtggtggtggcaccaattcccagcagggcccggcaaggttatttatagaactggccagggcctgtgtccacagcctggcaggcacccagggcattgagggggacgctgagggtgaggctgggctcggcaaaggccccggggcccagcgccttcctgcctgccaggctgctcaggagagctcggggtgggcccgagaggcccggctcagccccagatccccttgttccccagggctctgtgtgcccctaacctcccccgctgatgaaggtcacaggccattcctgggaggcaagacttgccttctattcagaggagatgcggtggccggggggcggggaaggtgctgttttcagacagcagaggccagatgctcggacgcacaggccccaagagcctgatgctccaccaggaggcgaaagcaccccctccctcagcaggagccggctaccggcagggaaggtggcccaggacactattccagcctcctcagtggagctgagggagccacgggccttcaggtccagcaccgctctggcccacctcctgctgcctgtgcagggaccaccccacacccacccaggctccagcacagtcctaaccctgaggaggggcagtgaggccaggagctcaacctgcatgyagcctcagagcctcgtgggggccgctcgggaggctgcacggccctaaaagcaaatgagggtggaggactccctcctggaaacctccctgcgccggccaccacctgccgacaccatgtctcctccatgagccatcattctacagatggggaaacgggcacaggaggactcgccctcaccgaaggcgccctgccctgcctccacctcaacggggacacttcacagcagcaggacacacagcagctgaaacgtggaagagcccaggcactcctgagcaggtcagcatagaccaagggacactgggttgtctgtttaattaaaagggaccaaggcattctgcgcaggcacgtgcgtcccccgatttatgccaggggaggagtgggggtggagccacccccgcctggtggcagtcacctccgggatgatgggtgcacatcagcttctctagatcgccaggcttcctctgacgtctccagccagaaaaagagcagaagaggaggcccagcgaaacctaagagcttggcgaggaacaggaagagcctccaggagggggaagcccggctcttggggcatcgccagccgctccgaggtgccacgttaggggcctactgggcttgcccaggcagcatggactgtttagctgacttgttgattagcaggacaggaaataggaaggagagtcataaacgccactcaagctcacagagaggtggggctaggagcctccgtctgcctagaaacagatcayacagggaagagatgggcctggccctcgccccggcctcccacggctcagagcaggactgggaggcacatggagacccaggaacacccagctccagacccgcgtgccctggtccctgaatccctcctgatgtggctgaaacaaggccctcaaggattctagagggacgccggctgagcacacgtgcaccaaagcagccacaattcacaggcagaggcgggagcagcccaagtgtccagccacagatgagcagtcaaacgcagcgtggccctccacacactggaaagtgacgcagccgtgaacagcagagaggttcggacccaggccacggcgcggatgccccttgaggacagcacactccgtgagacaagccggacgcaaaaggccacgcggtgtgtgacaccactcgtgtgaaatgttcaggacaggccaatccagaggcaggaagggaatgcgtgggtgccgggactggggagggaatggggagtgatggctgacagagacggggtttccttctggggtaacaagaatgttctggaagctgatagaggtgatagttgtgcaactctgtcaatgtactatatgccactgaattacacactttaaaaaggtgaactttgccgggtgcggtggctcacacctgtaaccccagcactttgggaggccgaggcaggcagatcacgaggtcaggagatcgagaccatcctggctaacacagtgaaaccccatctctactaaaaatacaaaaaaattagccgggcatggtggcaggcgcctgtagtcccagctaytcgggaggctgaggcaggagaatggtgtgaacccgggaggcagagcttgcagtgagccaagatcacgccactgcactccagcctgggtgacagagcgagactccatctcaaaaaaaaaaaaaaaaaaaaaaaaggtgaactttaggcccagtactatggcttacacctgtaatcccagcactttgggaggccagagaggattacttaaggtcaggggttcaagaccagcctgggcaacacagcaagcccttgtctctataaaataaaaaataaaaaggtgggccgggcacagtgactcaagcctgtaatcccaggactttgggaggccgaggcgggcggatcacaaggtcaggagatcgagaccatactggctaacacggtgaaaccccgtctctactaaaaatacaaaaacaaaattagccaggcttggtggcaggmacctgtagttccagcttacttgggaggctgaagcggagcttgcagtgagccaagatcgtgccacagcactccagcctgggggacagagcgagactccgtctcaaaaataaataaataagtaaataaaggtgaacgtggcgaagcagtggctcatacctgtaatcccagcactctgggaggcccaggcaggcggatagcttgagtctaggagtttgagaccagcctggacaacatggcgaaaccccatctctacaaaaaactagtcgggtgtggtggtgcacatctgcagtcccagctaccttgggggcaggagggtcacctgagcccagagctatgattgcgccactgcactccagcctcggcgatacagtgagaccctgtctccaaaaaaaaaaaaaaaaaaaaaaaaaaaggtgttaagaaaattgagtccagtttgagcaatacggtggcgtttgtgggatatacgggccgtccagccgcctcactgattccccgacagctacagcagcgccccagatcctgagagaggaaccaacattccaggcctgccccagctggctgggcaccggaagcccactgtgtgcacagcccagaacccccagtggacccattacccccgctgttctgcggctgcccagcccctgagctccctctgggtctcagagctctccctcccgctgcccagagaggggcacaaacagaggcctcgaggacacccaggcctcacatggctggcgcaggggcctcagcagatgctggaaccccataaaggccgcctgggatgtaaagacctacaaagtccaggactgactcccagctcgcgaaaatcctctttaccataggtccaagcatctgccaatcatcgccgcaaccaggcacactgagtgccgcccacctcccacctcctggctggacaccgcgggggcggtgcggatgggagagccacagcccggatctgggcccgtttcctacggcagcagtgattttcacatttccaaacaggtagaaagaaaagatacgaaagcacagtgttttgcaacaggtggaagtgacaggaaagggcagggccgtgggacaccgccaggctgtgcgctcacggcagccctgggtgcctctgcggaggctccacaaggcgggcasactccctgccttcgagcccactctcactggggtggaaagggggagggaggcatggcggccttctgcctgcacccccccccccagaaccccactgtgggctccgcagcagcagctagccgtgctgtcccccgagaagcacggggagtcgggctgggcacaggcgaccctttccagcccttccctgctccaccctaggaacccactgcctaccagaaacagcctatggcactgattttattttaattaattgtttttttgagacacaatttcgctcttctctcctaggcttgcccagcctggaatgcaatgatgcgatctcggctcaccgcaacctccgcctcccaggttcaagcgattctccttgcttcagcttccccagtagctggactacaggcgcgcgccaccacgcctggctaatttttgtatttgtagtagagacggagtttcgccatattggccaggctggtcttgaactcctgacctcagatgaagtagctgggattattggcatgtgccaccacacctggctagtttttctatttttagtagagagagggtttcaccatgttggccacgctggtctcaaacttctgaccttgtgatcaaaccgcctcggcctcccaaagtgctgggattacaggcgtgagccaccacgcccggccccagcccttttttttttcgagacggagtttcactcttgttacccaggctggagtgcaatggcatggtcttggctcaccgcaacctctgcttcccgggttcaagtgattctcctgcctcagcctccagagtagctgggattacaggcgtgcgccaccacactcagctaattttgtatttttagtagagacagggtttcaccatgttggtcaggctaactcccaacctcgggtgatccacccgccttggcctcccaaagtgctgggattacaggcatgaccgaacatgcccagccctctttttaactcattgatgctttttggaactttcctatttctaataagattatactttttgccggtgagagcgggacaaggcatggactccagggctgcctttctgggaaggaagggaagagacgggactcacgccggctccatctgccccaacccaccccccttggtgatcgcccacgctttccacaccaactggaggaccggacgcctgaggcttgtctggaaggttccagacactcgctgcgagacacaatctgagcggagtttattaaacttcccacacacaaaggaggctttttccctgcagcgctggcagcaaggctggccaaggccttgggcctcagggctgggcagtggacaccccttctccttgacagcactctgcacatggcagcctccagtcagaacacaccagctcccagaataggaggaccccctggcagcacccagggggctggaggaaatgcagtggctcctgaatcacagctgtaagcggggcagctcctgatggcagacagtgaccaggaagggacagggctcacccctcatcccagggggccccgcaagggcaaagccgttacacactcagggccaggatgaaattggacgctgaacactagtgagggtgcatcactcacttcaaggcagtggggtcaagctgtgggtagctgcgacgcacagtccagtccaggtcctgccaacccctctgcctccctgcctccgtgttccctcccgttctcccaggcactgggccagactaggttcctgcaaccttcttgcctgtctccaccaagaccctcaggctctgccctaccgttcaggtgctcacctgagctcccaggacctcctccactgactgttcaggaaagcasggggctcactctcacagtcaggcttccaccctccagcgtctgtcttcccattgaccctgcatatacatttgtcaaaactcaagccagatttatttatttatttatttatttatttatttatttatttatttttgagacagagtctcgctgtgtcgcccaggctggagcgcaatggtgcgatctcgggtcaccgcaagctccgcctcccaggctccagcaatgttctgcctcagcctcccgagtagctgggattacaggcacacgccaccacactcggctaacttttgtatttttagtagagatggggtttcaccatgttggccaggctggtctcgaactcctgacctcaggcgatccacccacctcagcctcccaaagtgctgggattacaggcgtgagccaccgcgcccggcccctaagcgtgggtttctcactgctgggagagagactgtcactggcccctttagagggcacctgctacccccagcacaggctctgcctagcccctgaccaacccatctcacagagaccaggcacaggctctgcctagcccctgaccaacccatctcacagagaccaggcacaggcaactgctccactgactcaaggcactggccacaccttctacccgggtccagactgggcactgagacatcagaaaggcctcgtggaaacacacccttcccagccgctcccatttaaccctgactgctccagctccagagtacaaacttcagagcctgtgcccctggtttccgcatgtcacagcctgcatgctgattaagaagcgtgctggccgggcgcggtggctcacgcctttaatcccagcactttgggaggctgaggcaggtggatcacgaggtcagaagttcaagaccaacctggccaagatggtgaaaccccgtctctactaaaaaaaaaaaaaaaaaaattagctgggcacggtggcaggcacctgtaatcccagctactcgggaggctgaggcacgagaatcacttgaacccagggggcggagattgcagtgagccaagaccactccactgcactccagcctgagcaacaagagtgaaactccgtctcaaaaaaaaaaaaaaaaaaaaaaaaaaaggccgcacgcgttgactcacgcctgtagtaccagcactttgggaggccgaggcgggcggatcacgaggtcaggagattgagaccatcctggctaacacggtgaaaccccgtctctactgaaaaatacaaaaaattggccgggcgtggtggcgggtgcctgtagtcccagctactcgggaggctgaggcaggagaatggcatgaacccaggaggcggagcttgcagtgagcccagttcgcgccactgcactccagcctggggaacagagcgagactccgtctcaaaaaaaaaaaaaaaaaaaatgtacgtgagccccagrgcccctgagcaggagagaggtgagagcagacacggcaggagccccagggcccctgagcaggaggaaggtgagagcagacaccgcagcagcccctccccggacctccttccaaggtcatggtgccctgcgcagggtgtccttgccagtccctcgaggcctagcccagcagataaggtcctttcttggaaacaggaggcaaagttttgaaagttaagarggctgggaaaggagcasggcctgggcagggcccgccaggcggcggcaggtgcagcgtgtctggctgcgataaggcagggacacccccggccacccccaccagctgggagaggctcaggccggccagtgctgccctaggtaggagcttctccgcgcacagatgcagaggcgtccgggatgcccagcggcagccccgtgcctgaagaagtcagttggaaaagtaaggtcttccggatgcaattcgggagggaggcacagtccccctcgggcagggcttccagccccgggggccagggatgcttccagcgtcacatccctggcaaatgaggaaaggctacgtttccctcctgctgactgataagccggtgcaaacagttatttttggcagcccagggttcccctctgacaggataaacaaatcacatttcgcctggccccggtaacggccacacactgcgcagaaaacgtgttggcggccgcacacaaactctcggggcccaaacaaacacaggctgattccactgggcgcctctgctccttggacagctgggggagccaaggggctagtcttaggggattgggggccgctcccttctcaggagggtttcgctaccagggcattttaactggagtccaagagcccatgcaaacgcacgccccgctgcgacaactggccttgcctgagtgaaagtccgtaacgcaggcccccaaccacgctctccctggcacggaggacacaggcgccagacgggtccagctcagggtgttaagaggaagtaagggagggagggargagagaaggaaggaagacagaaccatcagcaccgtgactggmccggcccggccccgaccccagcaagccatacttacttcttcacgttggcctccccgttggggatccttcgcaactwcttcttcttgaggatcttgacggccctcctgcacagcgtctmcgagtccvgcacctccttcaccttgccbtaagagccttmccccagcaggtcccccatcaggtacttgccgatgagcttggcccgcttgcggcgcggctggtagatgacctcggtggagtcgatgcggtggatgaacgtgtccatacccaccgacatcagctcgccctccgtgaacatgcccagctgctgcgggtccaccacctccatgctggacccagggtcctggagtcccgccgccagccctgagtccgcgggtgagcggtccttccttgtgttccgacttcccttctccaaaattttacaaagaaaaaagaaaaaaaaaaggcaacaaaaaccccaaaaggaagggaaaaacccttcttccaacagaaacgattgttctacacgtcagtcccggctgcgagtccaagcccggtgcagggtctgcggaccggcgggcaccgggggtccgggacggcggctcagacgcgagttccagtgggacccgggcctcagaactgggagacggcccggtcagggtcaacttcgtcctcggggaccctggggaggccggccggggcttttcagtgctaggtcatcctccggggacctcaggcccacggacaagtatgaacacggccgagcgcagtcttctccgggccgcccatcccacaggccgggtccgcgacgtcgctaccccccgggacccccacacctggagagcccaacttcgctgggggcgtctccggcgacgccccggtcccaccgcctgtcccaggagcaaacgctccgccgcggacgaccgagcggacctcccggggggcgccgactcccgccggcccgggcgagcgttcggggggctgggggcgtccgggaggcctcccgccgcggccaacagctccgctcagggctggtcgctgcccggcgcccgcgagggcccgcactgggcgccccccgagccggcccgcgacccccaaggtggtcgccggggcccggcaggcgcccccctccccgcaaacgtctgcccgagcgcgcgccccgccccgagtgccctcagcgtccggtccgcggggcggcgcggcggcgggggctccacggggctcccggcggccgaggcggcgcaggccgcaggctccgggccggggggttcccgaaggtgccgggccccgggcggcgcgtccccctcgccgcggccgccgcgcgtgtggaggaggcggagcggcgaggggggcccagcccatccaaggccgcggcagcaagtgccgccacccgcgctcccttcgccgccccgcgcctcactcgcgggcgccccgggccgcctcccccttccgcgcccgacacgccgccgccatcttgtttacctccctccccctccctgcgccgccgcggacaccgcacgcccggccgcagggcacgcctcctcgcgaggacgacgtgcccacccgttggttgaacctgccatccccggccctctgcccgccccgccgccgctgacgattggagcgtttggacccggccgggcgcccgagcggcgattggtcggcgcttggccccgcccgaggggtggatacagcgcgctcattggtcctcggagacgcccgtcacgggcagggggcgggaagcaggcatggggagacgaggccacggctgtgacctcggtggggctcgggaagggggtcgtaggtcacgggtgccaacggcctccctgaacggccgcagggtgggctgagcccggtgggcgggaacctgggcttgcggacctggaaggagcggggccacccctaccagagcccctcccccgcatccccctttggggcgaggtcaagggtcaaaaagtaacacaaagtggccaattccagtcaaaaatccttcttttgagccactcttggaccaggggaaagagaaacgctcagggcggcctctgccctatcggaactcatgggggaagcctcaggacagcgctgggacaagcccagcgggggcttctcgtgaaaaacaagagttgccaaaatatggcttgataaggttgaaaatattgaaccctcctgtgctagccccgtgccttccaccttttcctgcactagcgccaggttgtttagctggaacaaactatcttggtacaatctccgcctcctggtttcaagcgattctcctgcctcagcctccccagtagctgagattacaggcgtgcgccaccacgcccggctaatttttgtatttttagtagaaattacaggtgcatgtctgtaatcccagctactcagaaggctgagggaggagaatcgcttgaacccgggaggaggaggttgcggtgagccgagatcgtgccactgcactccagcttgggcaataagagcgaaactctgtctcaaaaaaaaaaaaaagatctcttccagaaaactgaagttgaaggaacactccccaactcaaacttattttggtatctcttttctgtactgattgctggctcacaccccaacttcttggaatctggagataatgctggataattggcatcggtaggtcccacgccccttcagagaactgcaggacacatggaagtgactcaggaaatacttggtgaccattacagacagaatccttgaagatggattctccgttcaaagaccacctcctccaagaacccctcctagtcattctctcaagtgcctggacggagatgtgctgtgagtgtgaactacacacggaatttctttgtttttttgatacgcataattttattacaaaatgttaaaaaatgcagcatcttaaaaaacgcaagatgtactgttgatactaattcctacaagtgtgctgtgctgccatacacaataaattttttaaaaaccattaaatatttagggacattaggcagggtgcggtggctcacacctgtaatcccagtattttgggaggccgaagcaggcggatcacgaggtcaggagtttgaaagcagcctggccaacatggtgaaaccccatctctactaaaaatacaaaaattagctgagcgtggtggcatgtgcctgtaatcccagctactcaggaggctgaggcaggagaactgcttgaaccaggacccgggaggcggaggttgcggtgagccgagatcacgccattgcactccagcctaggcaacaagagcgaaactctgtctcaaaaaaaagaaaagaaaagaaaagtattttctgtacagagaatcttatgagctatacgaaaatttgtacagttttatactgaagctaatactgagctgtactagaattcacattcttagcaaaacaagcccactgcacaggcatcattaaaggatagccatttattcttcatcttcaccctcttcctcctcatcttcatcttctttctcctcctcctcctcctcatcttctggtttgttcttctttgagcccttctttcctgcttcacttttgcccttagcacgatatgcagcaatacccttttcatatctctcctgtagcttaactgctttctgctcatatggttgtttatctttggctgactgcccagaccacatttcacccagtttctttgcagtttccacgacaaataggcctgggtgtccacttttgatctttgggcgatgttcagagcaaaacaggaagaaggcagatggtggccttctaggagcattgcgatcctttttctttcctttcttaccctttcttacatttcggaggaatgtaatttttaatctccctgtcacagcgagctttgtcactttttgccttctcttcaaacttcacttctcctttgcagacgtggtcttccatctctccaaacacttcttggagaattccacgaaattgacagaagagtccgggtgtttcttcttgtgctcttcctggcaggtctgcgcgaagagggcatacgaggacattttgctcctcggtttgttggggtgtcctttacccatggggacagaacagcatctacctggtgcgagcttttcctcagagtcccacagagcacccggacccaacagagacacttccctccacactgactctctttttttttttttgagacggagtctcgctctgttgcccgggctggagtgcaatggcatgatcttggttcactgcaacctctgcttcccagattcaagcaattctcctgtctcagcctctggagtagctgggactacaggcatacaccaccatggctggataatttttggattttcaatagagacagggtttcaccatattgttcaggctggtcccgaactcctaacctcaggtgatccacctgcctcggcctcccaaagttctgggattacaggcatgaggcaccatgcctgccctacacactgaatttccaaagttagaaaaattaaaaatgggcctgccaggcacggtagttcacacctgtaatcccagcactttgggaggccgaggcggatggatcacccgaggtcaggagtttgagaccagtctggccaacgtggtaaaaccctgtctctactaaaaatacaaaaattagccaggcgtggtggcgggcgcccgtaatctcagctacttgggaggctgaggcaggaggatcgcttgaacccaggaggcagaggttgcagggagctgagatcttgccattgcactccaccttgggcaacaatgagactccgtctcgaaagaaaaaaaaatgggcctggtatggcggcttttgcctgtaatcccagcactttggggggccaaggcaggtgatcacctgaggtcaagagttcaagaccagcctgggcaacatggtaaaacccccgtctctactaaaaatacaaaaactagccaggtgtcgtggcgcccgcctgtaatcccagctactcaggaggctgaggtaagagaatcgcttgaacctgggaggcagaggttgcagtgagccaagattgtgccactgcactgcagcctgggcaacacagtgagactcggtctcaaaaaaaaaaaaaaagggcacaaataaaatatctcactggccagacacagtggctcacgcctgtaatcccagcactttaggaggccaaggtgggctgatcacgaggtcaggagttcgagaccatcctggccaacgtggtgaaacctggtctctactaaaaatacaaaaattagctgggcgtggtggcgggcacctgtaatcccagctactcgggaggctgagacaggagaaaggcgtgaacccaggaggcggagcttgcagtgaaccaagatcgcgccaccgcactccagcctgggagacagagcgagactccgtctcaaaaaaataaataaataaaaataaaataaaatatctcattaataattttaataatgattgcatgttgaaatgatgtaattttggatatgttaggctaaagtaaatgtattattaaaattaaccacttcagggttatgcacagtggctcacacctgtaatcccagaactttgggaggatctcttgagcctaggagtttgaggccagcctgggcaacatagcaagaacttgtctcaaaaaaaaataaatacataaataacaggccaggtgcagtggctcacgcctgtaatcccagcactttgggaggccgaggcgggcggatcatgaggtcaggagatcaagaccatcctggccaacatggcgaaaccccgtctctactaaaaatacaaaaattagttgggcgtggtggcgcacccttctaatcccaggtactcgggaggctgaggcaggagaatcacttgaacccgggagacagaggttgcagtgagcggagatcacgccactgcactccaacctggcgacagagcaagactccgtctcaaaaaaataaaaatagataaaatatataaataacaaaaaaagatggaccataacaagtattggtgaggatgtggagaaaccagaattctcataagcggggcaacccctttggaaaagagtcaaaagtttaaacatagagttgctatatgtactggcaattccaccccaagatatatgcccgagagaactagaaacctgttcacacaaacacgcatgaattttcaaaacagcgttattcacaagagtcaaaaagtgaaaatagggccaggcatggcagctcatgcctgtaatcccatcactttgggaggccgaggtgggcggatcccttgaggccaagagttccagaccagcctgggcaacatggtgaaagcctgtctctacttaaaaaatacaaaaattagccaggcgtagtggtgcatgcctgtagtcccagctacttggaaggctgaggcaggagaattgcttgaacctgggaagaggaggttgtggtgagctgagatcatgcctctgcactccagcctgggcgacagagtgagactccatctcaaaaacaaacaaacaaaaaaaactgaaaatagaccaggagcagtggcccacgcttgtagtcccagctactcgggaggctgaggcagtaggatcaacagaggctgggagtttgaggctgcagtgagctgggattatgtcactacactccagtgtgggcaatagaacaagaccctgtctctactgaaaagaagaaaacaaggccgggcgcagtggctcacccctataatcccagcactttgggaggccgaggcgggaggattgcttgagttcaggagtccaagaccagcctgggcaacatggtgaaaaccaatctctacaaaaagtacaaaaactaggggccaggcgcggtagctcgcagcctgtaatcccagcactttgggaggccgaggcgggcggatcacctgaagtcaggaattggagaccagcgtggccaacatggtgaaacccagtatctactaaaaatacaaaattatccgggcgtggtggctggcgcctgtaatcccagctactcgggaggctgaagcaggagaattgcctgaacctaggaggcggaggttgcagtgagccgagatcgcgccattgccctccagcctgggcaacagagtgagactcttgtctcaaaaacaaaacaaaacaaaacaaaaaacaaaaactcaccagtcatggtggcgggcgcctgtggtcccagctacttgggaggctgaggtgggaggatcacctgagcccgggaggtggaggttgcagtgagccatgatcacgccactgcattcctgcctggcaacagagccagatcctgtctcaaaaaaaaaatttttttttttaaaaaagaactattctaacatcctccctcaca

SEQ ID NO: 96627 - DNA, 21804 bp, Homo sapiens
ttttctaacttcattcctgtcactccttgccaagcacttcacatacttttgccatacatttcatgcttttttcaaactccatgcctttctgcttctgttacacctactctagccccactttctggtgaaattctactcatccttcaaggactacctcgaaacattatcctctcagtgacgctttccctcaaagtaagatagccaatcccttctttacagctccagtagcgctttgtaccaaattcattacattatttatttataatagtgtctcccccactagaatgccggcactacaagagaatctatcttacttaatatcctattcacttctgtatcatcaatgcctagcacaatgcctggtacaaagctggtactcaataaacactgcacaaataaatggtcccaatcctctattttaatcctaaccatccttcaaggcccctttgcttctacacaagcccttcctagaccattccagtccagagtcatcactacctcctttgaactgacaacttgcgggctcagcaacttacctggcaattattaactatacctgtccttatgtcatatattgttaatttttcatgaatatttattcatgaaccaagtctgtattttatattttgtacttttgttgttctcctacagttttgtgatacagcagacatttaataaatatttgctatttcacgactgtgatgttccaaaataaattttacataccatacacagacgatgcccaattagcttcagcttatttcatctctgtgtataaaaaacattttttatggtgaaatgaggtcatatgattggcacgctttgtttaataaatcaaggtccttttaccaaacttttccttacaactcttgccaattcattcaatagctctggaacctgaagcttttgcctcactactaagctgtatttccaacttggcattttccttttaaggtaacttgttaccatagtgttccctctccctctccctctcaccccatcccctcacactctttttctctctctctttctgttcctttgctttcactaggacacatggtactgaagatttattttatttatttatttttatttatttgagacggaatatcgctctgtcacccaggcagggtgcagtggcacaatctcggctcactgcagcctccacttctcaggttcaagtgattctcctgcctcagcctcccaagtagttaggattacaggtgcgtgccaccacaccctgctaatttttgtttgtttgtttttattgttttttttttttttttttttttttttttttgacagtcttgctctgtcgcccaggctggagtgcagtggcatgaactcggctcactgcaatctccgcctcgcaggttcaagcgattctcctgcctcagcctcccgagtagctgggattacaggcgtgtaccaccacaccaggctaatttttgtatttttagtagagacggggtttcaccatgttggtcaggctggtctcgaactcctgatctcgtgatccacctgcctcagcctcccaaagtgctgggattacaggcgtgagccactgtgcccagccaaatttttgtatttttagtagagatggggtttcaccatgttggccaggctagtctcaaactcctgacctcaagtgatccccccgcctcggcctcccaaagtgctgggattacaggcatgaaccactgctgcgcctggcctgaagatttattttagtatggttaacagtaatgagagtggaaagtaaaagaaaaataatttctagttctttttacacagataagtccacaaaatagactttgtaaacaaaaattaaaattcaagctgctttaaaatataatgaaatagaactagcaagaaacactgaagtagctatgtcacaccaaggctatatgggttatctgaaaataagtaatctggctaggcacggtggctcatgcctataatcccagcattttgggaggccagggtgggtggatcacctgaggtcaggagatcgagaccagcctgaccaacatggagaaatgtcgtctctactaaaaatacaaaattagccgggcgtggtggcacatgcctgtaatcccagctacttgggaggttgaggcaggagaatcgtttgaacccgggaggtggaggttgcagtgagccgagattgcgccattgcactccagtctaggcaagaagagcgaaactccatctcaaaaataaataaataaataaataaataaataaacaaaaagtaatcctcctaaaggaaagctactagaaaacactttagccaaatgacttcagatttataagcagggcaactggcaacagaatccaaatgaattctaacgttgtcaatcagaaatactttagcttaaaaaaaattaaaacacataaattcagcattttggttcaatctgaaagtctgataatttgaggttactataacccatgaaataaaataatgttaagaaaatgactcacattgtaggtgctaaaatgaacatatgcccaatactgacaatgctctctaagtaaaaaggtgaattttttattaatactaacagtcttgataatctcaagagacaatccagctttacaaatctagaacctggtatacaaagcaaaacgtacattttttaagtatctggggaaaaaaggaggtatctgggcaattcaggtcaagtaaactttgtggggaggagggaaagcaatatatataaattcaggattttgtgcttcaattacctataccagctttgctgatgtggtaagaaagcacacatgcagatacggttagatatttttcctaatttttttccactttcttatttcctacatagctaaagaatgcttaatagaatataattaaaagggtatataccatcttgcttaatcaggtgggttagatcaactttcaaacaggggaagaatttgacttgagccagcagctggagtaggctcagaactgaatttaatcaaccaaaaacctaatgacccataatcaatgacatggaattaccactaataattttagtgacaagctcatcacatttactcatgaatcacctacagtattccaagctcccaaacttcacaaaaagtgaatttcaggtatctgatcttaaacacagaaagacctatacacccttaaaaacctacatgaccataaaatgtaggccttatgactacaagcatggagtataaaattttgacactaagaagttccagggaggcaggccgggcgcggtggctcacgcctgtaatcccaacactttgggaggccacggtgggaggatcatgaggtcaggagtttgagaccagcctggccaacatggtgaaaccccgtctctgctaaaaaatacaaaaaattaaccgggcatggtggcgcgcacctataatcccagctactcgggaggctgaggcaggagaatcgcttgaacccaggaggcagaggttgcagtgagtagagatcgcgccactgcactccacttgggcaacaagagtgaaactccgtctcaaaaaaaaaaaaaaaattccagggagaaaaagactacttgcattcaatgccaacagacagtctccataatatcactactatgaaaatgtatcgatacaaaactaccaccacattgtggacttaaaagaaatttggattttaacaagttaaacttaagctgaactcacatcatttatcatcaggcaaccagtattctctaatatcaggtatcacattatagtataattactgaataaaagacaaggaagaatcctgaagatgaaatttaaaagtgaatttctggatctgtaagaaaggtgaatttcccagtaaatgcaggagactccatgagcagtgcaaattagtctgttacacaccattttaaaacatataatccatacaggaattccaactggttaacaaattccataaagaaatgaaagttgtctctatgaagagggcacaatgaagcaccagaaatatgataaccataagctttatttaactataattttctatattaacaagctcctttcctatttatctaaatcaaatggcttttattccacaccaataacctgcaaatatgactgccttggactcacaactcacccctaaggaatctgccttatgtttggaatcttattttcactgcattaaagcagtacagaaaaaacattaccatatatatgacaaggaataagaagattcacaaacgtaaggatagcataaactcattgttcaggaatgtgattggttaccccatctaacagtctggtgaaaagtgcccagggaaatgaacacacaacacagaaatacagtcagaaaatgaagaggtagccaatgtcccgttcccacccccacaaaactccaggatttcttgatagaatgaatgtctgcattactattttttttttaagatttctctgtattaaggattccataaactcgttattcagctcattccaatgcctggcccaactggatatactactaacttaagcctaggtgcaaatcagtgttttgtttttgtttttgtttttgtttttggagacagggtctggctctgtcgtccaggttggagcacactggcgcaaatctcggctcactgcaacttctgcctctcgggctccagtgattctcgtgcctcagcctcccgatccgctgggactacaggggcgcgccaccatgcccggctaatttttattttttgtatttttggtagagaaaaggtttcgccatgttgcccaggctggtctccaactcctgagttcaagcgatccgcctgcctcagcatccgaaagtgctgggattacagatgtgagccaccacgccaggccaaattagtattattcttttaagaaccgaagaaggctcaggttgaaaatttttaattaaaaaaaaaaaagaaaaaaggtttccttgtttttaaatattttaatggaaacatatgagtcagatttcaaaaagtaggctaacggtgtttaaatactgtgccagtgtatttgagaagctgaatgaaaacaaaagtacctatattttaaaaataaatacaatacaaataaggaaaagttcattctacgatttcaatttatcaatcaagctacatggtaaagagaatcatttcaattgtttttcacctccacagcagtgtttgaggttggtaggctctcccaggaagcttggaatcttaagcaactctcaattagccctcaatttctctattttaaattaatctgctgacctgttgtgggtaaacatccataaattctgccctggctgagaaacatttaactttttcgtctaggatgaatgtgtgggtgtgtgtttgtaagggaggggtaactccttttgaccaaagtgttgatggttttctaagtaaatacttgctatccacaagaattttttttttcgtttatgctgctttttctccctttctgcactataaaggctggccttccaattcctgccccgacccttcaccgtgatccaatcccacaaggttcccctaatttctgctccgggtggcacctgacggccaaaagtgaacccctgcggttgtcgccagctagacgcggatagggcggacgactgtcaccggggagcaggcgtgggccaaagccgaggtgatttctgactgctcactggcgggcctcgcgtggctgaaggtctccgagcccctcggttcgccccggcaagccagaagtgcagctgtcgcggggcaggaagctaatcgcggcccctgcgccgctttgacaggccgagtgaagagaaaacgggctcactgcagctaacagcctcaccccttgggctaggaagccacggaagcaaaacctccgccccggcctgaaagcaaccgggagaccgcggaaccactgccaccgactcagccctgcccagcaggggcccgcccaggggccactccccaagggaggcagccagtcactcgcccgcccttccgggcccactcccgaggggacggtctcccgcccgccctcacacacagctagctcttcaggccaggcccccagggtttcgtccacctctcacctttgacgacgcggtcagccccgggagggggcggcgggggcgggggtgggggcggtgcagcccgggccggctccggggcggccatgctgggcccggggctcggctaggctctgggccgggcggggttgggggcgggggcggcggctaccagagccaagcggcggcgccgccggggaacatggcggaccctctttccctacagaggggctaagaccggcatgcactgcgcgtgcgggggtgggggcggggtaggctctagggacttgggcaaaattactgaagctaggagagaaacaggacgaggccaagggatcaggttaaaattctttgcatgcagaatgaagaatgaggaggtgctgcgatcgaacgactgcgaggaaacacacccgctctcatggcattcccagtaaactgagaagacgtgattaaacctcaggatctcctactaatagagaaatgtataacgatttagctaccagatctgaatactgaagggttggtaggggaccagagaatagaggaagcattgtaggttctagagtggagaagggaccatccaaaatggagtttgaaagagaattctggcctttgtgtttagagtctggaattgtcaagagtctgaaagcacagaataagactgcagctagagcaatttaggcgccatagtttgtcaaaacaggtaaggggaataaaggggatgacaccaagagatgtgcaaagaatctgaagaattcacctgaaaaggatacaacctcctcctggaaggcagaggagtaaatagggaattggaaattaattccttatttctgcacatgcacagaatctgggcccaggtgacttatggaacctttatagagaccacggtgactgacactcatgggaaagggggtagaggggcaagaactgactgttcatcaaaaattattagatgagtgtgtccacgacaccaggagatatgttgaatcatggacagggaccagcatatccactaagctctatatatcttgatggtgcaggatccaagtgggatggaacaaccaattcctgcccatcctcctgctcaataatacatgtgctcagaatctgttcataatgcatggtggtaagtaagtagtagtccgaaggtccaaggagtacctttctacctcttctttgtgtcaatttctatcctgagaccccaggaaaagaggaagggaaagacccaacaatggattttttccaaaaagggaacccacaagctattttttagagggaagagtctcgggagtgaggcacaggtgaaaatggatctttctggcatggaagggccataacaccacaggggaagggaaagggagaggcccccacggaaggagaggaaggaagggacaggaggcacgtcacaaacttataagatagagggaaggcacctggagtacattgatcaggagtgagtctgtaagaagagcttgaatccccagaaaatcttcctaaggaggggaggaaggaagtgtataatgtactgagtactgaatgctctgtcaggaaagggatgggaaacatcctagcagcaatactagaaaggaaaggcaccctattttaggacccattgattcccaccttgattgtatatccttcaactcgtctctggctcctcacttccactcagtcaaaagccacttcatatatttatccagacttccagccccaatacaaagaaagcaagagcatacaaagggaagaatgacaaggaattaaatagaactgtcttatagatttattaatgaaaaatactttacaaaaacagtatgtttggcctaaaatagttcagctgactctgagggtttacaytgacgactgagcaagtggcaataatggctgtgttattgaggacagaaggctgtgttagtgtgcctgactccatctgttcaaaagggtgaatgttatgttggcagctccgcrttctaggcctaaggtttggagggcacagggaatgctgacaggccataatacctgggcaggggggctgccctgatgatgtcatcagaaccatgaccacagggctacatgtccccccaaggatgggagacagggaagacaaagggtcaggtaatagggataggtggataaaacaaagagtagaarttgggagtatagtagggaacagaggatgagggctcaggtggaggtggggacataaagcatccaggaataaaatgtgaccttaaaatcctaaggaatggctagtatccagagtaataccatggattcatctttaaagtggctcagataaaacccttaaacagcagctgcttccttttgctagggggaatggaagttggaatttcaaatatcccctcccaaagaatcacatctttttagaggttcctgacacccttaggagaacccaccaattctatgttgagatgagaatagcacaaccatggcagtgatgcagggtaccaacgctgccacagtagtttattttgttgttgttttgttttgttttttgagatggagtctcactctattgccaagctggagtgcagtggtgcgatctcggctcactgcaacctctgcctcccgggttcaagcaattctcctgcctcagccttccgagtagttgggactacaggcacgcaccgtcacgcctggctaattttttgtattttggtagagacggggtttcaccatgttggccaggatggtctcaatctcctgacctcgtgatccacccgcctcagcctcccaaagtgctgggattacaggtgtgagccaccgcgcccggcccacagtacagttttacaaagaaaggtgtagctccaggaaaggaaaggaataacctttaccattgactgtgctgcaggactctagccctgatctgctctcttctgggagcatctgatagaacaaacagaaacccctctcccactgttctcctgtgtccagagtgggaggcataactgctttgcctccagtcatcatctgggggcatatctactcttcgaggaccaggggttcgggaccctggaacaggatctgaattccaagctgacctcaggggtacatgaagactgctagatggtgggtacacaggatgaacaatgggagggtgggagggtgaatggaaaagatcactccaggactgagtgtgaggaacctgaaggcccttgcttctttctggtagtgtggcagtgtaggttagttgaggattgcaccctggagtagtcaggaatctggtcccaatatgctggttggtctctgaccagggtgcccaggagttgtctgttctggagcgatgggggaggctctggtagttcaaagtccttcctgtgtacttggccccttgggaagtttcacccctgtcacacatagccagaaactgctggacactccttgaagttcctggggaaagaaaagaaacccaaagactgagcatcttcagaaaaccattctccttcccagagagccatgcctagctgtgtagcccaattccctactcctccaagagcatacatacaagggaaagaatgaaycaagctgtgcttttgattccatttcttaaaattcttaatatacatcaaaatcaaatctcatacctccaacctgggcaaatgaaacagtctcatggatgttgccatacctctacctccctccactataatctctcatccactatacacacacctacaaaagaagggctccctaatatatagcaatatatggcaaacgtatactccctttgtgatgactatactcctagagccaccataccaaaacctcacgcagcttttctttttaaaaaaaatagagacgggatctcactgtgttgcccaggctggtctcgaactgctggactcaagtcatcctcccatcttggcctcccaaagtgctggaattacaggtgtgagacgctgtgccttgctttttttttgtttctccaacttttcttaaaatgttaccttcacttcagttaagctgcctttgtttgatctctgagatctaatgtggaatgccttttcttatacatttattcaactttggcactcttggtatcttgggctgataattctttgttggggttggggagagactgccctgtgcattgtgtgatttattaatgaaaaatactttgcaaaaacagtatgtttggcctaaaatagttcagctgactctgagggtttacaacaacaactgagcaagtgacaataatggctgtgctgttgaggacatccctggcctctacccactagataccggtggtacatcccctttatccattgagaaccactgcctcaagcttgtacatccagtgcatgaggggaaaaaagagaacatctcactcggaaggtcaaagaaagccaaaatgatattgcccaccttccccacaattgtctgggtctgtacacatggtgtgggtactccatgtaaagggtctttccaattctcccactcattccttatcttcctagaccatccctcagctgagactcagaggatagaaggggagaaaactagctcagaggatagaaggagagatgaccatttctgttctggggatgtcccaaagactgggtattaactcccctttgtcagttaaaagcttattctgtcatgactgaagcaggtcattttcgtaagyagacagactctaggggtgctggtctaaacccttggtctaagaatcatggtgcccaacaaatgatttaatatttatctagataaatgcacgactttgaagcagtaattcatatcttcacaccactccaccttgggatacccccctccccataggtatactgatttgacccttggaggcccctgaaaaggkaccaaattctggcatataatattagatttgggggagttacctgggagtctattgggctcccctgccatggtgggcatcaggacatctggggacaggaactgtggttggggaaggtagagttggggaccgaggagaaacacagaagggtcatggatgacagggagggaagaggagctggaacaacggtgcccggtttccaaaggcttcctcacgtttgatgaatccttataatgagacaagacaaaaaaacatagagatgaggattaacacaaagcaggatgtagttgggtaaacacagtgaggcaagcaaagggaaatggagggaaccaragcacaaacatgcctacatgccttgttctggaacaggacccaatttactcagttgctctccctgctagccctctaagaaactgcaaacttcagatccttatcccttaaccagtcttcctcatatccctcaccttcccaaccctatcattcaggtctttagcaaactccttaatgctaacagtagaattagagagattgagatagaaatttaaaaataaaaacgaaatatgagaaattcagaaagcctgagagaatgagaaaaaaaaatccttcacttattctaagtactgggaatgaaactatatatgtttaaatgtagaatcaagaactctaccccatcttctctcctgtcactgctacacattccacagcttcctcttttgcctgtcaagtttgtatttactgatgctaatgtcctgctctactccctattagttatctacttttatgataaatacccagaaatattcccctttaacatctgaaacactaacatatccaaaattgaaccaaaatccttccaaactcctcctcctggcacctcattttcctaaatcacccatattcaaacattggcaatgaccttgatttcccacttcccatccacaattccattacttgccaaggactatcatttctacctatgggttttatatttaaattcacctggactactgcaacagccttcaatctgcttttcctatctcccatccactcctccttactgtggcctacaaggtcctgtgtgatatggccctgctgctcctcactttatttcctatcattcctggagcttttacactctaactttaatattcctcaaacacaccaagctcattgctacctcagagtctttatacttcctgtttctgttaccaagaatattcttctgatggctcatactttcatatcactgagatctctaatcaaaagttacttccttagagctgatttccctcactaccctactatcaggaatagccctcaaaaaaaccactattacctctttactctttattctcttgccttattattctttatcatacttatcattgtctggcattatgtcatttatttgtttattgtcttctcccctatttctttttacttctgtatccgcagcaccttgaacagtgcctagaacaatgtgggcacttagtaataatacattaaataaaataatctatatgccagtatgtctaatttcctttacgagactgcaagctactcaagggcagaatttgtgttgtttcatcagtgtatgctcacagcacctactacaaaatggcacaaagtaagcatttatcatactgcctaaggaccaggtgccagtcctctcagcatgtgacacagctaattattcctttcttctttttttttttgagacggagtctcgctctgtcacccaggctggagtgcagtggcgcaatctcggctcactcactgcaagctctgcctcctgggttcacaccattctcctgcctcagcttcccaagtagctgggactacaggcacccgccaccgcgcccagctaatttttttgtatttttagtagagacggcatttcactgtgttagccaggatggtctcaatctcctgaccttatgatctgcccgcctcagcctcccaaagtgctgggattacaggcgtgagccaccgcgcccggctattcctttcttcttgaaacactctccccttggtgactatggtaccacacatccttggtttcccttcagtctctctaatctttttttctcagtctccttttagggttcttcagaagaaccaccttaaatctgatgctctttagggatatgtcctggctcctcttctctttctgcaagtcttttcctctttttcaatggctatgattcccagatttcaatttgcagcttatatatctcattccaaaagcctgccagatacctccactcaagcttaatatatgtaaaactgaatgcatatcttccctcaaatatatcattatctacccataaaacttgagtatcatcctttatccccactcccaacatccaggcaggcaccaactcccactgatgtttacttcctaactgggtctcaaatacatcgacttatctctatccttccaaactacttactgtgacatacagggctgtctgtggtccataatattctttgtatcctctcttgtcaacactctccatcatctccccttgccagactttctaatcctgccatactaaataagcttcttttaattcagttaatatttgctcaggtcccttttacttgctatattctttttgcttcctccaggaagccttccatgatacctcaagcctgatttaaatatcccttctattatgttcccataggatcaaatccttaacacattataactgtttgtttatttatccgtccctcactgtagactgtaagctccataaaagcagggactatatctaactcaccattgtagctccagcacctagcacaatacctagaacacactcaataagcacttatttatttgtttatttttgtgctaggaatcttgtacagaatcaataagcatttatttaaaagaatgaatcaatgaatgatacagaagtcagaagaaaggaagccaactctcctaggaaaagaacaatttgccattaaatgaattgaaagtacatgagaacaaatgctaggcaggagagtccaccttttccaaaaaagaatggcagsctgatcagaattgcttaggaatttatgaacgataaattgaatgaaacttactataaattcggctgggtttttttgtttgttttgttttgtttttgagacagagtcttgctctgttacccaggctggagtgcagtggctcaatctcagctcactgcaacctctgccacccggattcaagcgattctcctgcctcagcctcccgagtagctaggactacaagcaccccccaccatgcctggctaatttttatatttttgccatgttggccaggctggtctcgaactcctgacctcaggtgatccaccatccttggcctcccaaagtgctgggattacaggcatgagccaccacgcctggcctcggctgatttttaaaaattggaaaaatgagtacctcttaggagggaaactgaatctgaagggctggtagaagacagacttggttttcaccatatatgcttttatacctttttatttttgtaccatgtatttaaaatctgtttttacatttttcctgaactgacctagtggacawccttcaatgcactggtactttgtaccctgacctctactgtgatgaacactcaacttgggcaaggaagtgaaattctccaaaggtatgattacctacaaacctagccactgatattatttaagtttgttgatctctaatggcttgggctttcctgcctcttctacttacacattactgcactagtaccatatgaaaattctcaagaaggcttttttcctcttcttgctgatacacatgcatcactttagattgaaaacacactgaattctattcaatcacatactgggggtgagaggaaaaagcaaaccaatactccatcccatttctttccttctttctttgattagtgcagtgggttctgacccaatcagcagcctttgcttctcagattcctctcaaggctttatgactcttctcaccccaggaaaccctacaacacgcacggcctttcagaactgctacatggaatggacattcctctgggctccagctgaatgtttgtaaataaaataatgactgcgtgtccttatttttgctgagtacacagggcctttcctcacattacaaccttcactttctccctgcttcttcacctgcactgtatttttgcttagcaaggaggagggtgctctgaatagatggaccctgattctacttacaaaactgkgggaagaaaccggagcttcctccctctctgagacaacggtgccactgagactgcgtgagatgcgacgtaaattctctgcactgtactgctcatcctccccacactccctgctgaggcctcggcaaggtgtagccttcaaacacacagacacatacaggcagacacataataccagacttatggttttcccacagacagtatcctcagggtatgggaaagagtaggggaagactcagtagtaatagacacytgaattagatgtattggtaagatagtggccatgtaacaatctcctctaattcaaaagaagcccaatcatagaccttattttcttctgrtagccccatatcaccatgcctctgccttatcatcatccctgtcacatctctccataattcyttccccaacacaccaccccaggcccagcacyttagcacctgaggctgctacytgagaagtacgcactgttctggcttcatggagaccatgctccatttctgctgttgaagtctttgagagaycaggatcatgggctgagtgcaacctcctccccatgccatctgcagagcctgaagaggaaaacacaaatacaagttgaggccatctcttcccctagggcctaacctctaagcctagcagcacaaactcaggagctgttgtttcatttaataataaatatgcatccttgaattcaacggaggaacatgctcctggaatttagaagcaagaggggctgggcgcggtggctcacacctgtaatcccagcactttgggaggccaacacgggcagatcacgaggtcaggagatcgagaccaccctggctaacatggtaaaaccctgtctctactaaaaatacaaaaaattagccgggcgtggtggcaggcacctgtaatcccagctactcgggaggctgaggcaggagaatggcgtgaacccgggaggcgtagcttgcagtgagcggagatcacgccactgcactccagcccgggtgacagagcgagactccgtctcaaaaaaaaaaagaaacaagaattttagaatatagatagtttactgagtgtccccatcttgcttcatttcatttttgtaaacataatcagcttctgtcagacttaggctcaagacttatagacagaggaaagtatctaacacagtgagttttgttttctaacacagtgattttctaaagtatctgtggtgacaaaggaaattatctccagtctagttcagaatagaaatgatcataataatcatctatcaaacctcctcattttatataacaggaaaatgagttccagggtctgagagtttagtagtttaaccaggattaaaattaaatcctcttgattttcagtacagtactcttaccatctcacctggtgacctcttttactctgagagcaggagctcctcaggaatgttttacatatgtaatgctcttttccccttagcttctctcaaatcatttaaatttctaaacaaccactaaatgcttacctcttttcaaaatctttctagattgttcagttgctctaaactggattggtgactcccaaggggctatccccaatccaactaattaagttttccattccaaaactgtatatgcccctgacctacatttgatacatatgtccatggccaattcatgtcttgatttgatgatttgattctaatatatatatatatatctggctgaagctgatattattcatgtaagtattgtaagaccagttattttcagtattcctgggtacttaaatgcagtgctttcaataccacctcagattcatctgggaacttttaaaaatatagcttcctggatgttaccacagagctgaatcagaaggtttgtggttggtgcctgggaattttcatttttgaaaggttcccaaaaagtctaagaaaatatccttgaacattattgggggaaatgggaaatgttacagtcttcctaaaaaacaacctggtaatctccaataaaataaaaaatatatttatcctgttgcccaacgattctaatcctgagaagaagaagaaaaaaataccagttcataacaacatatatatgagaatattttctactgacataatttatagtagccaagaactagaaataaagtaatgcccacctatagaagaataaatacattatggtttaataccagatattgtccagccacttaaaaagattgaactgagttaaactagatgatttgaagaaattttaatgaaacattgttgcattaaaaggaaaaaaatctgtaaaatgatagacaagcatttgtttatgtatatgtaggtctacataggattgtataaacagaaaatacagtgtatgcacactagataattacctggggaagtagggactggctgtgagagaagagacaggaaaattgtctataataaaaacagcatgtgtgttatgttcttatttctataaaattatttctgtatttatgtgttttttggggttttctgagccactcctcagatgactataggtagccaggtttaaggattacagctaaggctgggtgcggtggcttacgcctgtagtcccagcactttgggaggccaaggccggtggatcacgaggtcaggagttcgagaccagcctgtccaacatggtgaaaaccccatctctactaaaaatacaaaaattagccaggcgtggtggcggccgcctgtaatcccagctactcaggaggctgaggcaggagaatcgcttgaacccgggaggcagaggctgcagtgagtcaacatcacgccactgaactccaacctgggcaacagagactccgtcgcaaaaaaaaaaaaaaaaaaaaaaaaaattacagctatggctggccgtggtagctcatgcctgtaatcctagcactttgggagactgaggcagtaggatcacttgagcctaggaattcaagaccagcctaggcaacatagtgagaccccatctctaaaaaaagagaaaaaaagcattaaaaaaattagccaggtatggtggtgcacacctgcactcggaaggctgaggcaggagggtcacgtgaacctggaaggtggaagctgcagtgagccgtgattgtgccaccgtactccagcctgggtgacagagtaagactttgtctcaaaaaaaagaaaaaagatttacagagtaatgtttagaattgggtgttcctctaatcaagccaaatgtgactcctggacaagaaggtagccactggaacctcctgaagggagtagaatctgattcctttaaaagaaggcagggtgcgatggctcatgcctgtaatcccaacactttgggaggcgaggcgggtggataacctgaggtcaggagttcaagaccaccctggccaacatggcgaaaccctgtctctattaaaaatacagaaatcagctgggtgcggtggtgtgcgcctgtagtcccagctactcgggaggctgaggcaggagaatcacttaaacatgggaggcagaggttgcaatgagctgatattgtaccactgcactccagactgggcgatagagtgagaatccagaaaaaaaaaaaaaaaaagaatttaagcagaggtagaggtggccatttgtaagggaatttctagattcaatagaagaaagggttaagatgatgtctaccctctcatcaatagaaagactaccagacattatgtattcgctgatatgatgtaagaaatacaaagaacttcctattaaatattcctatttttaaaatttgtatctgattttaattgagcctctagctctaagtactaagttacaggaaaaatgtgggctagaagaacatgtttttttttttttttgagacagagtctccctctgttgcccaggctggagtgtagtggtgtgatctcagctcaccacaacctccacctcccaggttcaagggattctcctgcctcagcctcccgagtagctgggactacaggtgcatgccaccatgcccgactaatttttatatttttagtggagacggggtttcaccatgttggccaggctggtcttgaattcctgacctcgtgatctgcccaccttggcctcccaaagtgtgggattacaggtgtgagccagtgcacccggccagaacatgttttttttttttttttcttaaggacttagactataatcagcaaaatctacaatgtgtgaaatgttaaaagacaatgaccaaatttcctcaacaaataaatggagggggaaaaaacatagggtatcatactggcaaaaaaaaaaaaaaaaaaaaagacttaagagccttatcatcaaaatgcaatatgtgtgtcttgtttgaatcctgacttgaaataaaacaactgtataaagacatttatgggaccactgagaaaactggaatattggctaggtattatattaagagattattgttaattttttaggtataataatattattggtttgtcttttaaaaaagaatctggccaggtgcagtggctcatgcctgtaatcccagcactttgggaggccaaggcaggtggatcacctgaggtcaggagttcaagaccagcctggccaacatagtgaaaccctgtctctaccaaaaaaaaaaaaaaaaacaacaaaaattagccaggcgtggtggcgcgtgcctgtaatcccagctactcaggaggctgaggcaggagaatcgcattaacctgggaggcagaggctgcagtgagttgagatcacgccattgtattccagcctgggtgacagagcgagactccgtctcattaaaaaaaaaaaaaaatctttatttctgagagatacatgccaaattatttatgaatgaaataatataatatcagagattcagagatttgttttaaaataatctagaggaggctgggcatcgtagctcatgcctgtaatcctagcactttgggtggttgaggcgggtaaactacttgagctcaggaggtagagaccaacctgggcaacatggcaaaaccctgtcgctccaaaccacacacaaaaattggtcggatgtggtggtgtgtgcctgtggtcccagctactcaggaagctgcagtgggaggacctcagcagtggccctgatgacaccactgcattccagtctgggcaacaaagcaagaccttgtctcaaaaaataaaataaaataatgtagaggggaaaggaaagtgggggaggtatagctaaatcaaaactggccatatgtgtggtggctcacgcctgtaatcccagcactttgggaggccaaggcgggcggatcacgtggtcaggagatggagaccatcctggataatatggtgaaaccccgtctctactaaaaatacaaaaattagcctggcatggtggcacgtgcctgtagtcccagctacttgggaggctgaggcaggagaatcacttgaacccgggaggcggaggttgcagtgagccgagactgcaccactgcactccagcctgggagatagaacgagacctcgtctaaaaaataaataaataaaataaaataaaacaaaaactggccatatgttgataactgtgcaagataatcactatggaagctggttataagtacctggagggttattataacatttattcttttttttttttttttgagatggcagttttgctcttgttgcccaggctgtagtgcaatgggcagctcactgcaacctccatctcctgggttcaggtgattctcctgcctcagcctcctgagtagctaggtttacaggcatccaccaccaccatgcccagctaattttttgtattttcggtagagactgggtttcaccatgttggccaggctggtctcaaactcctgacctcaagtgatccatccactttggcctcccaaagtgctgggattacaggtgtgagtcactgtgcccggcctactcttattctttacttttgaatatatttgaaatttcccataacaaaagttaattttttattttttagatatctataagatgatgtctgcccaagttcaaagtacaatgaaattcagaatataggtcaagagcagtgtttatataacactttaggaactacgattatgtcaaaattaatctggttacaaaagaccacatactgcatgattccatttatatgaaatgtccagaacaggcaaatctctagagaaagaaaatagattagtggttgcctggggttgggggaagaaaaggaggagataaagagtgatttgccaacgggtacaaagtttctgatgaaaacaccttttttttttttttttttttgagacagggtctccctctgttgcccaggctgaagtgcagcggcacaatctcagctcactgcaacctctgcctcctgggttcaaacgattctcccacctcaaatgaaaacactttaaaactgattgtggtgatggatggagaactctgatataataaaacccattgtattgtacactttaaataggtgaaatgtatggcatgtaaattacatatcaataaagcatttttttttttttagcattttttgaaaaactaatttggtggccgggcgtggtggctcacacctgtaatcccagcactttgggaagctgaggcaggtggattgcttgagctcagagtttgagaccagcctgggcaacatggtgaaaccccgtctctacaaaatatacaaaaattagtcaggtgtggtggcacatgcctgtaatcccagctacttggga

SEQ ID NO: 96628 - DNA, 12557 bp, Homo sapiens
acttcagccgaggtgacacagagagaccctgtctcaatcaatcaataaaatgcaaatattttaggacctgcaattgtttgccaaagtggaatatctttcattcactactctaaaaacaataattccccgccccactgacaagtctctggccaaatggagtagatgaatattgtgaggtggccagcaaattcccagagagatctctagcagaccgtgggaagactgtttgtgagccaagacccaaattttgaaagatttcttttgtcttccacagtttagagagcttgcccttgttaagttattcccccaccacatatgaacacacagacacacacacacatatatacacacaaatatcccttagggaagaaatgagaataattatggtcaagacgaaacaaacattttagggaataccctgtatttaataagtatttactaagtatttcctgtgtacttaataataataataaataagcatggggctaggcatgaattgatagtgaggaggaaagttcgggagaagagatgttgtcagcgacctggctctcagcccagttttcccaccaccaaatgggaagtcaagggaaaatctgtaagatttcaattcatccaatattattcacttagcacgtcccaggttctatgctaggtcctggggagacaggaacaaataagatatagcacttaatcttcaaagggctcctagtgtgatagagaagacatggaaaagaggatgacaatcctttatggtgagtgccataatgtaagtgctagaagcagtaagagccaggaggaatccataaggcagcagctcttcaaatgtgctccatgggttcccgggaatccctaagaccctttcaggggatctgtcaggtcagaactattttcataataatattaaaatatatttacctttttcatcatattgatatttgcattgatggtgccaaagcaatggtgggtaaaacttctggtgctttattaagcatgaatcgaagcattggcaccaaactgtacaatagtcattttattttttagtcccatacactttttaaaaaattagaataaacattaaggccaggcgcagtggcttacccctgtaatcctagcactttgggaggctgaggtaggaggatcctttgagccaaggaggcagaggtgccaagatcatgccactgcactccagcctggtcaacagagcaagaccctgtcttaaagaaaaaaaaaaattggccaggcgcagtggctcacgcctgtaatcccagcactatgggaggcagagacgaatggatcacttgaggtcaggagtttgacaccagcctggccaacgtggtgaagccccgtctccactaaaaatacaaaaattagccaggtggcgcacacctgtaatcccagctacttgggaggctgaggcaggaggattgcctgaacccgggaggtggagggtgtagtgagctgagatcatgccactgtactccagcctgggtgacagagtgagactctatctcaaaaacaaaaacaggccgggcacagtggctcacacctgtaatcctagcatttgggaggctgaggcgagcggatcacgaggtcaggagatcaagaccatcctggctaacatggtgaaaccccatctctactaaaaatacaaaaacaaaattagccgggtgtggtggtgggcacctgtagtcccagctacttgggaggctgaggtgggagaatggcgtgaacctgggaggcagagcctgcagtgagccaagatcgcgccactgcactccatccagcctgggcgacagagtgagactccatctcaaaaaaaaaaaaaaaagaaagaaaaaaaattaaacaaagtcagttacacttaagaaggtctttgattaagcagtaaactatattaattttattaaaccttggcctgagtacatgtcttttttttttttttttttttttttgagatgaagtctcattctgttgcccaagctggagtgcagtggcatgatcttggctcactgaaacctccacctcccaggttcaagtgattctcctgcctcagcctcccaagtagctgggaatacaggcacacgccactgtgcccggctaatttttgtatttttagtagagacagggtttcactatgttggccaggctggtcttgaactcctgacctcgtgatccacctgcctcggcctcccaaagtgctgggattacaggcgtgagctactgtgcccagcccatttttttttttttgctaccaaatatactagtttactgagtatgtgtctttttaatattctgtatgatgagatgggaagtacacatttaacccttctgtgcatacaaaagaagtatgatggttgtctccaagagaaacagttttgtgatagtttgagctgcgagttgaactactgctttttcatggagcactatattgaatcgaaagaacaactggaggtggctgcacagtcgtggcggaggtgaccaaagccacataatgtccgtagttcattcatccatccatgccaagtggatcgtggggaaggtgattgggacaaaaatgcaaaagactgctaaagtgagagtgaccaggcttgttctggatccctatttattaaagtattacaataagcggaaaacctactttgctcacgatgcccttcagcagtgcacagttggtgatactgtgcttctcagagctttacctgttcygcgaacaaagcatgtgaaacatgaactggccgagattgttttcaaagttggaaaaatcataaatccagtgacaggaaagccctgtgcaggaattacctacctagagagtccattgagtttggaaaccacccagctaagcaaaaatctggaagaactcaatatctcttcagcacagtggaggaggagtggaagaaggcactaaagggaaagattgacatgtttatgttatggaaaaagaaatttttctaagttgcattgcaaactgtgtccagtttatctgtgatgtttatgaaatagctaaaagcaaatgaagggcatattatggtttttcatttaaaaaaaaaaaagaactgaccaactatgcctgccgatgtataaacaaagtgagccagttacttcaagrgaaaccactaatagtatttgctgccaatgataatatttgagctttgaagagaaaattaaaattttgggggttttttgtttttgtttttgtttttctgagacggagtctcactctgtagcccaggctggagtgcagtggcgccatctcggctcactgcaagctctgcctcccgggttcacgccattctcctgcctcagcctcctgagtagctgggactacaggcacctgccaccatgccggggtaatttttttgtatttttagtagagacagggtttcaccgtgttagccaggatggtctcaatctcctgacctcatgatctgcccacctcggcctcccagaatgcttggattacaggcgtgagccactgtgcccggccaaaaattagaattttataaaacttgtatctgtcatcatcagcttcccagctttctaatatttaagaatttttctgatgaaattgttagtgatattaacaaatgtgattttaaaatattgtataatgagtcaatgttaggaagatctgcataactctgtgaacgaatattttacatattatttgtataccaagttgcaaggtcatgcatgggtaaaatgtccattcaaagtgcaagtactgtaacaaggtacaaaatgttcattgatataatttccgattctacattgcaacaaacctttaacaaactaccacttattgaattttggtatagtgtcaaagaatacctataattatctgaaaaggctattaaaagctctatctcttaccaactatgtatctatgtgaagtcacatttttatgatataattaaaccaaaataatatatcacaataatggaaaaatcaagctgttttctattaagccagaccctaaagagactattcaaaaaggtgaaacaatggcattcatctcactaaactttttgttttgaaaatgtagttggccaggcacaatggctcatgcctgtaatcccagcactttgggaggtcaaggcgggcggatcacctgaggtcaggagtttgagactagcctgaccaacatggagaaaccccgtctctactataaatacaaaatcagctgggtgtggtggcgcatgcctgtaaattccagctacttgggaggctgaggcaggagaatcgcttgaacccgggaggcagaggttgcagtgagctgagatcgtgccattgcactccagcctgggcaacaagagcaaaactccgtgtcaaaaaaataattttttttcgatatggtaaatattgataaatataatccatataaacaaaagctttctggggtcctcagtaatttttaagtatgaagagtctagagatgaaaaagtttgagaattgttgccctcagggaataatttaaagtgagtttaaactgaagcaatctctcaactactttccacaatagaagagaaaaccctctagttcgttgaaaaacatttgctagtttaaacataaggatttgaaatggatggcagatatggggctgactgctcttcttacttataattagttcttacctcaaacccatgctgtaatttccaagtcttggttgaggtaataccaaagagagaatatctctgtgtttctatagaggggtagtcagacttcaggcctcctgtggccagatcagtcagttcatggcaaggcaaagataggctggttttaggatatgagtccccccctttttttttcagggtctaagcagacctccttctggaaaaaatgacaagtcctaatcattaactgctgtatctgcaacaccaagcatctaagacactgcttggcacatattaggcactcaagatattgttgaagccagtcctccatggcacatacctgtagtcctagctacttgggaagctgaggcaagacgatcgttgagcccaggagtttgagtccagcctgggcagcataagctgacctcatttctaaaaataaatgaataaatattgttgaatgaagtcaagctcctttatttttattacagaaatcatgctctaccttttaactggcaggaagctaaagcaactcaagatttaagagatgaatcaggctgggcacggtggctcacggctgtgtcccagcactttgggaggtcgaggcgaacagatcacgaggtcaggagttcaagaccatcctggcctatctgatgaaaccccttgtctactaaaaatacaaaaattagccaggcgtggtggcgcatgcctgtagtcccagctactcgggaggctgacgcaggaatcacttgaacccaggaggcagaggttgcagtgagccaagattgtgccactgaactccagcctggtgacagagtgagactgtctcaaaaaaaaaaaaaaattaattaatcgaaaaaaaaggaagctttcaaaagattaggaaattgcaggaatgcatgggaaaaagagaatggccattggtcctgttatctagtgcaacttgataaaccactccaaaccgtagagcttagaacaacaattattttattatctattcgtcattttttaatatttattttatttacttagagatcctgtctctttgttacccaggctgaagtgcagtgataccatattggctcactgccacctctgcctcttgggctccagcgatcctcctgcctcagccttccaagtagctggaaccccacagcgcggcaccacacctgactaatttttgtatttttagtagagagggtgtttcactacgttgcccaggctagtctcgaactcctgggcccaagggatccatccgcctcacttcctaaacttctgggattacaagcgtgagccaccgcacctggcctattattgttttgttaaaagcagggtctcggctttgcaaatgcagccaccgacgccaggagctctgtacgatcagccatggttaaccccaccgtgttcgacatcgctgtcgacggcaagcccttgggccgcgtgtccttcgagccgtttgcagacaaggttccaaaggcagcagaaaactttcgtgctctgagcaatgtagagaaaggatttggttataaaggttcctgctttcacagaattattccagggtttatgtgtcagggtggtgacttcacatgccataatggcactggtggcaagtacacctgcggggagaaatttgatgacgagagcttcgtcctaaagcatacacatcctggcatcttgtccatggcaaatgctggacccaacacaaatggttcccagtgtttcatctgcactgccaagactgagtggctggatggcaatcctgtggtctttggcaaggtgaaagaaggcatgaatattgtggaggccatggggcactttgggtccgagaatggcaagaccagcaagaagatcaccattgctgactgtggacaactctaacaagtttggcttttgttttatcttaaccaccagaccattccttttgtagctcagaagagcaccccttcaccccatttgcttgcagtatttttttttttttttttttttgagacgctgtctcaccctgtcgccctctcccaggctgaagtgcagtggcacgatctcggctcactgcaacctccacttcccgggttcaagcaattctctttcctcagcctcccgagtagctgggactacaggcgcacgccgccatgcctggctaattttttctttctttctttctttttttttttttttttgtattttagtagagacggggtttcaccatgttgcccagrctgatcttgaactcctgagctcaggcaatctgcctgcctcggcctcccaaagtgctaggattacagacgtgagccaccacgcccggcctgctcgcagtatcttatctttgtgctcttgctgcagttccctttgggttccatgttttccttgttcctttccatgcctaactggattgctgagttaagtttatgattatgaaataaaaactaaattaaaaaaaaaaaacagggtctcactctgtcgtctaggcaggaggagtgcagtggcccgatcatagctcactgcagcctcgaactcctgggctcaagcgatcctcccgtttcagcctcctgagcagctgggactacaggcacacactaccatgcccagctaatttttacttttgtagagactggaggctctctcgcacaggctggtcttgaacgcccggtttcaagcaatcctcccacctcggcttcccaaattgcggagattacaggcatgagccaccatgcccagccgcccccagttttgatggctaaagttaacgtgagtggccctgttacaaataggaagtcccgggccgggcgcggtggctcacgcctgtaatcccagcactttgggaggccgaggcgggcggatcacgaggtcaggagatcgagaccatcctggctaacacagtgaaacccccgtctctactaaaaatacaaaaaaattagccgggcatggtggcaggcgcctgtagtcccagctcctcgggaggctgagggaggaaaatggcgtgaacccgggaggccgagcttgcagtgagccgagatcgcgccactgcactccagcctgggcgacgcagagcgagactccgtctcaaaaaaaacaaaaaacaaacaacaacaacaacaacaaaaacaaataggaagtcctggcaacccctgcaggggcattcggtgatttttttcactagctagccaaaattgcggctcccaatgagctttctttcaccgaatgtactcgaagccaggtcttagacttactccctgaggaaagaggctgagttgttccgtctgggttcccggcaccctgcactgggaggaatactcaaaaggcgttggtaatgtgttaatggacagagggacacacgtgtcgaatgctcctcggtggccccgccccctccggcccgccttccctcctctccgctgagtgtgcttcccctccgtcatccatcgctcggcggtcttctcttctccatgggtctgctctgcgcgttccatcgagtttctcggccatcgcgcgcctgcgccattgggctgtcagtcagaggcggcgtggagatcgctgggagcggttgcggcgtgcsgggagctgagttatagctgtgacttctgccctgccaggccgcacacaagctggctgacccgggtgagcagtgcggtggggccactcatctgagggaggcgggcatgtcgaactgggccgaggtggacccgaaggggtaggagagggtgctgagccccgaagttgtcagctcgactccctgctcgacccggtgtagctgtgtccgaagtagaagggaggttggggatgagaatccgagccaaccaccttatgcaacagatggaggaactaagtttctaatctcagctactcgagagtctgaggcaggagaatcgtttgaacccaggaggtggaggttgcagtgagcctaattcgcgccactgcactccagcctgggcaacatagtgagactctccgtttcaaaaaaaaaaaaaaaaagaaaagaaaagaaagaaacgaagtttcggggagggttctgcttaaagtcacagcgagtgagcgagcaccagaccggtaccagacgcctttagcactgtgcctgcactctttcagcctcagcccttcattcatttgttcagcctgcctttagttgtttggatgcagggcagtgaaatatagggaggagcagtgaggtctctgccttcaggcagcacacgtggaatgacagaccaattctgatacagttttcttatctatttacaactggaaaaggcatgagtgctatgatgcaggcaagtctgagatgcggtgaacaccctctccaaagcttggaaggcagcgagactcgttgccatgattcccgtcagccatagtcgtggcagtgacatgagcatttgacagtctgcctggtagcatgattagttatgttcatgattactattcatgcttcctaggttgcctttcttcacccagggcctccttgagagctggaacctcagttcctagtgacctgggttctaatgcccttatgcacatgtttgagtttgactcttatacagttgtgaagttcacaggtcctcattccactttgatttctggcatctgactgggaatacagtgatgatgcacacacagtccaagaaagtcactcttacactcttatgtagacatttaagagacattaatgttacacttaagtagacatttaaacacatacgtgcaatgaaaccctgtaaaggctaagagaatctgcacatggcagaatggaagcacttcgggaaaaggagtcacttctggaggggtgggaacggttaggaatggctttgtaggcaagaggattcttgagctgtcttcaaagtttaataggtgattactagacacaagagaaaggcagactaggaagcaacagtagcagtgcagagaccagaattatgaagcagcatggctcaattagtacgaaggttttccataatctggtctctgtctagtaaagcaaatacaaatatagtgcttctcataagatggacattattggccaggcgtggtggctcacgcctgtaatcccagcactttgggaggccgaggcgggtggatcatgaggtcaggagatcgagaccatcctggctaacaaggtgaaaccccgtctctactaaaaatacaaaaaattagccgggcgcggtggcgggtgcctgtagtcccagctactcgggaggctgaggcaggagaatggcgtgaacccgggaagcggagcttgcagtgagccgagattgcgccactgcagtccgcagtccggcctgggcgacagagcgagactccgtctcaaaaaaaaaaaaaaaaaaaaaaagatggacattattttgtctgctttacgtagaataacaaatttaatcttaacaacaactctgtgaagtgaaactataattatccccatcataaaatgcaaaaattgaggcatagaaaatttacgtagtttgccctagttcacacagctaataataaatagtagagctagaattcaaacctaggcattctagctctatggtctgtgaacctaaccaccaggcttccttctagaagctgaggacactgagagttttaaatgtcaggcccctgatcacacctatgagtgtcagaatcatgactcaaactcatcttttgactttttttttttgggacagggtctcactctgttgcccaggctggagtgcagtggtgtgcagccttaacctcccaggctcaggtgattctcccacctcagcctcccgagtatctgggactacaggcatgcgccaccatacctggctaattttttatagagatggggtctcaccatgttgcccaggctgttctagaattcctaggctcaagtgatcctctcatcttggcctcccaaagtgctgggagcatgagccactgtgcctggcgctcttttggctcttttttattttattttattttttttgagacggagtctcactctgtcgcccaggctgaagtgcgagtggtgtgctctcagctcactgcagccgctgcctcccgggttcctgtgattctcctgcctcagccacctgagtagctgggattacgggtgcctgacaccatgcctggctacttttaaaaatgtttttggtagaggccgggcgcagtggctcatgcctgaaatcccagcactttaggaggccaaggcaggtggatcacctaaggttaggagttcaagaccagcctggccaacatggtgaaaccctgtctctactaaaaatccaaagaattagccaagtatggtggcggatgcctgtaatcccagcaacttgggaggctgaggcaggagaatcgcttgaacctgggaggcagaggttgcagtgagccaagatcatgccattgcactcaacctggggaacaagaactctgtttcaaaaaaaaaaatttttttttagtagagacagagtttcaccaagttggccaggctgctcttgaactcctgacctcaggtgatccgcccgcctgggcctcccaaagtgctgggattacaggcgtgagccaccacgtccagctcatcttttgactcttaagggtccagtgctcttttcataataacatttgatgtggtggatgttatataataccaaaatgaaattaaattacactttgaggcaatgcttgctagaatctacatgaccatatctttacattgtgaatgttatgcaggagccttcactttgtgccttgggtatagtaggtgttaagtgctgcactttagatgttgatgtgctgggcccaggagtaataataattatagtaaagttgcaacattatttggcaatttgatgttgaatagattgtttcttctgaacgttacattttaacacatttgttcttaaaattacatcattgtaagagaaagtactttcagtttaaatcagtaaagatcggtcaggtgcagtggctcatgcctctaatctcagcactttgggaggcccaggcaggaggcctgaggccaggagtttgagaccagcctgggcagcatagtgaaaccccatctctataaaaaattaattaaaagaattagccaggcggccaggtgcagtggctcatacctgtaatcccagcactttgggaggccaaggtgggcagatcacctgaggttgggagttcgagaccagcctgaccaatgtggagaaaccctgtctctactaaaaatacaaaattagctgggcagctgggcgtggtggtgcatgcctataatcccagctctttgggaggctgaggcaggagaatcacttgaacctgggaggcagaggttgtggtgagctgagatcgtgccactgcacttcagcctgggcaacaagagagaaactccgtctcaaaaaaaaaaaaaaaaagccaggcatggtggtacccacctgtagtcccagctgctccagaggttggggcaggaggattgctttagtgcaggaggttgaggctgcagtgagccatgatcttaccactgcacttccagactgggcaatggagcaagactctgtctctaaataaacaataaataaataggatgggcacgtggctcacacctgtaatcccagcactttgggaggccgactccggtggatcacctgaggtcaggagtttgggaccagcctggccaacatggtgaaaccccatctctactaaaaatacaaaattagccaggcatggtggcccatgcctgtgatcccagctactcgggaggctgaggcaggagaatcgcttgaacttgggaggtggaggttgcagtgagccgagatcacggcattgcactccagcctggcaacaagagtgaaattccatctccaaaaataaatacataaataaagatttatgaccttctactgtgcctctgttctgtggtagtttctgtaaagagattcttttcaaagtcaaataggtttgtttattaccttgagtttgaaaaaaggaattaacagtttggtttgtttttat

SEQ ID NO: 96629 - DNA, 96593 bp, Homo sapiens
ccttaggcccccacccgtgcatggtcacaaagcaaactgacaaaactgctcagccacagaaagaggtcagaggccatatgctccaaagccaatttcagatgtggccaagagtaacaaaaatggaagaacctcacacagggcaaagccaaggaccacggagaactatgctgtagggcatgtgcagagtaaaaagtatttgttacttgtctaaaataatgacataaatacagaaatggaatgtaaatgtttagaacattttatagcaatttcacacagtaattttatatttgttgaatctaataataattttaaaattgggcttgtaaattgatgttctttatttcacttttcctgtaattcatttctattgtgttaggagtgttgttgttgtttcaactggcctagagaactcagggaacagaactagagccctagcaacaactgcctagagagatttcaaccgtagattgctacaatctagagtctggtgtgtgttttccattcttcctctctccaaacaggaatacttacagttatctctcccagcactgccttatgtgttcaacagggggtggcagacagataacttctatctagaccagtaaagagatgaccactgctgggcattactcagagatcctcaactttaggcttcacatagtgaagatggtaattttgaattacctccaccaggaaaagccaaggaagaactacatatacaaaggaaagcatttgttgacgagagactgttcaaatgtttctagttctctgcacgttaaaattatacatctcacttccttgagttaggtatggccatgacttggccaatgaaatgtgcaaggtgacatgtacttctggaagcttttaagagtcagtatacatgtgcaatgaaccacaacacactttccctctgccatgatgactgattacactcaaaattaggccttgtctgtcagcccaagtcccagaaagagaacaccataggggaaagctcccaactgatccagtgtaaactaaactattatgtgacggttactatgggactgaacgaaggcagaacgaatgtagaaatgaaaacaaagacaaaataatctgttttaaagaaggggtcgggggctccttgcttctagtgagcaagggccttgagcttccacaacccttcatatttattgggtagcaagagcagggaggagcaggtaatggttggtcagctgcttgatttatcacaggttcacatgattgctaacaggcttcagatgttcctgtagataatcacaagaaacactgcgcctggggtgtgactggccttagcattccttctgggaggcagacgcagtttgtcaattcgccaacaacctgccttcatgagaacagtttgctgtttgctcatatagcctccagtggtataccgagttggtcacaaccctcattctttctgcctccaacactattaggccaggcacggtggctcacacctgtaatcccagcactttgggaggccgagacgggtggatcacctgaggtcaggagttcgagaccagcctggccaacatgatgaaacctgtctctaccaaaaatacaaaaaattagctgggcatagtggcaggtacctgtaatcccagctactcaggaggctgaggcaggagaatcactttaacccaagaggcagaggttgcagtgagccgagatcacaccattgcactccagcctgggcaacaagagcaaaactccgtctcagaaaaaaataaaataaaccattattttaaacttctaatgtttccgggttgtttccacagtataacccagtctagcactattagtacacctggtcttagtaacgggtaaagggattatgacttgaacataagatgactctttaaaatgcaattgactattaccacaaaagatgccaatactaaaagacgggaaaagtaataggtaaatgttttccatagcatgtttgccaatactacagatacacctcccaactacatgtagactttgatcctttgggctgcgagaggccctcaattcttcagtataatggtcctgctggcatggatcagagttgacatataagatgtaacttttgtctcatccctaaactctgaagaagtgtgtttgcacagctcatttaaataatagaaagaatgagtgacatgtaactaaagactaatacaagagggtaacagcactgtaagaatggctccgtgagacaatagtagaaaaagggctaaagcgtgcacataaaatgttaaaggcgacaaaagtgtgttttgttcagcaactgaatattaagctccaaaagacatcaaggaggaagtacttcaagagaaaacgctagtcttcttgtaaggagacagtatgaggatttgcctttgtgttccttaggcaggtagaacagctggtagccctcgttagctccactaatcccattttggtatagggtactgtatgcaatagtaattgacaaacagttctgatttttttttttttttttttgagacagagtctgaacagagtctctgtcacccaggctggaatgcagtggtgcaatctccactgactgcaagttctgcctccccggttcatgccattctcctgtctcagcctcccaagtagctaggactacaggcgcccgccaccacacctggctaatgttttgtatttttagtagagacggggtttcactgtgttagccaagatggtcttgatctcctgacctcgtgatctgcccaccttggcttcccaaagtgctgggattacaggcgtgagccaccatgcccgacccaaacagttctgcttttaaatgtttgaaagactactgtgctagggtcatctgtcctctcagaacaacaatattaaatctttatgcatttggacacatttaaattttagaatagctgacaccaagcttttctaggaaacccttggttagttccccctttataggcctaatattcccttatgattaaccataaaattaatggcttttcctctcagaaaagaaggaaattaacaactgtaactattaaataaattgtagcaacatctgtggccatcatactcaggaaaaagacacacttcatattttgcaacaaatggagtatataacgcttacaaagttcccataagaacattctgtctgaagtcagcttacttacagtttaatgctgctactggagaacagaacctgctcactgaaccagcctcaaataaaatgttgatcagatctcaacacagtttatcatttcagacccaaggaggcaataaaaggagtcaacatctctcccctttagagccttttcaaagcagttgggaggaaaatcctctacctgcaccctcaccgcccacctctaaacacacactcccatcccccaaaaaagagaaaggaggcagctatccagacttgctcttactgacacatggcaggtggcaggtaagcctcacaggccaagacctaaaattagtatgggtactatccagatgtttactatcactttgagcagagaatagaggagaaaaagaaaaaccttttaaagtctattgatgacttgaaatgtgcacctcaatgattatggaagatgcaaataggccatggcagagaatatgtggcgcccttgattttgacaagtgcctaaaatcacacaactctgattttatgctcaatttaaatacttaagcacattactgcaatcaattacatcactgctgtcatgagcatcctgtctcctatttgaagagaattgtgtaccgccctgaccacattctctaaaaatacatgagatgaacttcttaggttccaataaacataaaatccttctccaaagcatagatgttggattaggcctgttaacttcttagagcaagccgtaccctctcatacactgcactctctacctgctcagctgaacgtttcatctgagggatgtctaggtaacagtgctaggcctgtacatctaccacagtttgtcagcatacctataaagaactcaaaccacactagcatctggtacctggacaaacgactgtcccagaatctacaaaatagactttaaagttccctgtggaatacttagctaggaaaaaagacagcaacactcttcttgggcaaagcatatgacaaaggccagcctggacaatatagtgaaacctcgtctctaccaaaaaaaaaaaaaaaatcagccgggcatggtggctccagtgcctgtagtcccagctacttgggaggctgaggtgggaggactgcttgtgcccaggaggtggaggtttgtagtgaactgtcactacagcctgggcgacagagcgagaccctgcatgaaaaaaaggaaaaaaaaaaaaaaaagcataggacaaaggatggtgaggtaagaaaagctgggtctttgttgctccaataaacgtagcaatgtctttcacaaggatactgaattcgtaatgtgctgtgtattctaaagaaaacaaattatttccttttaattttgcactacttgctaatcttatttccaaataggaaaaaaaaaagtcaacaactatgtgccggcccaatatacgttagtcgatctgattattcctcggttcttcacagcagtaacacagcatgtattttctctctcaggcccaggaatagcgccaccatctaccatacacaggtccaaggcttcgatacatgtggaatttaaacagtacagaatattctacttcctctccaggcaatcatcatacttacaagtctgtttctgcctttttcccaaaacttaagcccagagcatcttcccaaattctacgtttgaaagaaccagcttccccctgctcacagatcgcttcaacatccatctgatactactactactcttccttaagagacatttcccttggccttgggaggaaagggtctttcacttaagagctccgattctccccgtcgcccctttccatcccctcgacccacaaagggctccggtgtttcccgccgttcatgcagcgaaaagagaaagcaaaatgccctcaggaggctccaggtgaggcccttcggtgccccagagacgggtgtcttaagtcagactccggagctgtgcagtgcagccctggctacagaaagctgcttcgtctgaatccccgggtctgcaggcagagcccacagcctgaagggccagcgctgtcacctacctgcccgggacctgcgggcggggacctgggccgttcccgaggccgcgcggccaacagttcccgccgccacgcgacggaggaggaggcagaagacggggccgtgccagactagccgggtagcctggaaccacttcgccaacctgcaaaggcgtagcacttctccctcccagcctgcagccgccaccgactcggcggagtcggcctcctgggaaaaaacaacctgcgaagctcctccttctcctcgtgctccctacgcgaggcactctctaaccaatgggaaacgtggtgggcggagcgagagtgacagacgattacagagtcctcccgccggcgcgaacgggcggtgcagtagcagggccaatcagcagcgtgggtgggaagtacaggggcgggagaaagtagggaaattacgcgcccaatcagatctcggggccctcgagcgacgggtcctgcggcccgtggccttccgagcgcggcgctcagggggcgtgcctgcctgggccaatcggcgcgagcccacagtgcggagcgagcgcctcaaatgctcgggtttctcagctgattgtctccagccgagagttgttttttgcagctacggagccgagccgcagcaggaggagccgagacccccggggggtggggggaaagaggaggcggggtccgggggagccgcggctgctttgcgctggactccgggtcccgtcacggcgcttcctggggttagaggctggggtgggtggggggtaagggggcagtccttctccccttcgacggcggctccgagtccagccccttccttcccgcgctcgctcgcccggcccccagccccctcatgagggtgtccgtgccgggtccggcggccgctgccgcccccgcagccggccgcgagccctccacgcccggcgggggcagcggaggcggaggcgccgtcgctgcagcctcaggcgccgcggtgccgggctccgtgcagttggcgctgagcgtcctgcacgccctgctctacgccgcgctgttcgcctttgcctacctgcagctgtggcggctgctcctgtaccgcgagcggcggctgagttaccagagcctctgcctcttcctctgtctcctgtgggcagcgctcaggaccaccctcttctccgccgccttctcgctcagcggctccctgcccttgctccggccgcccgctcacctgcacttcttcccccactggctgctctactgcttcccctcctgtctccagttctccacgctctgtctcctcaacctctacctggcggaggtaaggcgggagggccggcatgcggggcccgggcgggtgcgcggggccgccgggatcaactcccgctgaggaccagcgggggcggggggtgggcagcgagaggcggactggaaaccagcctggggaaactgaggcacacctggagtgtgagccagtgttttcgccttaaacttaagtggctgattggcttgattactgaggggttcgggctagggggtgagtgagtgagtgtgtgtgtctgacaacttaaaacagcaacggaacgaaccctttgttcggtgttctggccctccgaggtaaggcgttggtggcaccaacaaagtggcatcgcaagaagtagcagccccggtggctctgccgaagccggactgtgttgagggaggttggatgctgaggtagcagcagctctgctgaagctggactgctgccagccattacgtcaccaggcagagctgttcctctgctattgttgctgcgtttcttttattagaagcttatattccctcctgcatctcctttcctgtggctcgataagcctcacataaatttcgttcgatagttccccagcagggttgatgatcaataaccaatgctgaggatcaggataaggacctccataaagcccttaatgtttgccccagttgcttcgtgctttagcggtttatcctacctcctattagcatagtcttttttggagctaattaagagaaaaaaatactagcttaacctgtgcctattgcagaaacaaaaccaccaaactgtttttgcaataacttgcttaatatctggaacctaatcacaccccctttctcttttatggggaattgctggttggattgcattgttctgcagcgcttaggtatttgacccatttcaaacaggtttgggagtgtaaggttgtcaatcatgtgtgtcagcttgtggtatttaagccataatattttaagactttcccccaaaaaagtcctccttcccaccaaaagaaaagcttgaggaggggaggaagcaaggtgacatcatatgcttaatacagactaatatagaataatattggcctatgcagctaatcctctcaaaggcttttttggaggtgatggaattaatgtagttccaagcaaaagtaaaaaaaaaaaaaatgacgtatattaagtgtttatatttcctgcataaaccaactcttttctcctttaataggaagtagaatgcataattttataatcagtcataatgtcagctatttagcacactaaaaacaatagttgaaaacaacaaaactaatttaacttttattattttccttctccatcctttgaaagtccaaacaatacaatgacaaaaacgcaaaccagtaagcggaaataagaagcataggttatcacaaatcaaatgatgccatagtcgtgtcacttatttgagggtgttctaatctagttgtcgtttaagctgttataacacttctaccctttatacttaaactgatacattgtaatcttcctgccaccatttcagatagtgcgttagtgacttctcaacgctgaagcttttactccaggttcagatgtttacctgaaagtgactagcgatttttatgccaggggcatcagatgacttgttttttccctatatattttgatttacaaaataatatgaatgattcactgtaaaatagttggtaggcatttcataaagtgggtaaacactctttttacttcttgaggtataacatatacaataaagtccacaatcttaaatgcacacctagatgaaattttatatctgtatacacccatgttaccaccacccagattaagatataaagcattttccgtgtcccagaagtttccctttttaccctctcccagtcagtagctcccccaggtaagcacaaagtgggtaaacactatccaaaaaaggagatatatttaagctcaaaattctgaaggtatgcttatatagcatagaatacacggagtatctagattgggtcttcagactttgagctaatattccaagctagtgaggaagaatttaaaatctgaaagtcttcctgttaaatgtttgtgtaatatgcttttttaaaaacgataaaactctattaacctgaaaaatacaatttggaaagaagctgggataaagcttttttcctttgtaatgcctgctaaaaagagtgtgagttgtttgtctatcctttctttttataatgaaattaacaattttaggacacagttgtacttaagagaacaaattgtcaattttttgaaagcctgtttgaaaggagatatcttaaccagaaatcatttctcttttcattagagaaaatctccaggaacctgtatttaagagagtattttagttcaaatttttatgtcagttccagataactgcaagtatacttcccattgatcattctgaattaatgaagtttttcctagtgagttcttcatattatagcaaagtggtagggaaagcctatgtggtgataaatataagacttaactgatgtttaatttttttaaccaaaagcccctataacttttttgaatagtcgtgtgtcttgattaccaactcactctgtctttgctgtatgccgtattaaataccaattccatattacttttcacttgtttaaagcatttgtttttttctgattctcactaagagtagctttaaggacttagttataaagaatcgtggatcagtataaaaagtaaaacaaactctactactttgaatacattttggtggatattctaaaactcatgtttttgaaaagttaagaaatgcctcaaccccttttttctttttttttttttcttggtgtctacacttgaatggaattgagatgagggaaagtagccctttcttaaacagttaagcttctcagtgtctcatacttaacctcctggaagcctatagttgagagagagggggaaaaaaaaaagaaaagccaccttgtacactaatctaaaaacacattttgaacttctggcaggatcagtaggacaagagcttttccagagaagggttcacactcctggagttttaccggagaagacttcaatatttgaaacagactatctgataaaactgattctatctaccattagaacatattgaaggacttaaaaggagaattgacagcatcacacaatatatccatgtaagaaacctgcacatgaacctcctgaatctaaatttttttttttaatgagagttgatggtataccatcttggagtgttgtgatgcatgccaaaatcaatgagttcatcttcaacatattgaagttcttactttcartttggtcttaggagtgccagttgcttaatcaggataaagtacagtgacttaattacaatgccaaaacagataggaaaattaaattcaaaatcttaactcttacatttatggatgctattattgtccctaccagtagatatattcttatattggtaatacttcaaataacatgcaagtcaacttacaggttcatttgattttgttctgttctttgatttcccacaaaagttgaaatcacayttctaccacctaaaatagaaattccttgaggataagaaggaatattttacatatttttatctccagcaactagaacaatgatgattatattattgaatgacactttataaaaaggtcaaaatttagaaaatagttatctaaaatatgggggttaactttattttgatgaacatttgaggtaaattatgtattgtctggaatctattttctgcctaaaagatttcatacaatatagagttttgtttaatgaaactttttatatcatggcaaatggcccatactaattaaggctttgctaatttagtttcaacaaattctacaaaatagaaaagtctgtaagatgagtctcatatcctgagtcagttactgtttaccagaaatactggtttagttcaatgtttgacttttatccataactgactataaactgtttttgtctgaatctactaaattttttcactatcttgatcttatttctcctgaaatcatctgtgaagccgaagtttcagatacatacctgtaacaaaagacatgattataatgccttatattttatgaaattggtattttcaaagcactttgtaacatttgtcttcacaacccccatgaaatagaaagagatgtgatttgtccaaaattaaatggctaatatgtatcagttgtgatactattgtatagctcaggtgctatgaagtcttatcaagtaatttgtttctataccatgaactttcctggatacatcacttctttaatagtgcttttctaacttgctttcccgtttttcacatggtttcaaaccttttccactgtctagcaaactctttcttcacctttcatccactgcatatgactcttggtttaaagaagtagaagccaggtcatctggcctaccagagattcagagaaatgctgcagagagtagtcagtctttttcagtgcataattgggctggcaagaaaaggccagaaactaccaaaaaaaaaaaaaaatgcagaatgataaaatatcacacaaatgtgtgtcttgggggtagggcaggagtggttttcagctgcctcctgttagcctactgcccagattttaattttgtgtgttgaaggtgtagggaggtgtcgttgcaggctgtgccttgcagtgaggtcttataaaagacttcatcccctccagcataatgccagaatcctttaagtgtacaccttcagtggatcagctaggaaaataagcaggtcctcagagctagatagggggtacaaattggtaaataagtcttccctgggaatgcaaaataagctcattcttgcacaagtttgaagcctaaattcacatcagttctgtgattgagaggagcagactggggggtttcaggagatctaacttgaaaacataaagttatccttgcttgatactaacctcaaggagctgtaagaagcagatgcaaagcatctgtggaagaatgtactttaaacccagacttctgacagataaaattccaaaaaacatgggttcasaataaaaaatcacactggggaattgcagatgtcagaattattaaatacatagtacacaataattaatcatttatgaattaaacactgttgaaatacaaaaaattggcacatttggaaatcattttttaatgaaaaaattaaaaactgaaatggatggttaaacagattaaacacagttaaaaagaaataagtgaactagaagatcttaggaaaaaaaatcactcgggatatagcccagagaaataaaagatggaagatacaaccaatgggtgaagagagaatgaggatataatgagcaggtccaacatatgtgtaattggaattatagagaaattattcaaagggaaaataagagtttacgcaaatttattaaagacatccaagtttcagatccagaaagcccaacaaatccaaggtgggctttgtgaaaacatatttaaagtacacttgaaaacactgacctggtgcagtggctcacgcctctaatcccagcactttgggaggccaaggcaggcagatacaaggtcaggagatcgagaccctcctggctaacatggtgaaaccccgtctctactaaaaatataaaaaattagcccagcatggtggcacgcgcctgtagttccagctacccgggaagagagagagaaggcaggagaatcatttgaacctgggaggtggaagttgcagtgaaccgagatcacaccactgcactctagcctggcgacagagcaagactccatctcaaaaacaaaaacaaaaaaccttcaaaatcaatgtgataaaagccatatgtgtagtgtaaagcagaaaatcatatgatcatctcaatagatgcagaaagaagaatttgacaaaattcaaccatagatgattttttaaaattaacttttagtaaatgagggaaaagggggaattttttcagtctaataaaaagcatcttcaaaaagcctatagctgatattatacttaaatattggcagcatattacctaggagaagaacaaagtacttcacaacattgtgctggaagtcttagccattgcaataggcaagggaaagaaaaaggttcgaaaattagaaaaacagaagtaaaattgtctctatttgtaggtgacacaatttcttaggtcaaaaatcctaatctacagatagctacaggaagtaatatttaagcttayaggatataactttttatatactagcagaaaacaattagaaaaatgaaatataaaaattccacttggcagggcatggtagctcacgcctttaatctcagcgctttgggaggccgagttgggaggatcgctttagctcagcagttcatgaccagcctgggcaacatagacctcatctctacaaaaaaataaaaaattagccaggtgcagtggcatgtgcctgtaattccagctacttgggaggctgaggtgggaggatcacttgagtccaggagatagaggctgcagtgagccaaggttgcaccactgcactccagcttgggcgacagaacaagaccctgtttcaaaaacaacaattctacatgcaatagtgtcaaaaaattaaaatatttaggaataaataaaagatgtgcaagacctctacaaggaaaactacaaaacattattgagagaaattaaagaggcctcagtgagtggaaaaatataccctgaaaagctcattgcttttaaggtgttatttctcccttaatttgacctataaattcaatgcaattcctattaaaatttttgcaggatattttggtagctgttgccaagatggttttaaaatatgcgtggacatacgagggacttagtgtagctgaaacaattttgtaaaagaaggacgaagttgaaggatcgcactacttgaagagtaactgtaaagctacagtaatcaagagagtgtaatgctggggaaaagatagacatatagatcagtggagcaggatagagaatccagaattagacccacatatatatagtcaactgatttttttccccaaaagtgccaaggtaatttagtggggaaaagttttgtcaactaataattccaaaataattgaatattcgtatgggaaaaatgaacattgattgttacctcacaccrtagaatgtacttgacatagatcatagacctaactgtaaaagctaaaatttgtagaagacagaagatgttttcttggaggaggcaaaggttttgcagtaaacaaaaaggcatgaaccaaaattgacaaatgagactttatcaaaatttaaaacttttgttttttgcaagacaaataagaggcaagccacagactgggaggaaatatttgcagcacatgtatctggcaaagtacgtttatccaaaacataaagaacttataactcaataagaaaatccagtaaaaatgaacaaaggatttgaacagatacttcacaaaaaagatatatgcatagccaagaaacacaagaagagatgctcaaggttattagttattaggaaaacaaaaattacactcacgttgaactaccactagacattgattagcaggactaaaatttaaaagactaaccayaccaactattggccaaaatgtggattaattggaactcctacactgatgataggaatgtgaagttttacaaccactttggaaaacagtttagcagttgttaaacataagcctgtcataaaatctagctgttacagaagccaggcgtggtggcacaggcctatggtcccagctactcaggaaactgaggcaggaggatcacttgagcccagcagctcaagaccagcctgggcagcatagcaagaccctgtctcaaaacaaaacttatrgagaaaaatctagccattatagatatttacccaagagaaatgaaagcatatgttcctataaaaacttgaacatggatgtacataatagctttattcacaaaaactccactgaaattaacccagatgttcatcagaaatgaatgaatgaacaaaatataccaatacaaaggaataccactcagtagtaaaagcaaaggaacaaactactgacacaacaacgtggattaatctcaaaatcagtatgctgaatgaaggaagccagggaaagatgagctcacactgtatcatttcatttatattaaattttagaaagtgcaaacctatggtcacaaaaagcagatcactagtttcctagggtctggagcagaagggaggacttacaaaaagagggcagggtgaaatttagtgggtggggagatactctgtatttgattgtgatagtttcaaaggttgtacagctttctcaaaactcagaattgtacaccttaaatgcatgcagtgtattgtatataaattatatttcaatgaagttgattttaaaaatttcagggctttgcaatttactccaagaataaaagctgaagcagggaagaaatgtacaacctgcagctccatcatctaatttatgttagaaagctaatcatctaatttatgttagaaaaagaacaggataaatccaaaggagatgaatcttaagagtaataaaatagaaaaaacaaagcagggaagaaatgtacaacatgcagctccatcatttatcagctctatgtaacttggttaagttagttgggtaaattacttaccttttctgtgcctattttccttcttataaaaattagaataataatacctgcctcatagaattactgtgaaaattatatacttcatataaaatgtttgggacatggtagtactattgattgttggctattattaaattttaaataactgggatttcatagtctacattctcacactcctaaaacaagccagaattcagtaacaaaaataacttgtaaagctgagcatggtggcacgtgtctgtagtctcagctactcaggaggctgaggcaggaggatcacttgagcccaggagattgagtccaggcctaggcaatgtatcgagaccctgtctcttaaaaaacagcaaacaaaaaacaactattaaaggttcatttagaaatgtttaaaacagttatgaacaacatgggtaaaggaagaaattccaatggcatttaagaatactatatgataataaaaatactatatatcagaacttgaattatgcagctaggttagcatgtagaactaaatttacaacctggaatatttacattagaagaaaacatttaataagctaatcatctaatttatgttagaaaaataacaggataaatccaaaggagatgaatcttaagagtagtaaaatagaaaaaacaaagaggtttgataaagccaaaagctacctaatacctttcttcataatcaaacttctttcagaggtgaccatgaatatatcaacattttctcacttctccagcttctctaatctgccttccccccatcagtctacaaaatagttgttgcctatggctcacagtgaccttcatgtcaataagttcattagacatttttcagtcctcattcaaattaacttctcagcascaattgaccccccatatctttccccttatcactggctagcacattgaatagcattctcctaatttttttgttaccttgatagcttctttgtaagctcatgtgcctgtcttgccatcagagaggttgagatttctaaacacttaaacctagatcccctcttctttccaagtgatcacatccactttcgtgacatcatgccacttaaaaacagatgactcacacttatctccgatccttactcacccatactactctgagctggctctgtagattctgcactgatttgacatcttcatggtatctgatgcactcagattcaacatgatctttcttcctcctctcccaccctacacctatatgcatcaaaacctggttcttgaaccaggcacagttctgcctgtaatcccagcaacttgggaggctgaggtggcagcatcacttgagcccaggagttcgaggctgcagtaagcaatgtttgcgccactgtactccagcctggattacagagcaagatcccaactcaaaaacacacacacacacaacttggttctcctcttttgttccccatttccgtgactagtatttatatccaattatctatataattcagaaacgtgagtccttctcaatattctttctccctcattacgcacattcactgcatcaccaaatcctgttacctcctaacatctcttaagtccattcacttcttcccttcaaaatgcctggtccaggctactagcatgtattgactagtccatggcagttagccttctaattggtgtgtctgtataccctggcccccacaggcccattctccacagtgttgccagagttttttggaacaaaaatctattataaaagccccacccaaccaggcacgrtggctcacacccgtaatcccagcactttgggaggccaaggcaggcagatcacgaggtcagcagtttgagaccagcctggccaatatggtgaaaccccatctctactaaaaaatacaaaaattagctgggtgtggtggcacacacctctagtctcagctactcgggaggctgaggcaggagaattgcttgaacctgggaggcagaggttgcagtgagccgagatcgcatcactgcactccaccctgggcaacagagtgagacttcgtctcaaaaaaaaaaaaaaaaaagccccactcctagatttctccattggatctagttactcattagaatagagagagttctatgtatactacaagtcacttcatggttccagcctaatttcaaactatgctcctcattcctcaccattccagccacattaaacattattttagtcctctacttgccatattccttctgccacagagccattccatattcttttcctgctacttagaatgttctttcctcctcctttgcttagttaactctcaactccagggcacagtgcttcttcaaggaagccttcactcaactactcaagttagattccaaaattatagactagtagaggagcattatgctgctcttcttcatatcatttgcacagttggaattttatatttgtgtgacttttttgtgtgagcttactagattggtaagcactataggaataaggaccaagtctgttcttgctgtattaggtattggtacctaatttaacatctgatgtgtattaggtgttcagtaaatattgaatgaagttcttgttcaccatatcccaaatagcatagtgaggaggaatccctgaatatataatttcacagcagaatttggtctacccttttcttccttctcttttcccacttatctacctcctcccttcaaaaaaaaaatgcttgctttaaaacaaaagtcccaaaatcagatgcctagagggacctgaatgctacaacctcggagagagaataggggagtgttggtgtttgtggtgaatcggaaagcacgtgtttaaagaggacaatcacattaattcagttccagctatgagattacattgtcaaatcatctgatttttcaagagaaatcacaaatttgaatttcttaaaatgagaaatctactttttaaataatgacgggattttcaagtatgttaaaaatactgtaggctaataccgaataagctaagcaaaacttttgtggatcaaaccgaaaccatgggctattttcttctcctcctcttcctcctccttctcataggaataaaacaactaaatataatcctgtctttataatttccatataccaagctttaattatatttaatacccatcaaagttagttaaaatgaactctgagtaatttataccttatggaaaaattacggtgttctaagtctgaccaaatgtgtagaaagtaccatattatctttggatatgccatctatgtctgctttgccccactatactacatattgctttagatcagccactattttacatttatttcaaaagaaattttgcatacccttcaacacctagcactgttatatatgtggtcagtgcttaatgacttggagtaaattagtggtaaagtaagggaatttaaaagtagcattttcttctttccacctccacaaacaaaatcagaatctaacttcatggaacatttcatctaatttgttttaaataaagacaaacttctaaaaattaagtgtccttgtaatcttattattttaactttggtaaaggggtatgtttaagatagtacatcatgaatggccctgaacaaggaatctgggaaccagaattctagtccaaattctgctttatatgaataattgatatttgcaaatcattatttttctgggccagttgtataatttgtaaagtggttagtctcagtgatatctaagataccttgaattctagtatgctgatactaataaagcaatgcagaatttgagaatttttgcttaaactccttagtacctagttctgtgatctaatacagtatctcaattctgtctctgagatatagatgccagttaaacagagttatacataacacgttaaaactgatcaaaatttatttaggacccagggatcatcatccttctagaataatatttcaaatttgtaccttctcttytcttacaaaaactcaattacagctaccattttcattagcatattaatcacactctacaatttgtttttccagcctcagtcttctcagagtataaaaaagcttaaatattttcttaaaaatttgtactctcctcagctactatgtaggatccagtcatttgagctggtttgaggtggtgtagtgtatactctaaggagaatataaacttttatccctttatagccctattttaggttgtttcattggtcaggagccccttgtattttttctctctccaagagcttttgtggaagagaaagttcaatgtgagggctgaggctgttaagtgcccaattggcatttttttaaaaaatctattctgaaaagaatgggacattaaacagcaggactgacagcagtaacttaagtcagaatagagcatatatacttggcagtagcaggaaatccttttgcccaaagtagaaaaagtgatatgattacctgctaggagcattatacatacgtttttagacatgaattaacaggctagaatcagtcatggttaaaggcacctacatttttaaatggatggtagattttccaggttttgtaaactggatgttatagggataccattagaacactggatacaggccaggtgcagtggctcacgcctgtaatcccagcacattgggaggctgaggcgggtggatcatctgaggtcaggagtttgagaccagcctggccaacatggtaaaaccctgactctactaaaaatacaaaaaattagctgagcatggtggtgtgtacctgtaatctcaactacttgggaggctgcggcaggagactcacttgaacccgggaggtggaggttgcagtgagccaagatcacaccactgcactccagcctgggtgacaaagtgagacaccgtctgaaaaaaaagaaaagaactctggatatggaggtattaggtagttaagaacttgggcactggagtcccattccttggacccttgctaagtgaccttaagtgcgtaacttctctgtatcatagtttctccatctgtacctacctcatggggttgtgaagttaaatagaayaatactttaaatagcagaacataataagactcaaatggtagctattattattttagaaaaaaagaaaagagcatctctaaaattaagattttcctctgccacctttcttacatataaactttagacaatatgataaacactttttctaatttatggtaatatttgagatacctttatttctttactgtatgattaagataggtttgtaggtattctcaccttttaggtcatggatttgtcctaaaccacattagaaattagaaggattggaaggcaggtcttctgactacactgctttttctgtcgtactctagaataagcagttgtaagctattgtcagcgttcatcactgcttacattcagattgttctttttttttttggtttttttttttttttgagacagagaatcgccctgttacccagtctcttgtgcagtggcgtgatctctgctcactgcaacctctgcttcccaggttcaagtgatttatctgccccagcctcccgagtagctgggattacaggtgcgtgcctccacgcctggctaatttttgcatttttagtagagacagggtttcaccatgttggtcaggctggtctcgaacttctgacctcgtgatctgcccgcctgggtctcccaaagtgctgggattacaggcgtgagccaccgcgcctggctgagattgttcttaagaaatccagattaactacctggtggctggcaagatggccaaataggaacagctccagtctgcagctcccagggagatcccagggagatcagcgcagaaggtgggtgatttctgcatttccaactgaggtacctggctcatctcattgggactggttagacagtgggtgcagcccatggagggtgagcagaagcagggtggggcgtcacctcacccgggaagcccaaggggtcagggarctccctcccctagtcaaggaaagccatgagggactctgccttgaaaaatggtgcattccagctcagatactatgctttttccacggtcttcccaacctgcaaaccaggagattcccttgggtgccaacaccaccagggccctgggtttcaagcacaaaactggttggctgtttgggtggacactgagctaactgcaggagtttttttttcataccccggtggcacctggaacaccagcgaaacaaccgttcactcccctggaaagggggctgaagccagggagccaagtggtgtagctcagtggatcccactcccatggagcccagcaagctaagatccactaacttgaaattcttgctaccagcacagcgagacctgagacactggagcttggtggggggagggggcatccgcaattactgtgtagagtaggcgattttcccctcagggtgtaaacaaagccacctggaagttagaactgggcggagccaaccgcagctcagcaaagccaatgtagccagactgcctctgtagatttctcctctctgagcagggcatctctgaaagaaaggcagcagccccagtcaggggcttatagagaaaactcccatatccctgggacagggcacctgggggaaggggcggctgtgggcacagcttcagcagacttaaacattactgcctgccggctcttaagagagcagcggatctcccagcacagcgcttgagctctgctaagggacagactgcctcctcaattgggtccctgaccactttgcctcctgactgggagatacctcccagcaaggggcgacagacaccttatgcaacaggagagctccggctggcatctgatgggtgcccgtctgggacgaagcttccagaggaaggtacagacagcaatctttgctgtttggcagcctccgctggtgatacccaggcaaacagggtctggagaggacctccagcagacctgcaccggaggggcctgactgttagaaggaaaactaacaaacagaaaggaatggcatcaacatcaacaaaaaaggacatccatgcaaaaaccccatctgaagagcactggcgtcaaagaccaaaggtaggtaaatccatgaagatgaggaaaaaccagtgcagaaaggctgaaaattccaaaaaaaaaaaatgcatctactcctccaaaggatcacaactcctcaccagcaagggaacaaaactggatggagaatgagtttgacaaattgacagaagtaggcttcagaaggtggataataacgaactcctccaagctaaaggagcatgttctaacccaatgcaaggaagctaagaaccttgaaaaaaggttagaggaattgctagccagaataaccagtttagagaagaacataaatgacctgatggagctgaaaaacagcatgagaacttcgtgaagcatacacaagtatcaatagtcaaatctatcaagcagaagaaaggatatcagagattgaagatcaacttaatgaaataaagcgtgaagacaagattagagaaaaaagaatgaaaaggaatgaacaaagcctccaagaaatatgggactatgtgaaaaagaccaaacttatgtttgattggtgtgcctgaaagtgaaggggagaatgaaaacactcttcaggatattatcctgaagtgggaaaacactctttaggatattatcctgaagtgggaaaacactcttcaggatattatccacgagaacgtccctaacctagcaagacagccaacattcaaattcaggaaatgcagagaacaccacaaagatactccacaagaagagcaatgcaagacacataatcatcagtttcaccaaggttgaaatgaaggaaaaaatgttaagggcagctagagagaaaggtcgggttacccacaaagggaagcccatcagactaacagcatatctctctgcagaaaccctataagccagaagagagtgggggccaatattccaacattcttgaagaaaagaattttcaacccagaatttcatatccagccaaactaagctttgtaagtgaaggagaaataaaatcctttacagacaaccaaatgctgagagagtttgtcaccaccrggcctgccttacaagagcttctgaaggaagcactaaatatggaaaggaacaaccggtagcagccactgcaaaaacataccagattgtaaagaccatygaccctatgaagaaactgcatcgactaacgggcaaaataaccagctagcatcataatgacaggatcacattcacacatagcaatattaaccttaaatgtaaacgggctaaattacccaattaaaagacacagactggcaatttggataaagagtcaagacccattgatgtcctatattcaggagacccgtctcacctgcaaagacacatataggctaaaaataaagggatggaggaatatttaccaagcaaatggaaagcaaaaaaaagcaggggttgcaatcctagtctctgataaagcagactttaaaccaacaaagatcaaaaaggacaagggcattacataacgctaaagggatcaattaaacaagaagagctaacctaaatatatatgcacccaatacaggaacacccagattcataaagcaagttcttagagacctacaaagagacttagactcccacacaataatagtgggagactttaacaccccactgtccatattagacagattaacgaaacagaaaattaacaaggatattcaggacttgaactcagttctgaaccaagcagacctaatagacagctacagaattctccaccccaaatcaacgaaatatacattcttctcagcaccgcatcacacttattctaaaattgaccacgtaattggaagtaaaacattcctcagcaaatgcaaaagaacggaaatcataaacagtcactcagacygcagtgcaatcaaattagaactcaggattaagaaactcactcaaaactgcacaactacatgaaaactgaacaacctgctcctgaatgacaactgggtaaataacaaaatgaaggcagaagtgaataagttctttgaaaccaatgagaataaasacacatcataccagartctctgggacatagctaaagcagtgtttagagggaaatttatagcactaaatgcccacaggagaaagcaggaaagatctaaaattgacaccctaatgtcacaactaaaaagaactagagagaggccgaggcgggtggatcatgargtcaggagtttgagaccagcctggccaacatagtgaaaccccgtctctactaaaaatataaacaattagctgggtgcagtggcaggcatctgtaatcctggctacttgggaggctgaggcaggagaatcacttgaacccgggaggtggaggttgcagtgagccaagattgcgccattgcactccagggggccgtgtgagactccatctcaaaaatattaataacaaaagatccagagaagcaagagcaaacaaattcaaaagctagcagaagacaagaaataactaagatcagagcagaactgaaggagatagagatacgaaaaaaccttcaaaaaatcaatgattccaggagctggttttctgaaaagattaacaaaatagaccactagccagactaataaagaagaaaagaaagaggaatcaaatagacacagtaagaaataataaaggggatatcatcaccgatcccatagaaatactgactgccatcagagaatactgcaaacacctgtacacaaataaactagaatatccagaagaaatggataaattcctggacacatacaccctcccaagactaaaccaggaagaagtcaaatccccgagtagaccaataacaacttctgaaattgaggcaataattaatagtctaccaaccaagaaaagcccaggaccagacggattcacagccaaactttaccagaggtacaaagaggagctggtaccattccttctgaaactattccaatcaatagaaaaagagggattcctccctaactcattttatgaggccagcatcatcctgataccaaaacctggcagagacacaacaaaaaaggaaaatttcagaccaatatccctgatgaacatcaatgtgaaaatcctcaataaaatactggcaaaccaaatccagcagcacatcaaaaagcttatccaccacaatcaactgggcttcatccctggaatgcaaggctggttcaacatatgcaaatcaataaacataattcatcacataaacagaaccaatgaccaaaaccacataattatctcaatagatgcagaaaaggtctttgataaaattcaacaccccttcaagctaaagattctcaataaactaggtattgttggaatacttctcaaaacagtaagagctatttatgacaaacccacagccaatatcatactgattgggcaaaagctggaagcacttcctttgaaactggcacaagacaaggatgtcctttctctcccctcctattcaacatagtattggaagttctggccaggacaatcagccaagatagaaaaataaaggacattcaaataggaagagaggaagccaaattgtatatgtttgcagatgacatgattgtatacttagaaaaccccattgtctcagcccaaaatctccttaagctgacaagcaacttcagcaaagtctcaggatacaaaatcaatgtgcaaaaatcacaagcattcctatacaccaataatagagaactcccatgtataattgctacaaagagaataaaatacctaggaatacaacctacaagggatgtgaaggacctcttcaaggagaactacaaaccactgctcaaggaaataagagaggatgcaaacaaatggaaaaacattgcatgctcatggatagaagaatcaatgtcgtgaaaatggccatactgcccaaagcaatatctagattaagtgctatccccatcaagctaccattgactttcttcacagaattagaacaaactattttaaatttcatatggaaccaaaaaagagcccatatagccaagacaatcctaagcaaaaagaacacagctggaggcatcatgctacctgacttcaaactatactacaaggctacagtaaccaaaacagcatggtacttataccaaaacagatatatagaccaatggaacagaacagagacatcagaaataacgacacatgtctacaaccatctgatctttgacaaacctgatgaaagcaagcaatggggaaaggattccctatttaataaatggtgttgggaaaactggctagccatatgcagaacactgaaactggaccccttccttacaccttatacaaaaattaactcacgatggattgaagacttaaacgtaagacctaaaaccataaaaacccaagaagaaaacctaggcaataccattcaggacatagggatgggcaaagactttatgaccaaaacaccaaaagcaatggcaacaaaagccaaagttgacaaatgggatctaattaaactaaagaacttctgcacagcaaaaggaactatcatcagagtgaacaggcaacctacagaatcggaggaaattgttgcaatctatccatctgacaaagggctaatatccagaatttacaaggaacttatacaaatttataagaaaaaagcaaccccatcaaaacatgggcaaaggatatgaacagacacttctcaaaagaagacatttatgtggccacaaacatatgaaaaaaagctcatcatcactggtcattagagaaatgcaaatcaaaaccacaatgagataccatctcatgccagttagaatggcaatcattaaaaagtcaggaaacaacagatgctggagagcatgtggagaaataggaacacttttacactgttggtgggagtgtaaattagttcaaccattgtggaagacagtgtggcgattcctcaaggatctagaccagtaataccatttgacctagcaatcccattactagatatatacccaaaggattattagtcattctactataaagacacatgcacacatatgtttattgtggcactgttcacattagcaaagacttggaaccaacccaaatgcccatcaatgatagactggataaagaaaatgtggcacatatacaccatgaaatactatgcagccataaaaaaggatgagttcatgtcctttgcagggacatggatgaagctggaaaccatcattctcagcagactaacacaggaatgaaaaccaaacactgcacattctcataggtgggagttgaacaatgagaacacatggatacagggcggggaacatcacacaccggggcctgtcggtaggtggggagctagcagaggggtagcattaggagagatacctaatgtagatgacaggttgatgggtgcagcaaaccaccatggcacatgtatacttatgtaacaaacttgcacgttctgcacgtgtatcccagaactgaaagtataatttacaaaaaaatccagattaaagcaagcgacatttcttctttcttccgtgggatattctgttgctccttctgatacattctgctcctttttcccccaccattattagatctatttcctytggtgaatctggtgctgcctctgtctttacaaaaagcaattctgctgtcttcctagctcaaaaagcatgaatggttttatgaaaaatcagtaatatacaatgggggaagtagtgttggaaaactttttaaaggacagcatagtttcagcacaaatgcagtttaaatcagttttctagggagtctaaatctatattgtatgagactcttggttcaggaataaattcaatatattccttaaacttaaaaaactaaattatcttcaatgaaatrtttatagtaaactaatgaacagttcatagtaattagttatattttacagagatttttagtaacaaaagctcacaaatttttcttctcacccataaatttaatacttcactcctgaaaattttagttatttatactttttaaaaatacttctacatggtagcatgcacctgtagtcccagctactcagggggctgaggttggaggatcgcttgagcccaggaggccgaggcttcagtgagctatgatcatgccactacattccagcttggatgacagaacaagaccttgtttcaataaaaatgaaaataaaatataaaaaatacttttagttaagtcgggcatgtaaagttacctaacaatctgaaaaacaacacaaagtggagatgttaaactgctcagttattacattttactgaacagatcctttgatttcttaatacattttcttgggcatgttaattctgcagatcttgaacaactaataactagttgctgtgacatataggtggaacattaataaagcagtatttgtcaccttagaagatttatgaattgggagaattaagctataccatctaaagatccaaatgtacaaatatatcaaagaaaaccaggatccctatgagccttgaattaggagtcaggacatctgggttgatcctattcaatttcccgtgtgtgttccaggacagtctactttaatctctaaagctcaactttgttatccataaaactaagttactgaactaaatttctaaggtttctcttagtccaggagacttcagggacaacctcccagttatcttctcctagtggagtcttacagatagagcttagtctctcactaagaagttcacatgagctgtgttgttcggggtttttactgggggttggtcatataggcatggagcatccacatggctgactttactcagtccccagcctctccagaagtcaaactgatactatgtggcccaaggctgcaccgtaactcacattgttagcataaactatttggaatggcccaaggccccagataaagaaagacactcttatcaggcagactattctacatgtgtaccctttgtttaactcccacttataagtgagaacatcagtatttgactttctgtttctgagttattttacttaggataatggcctcaaattccatcaatgttgttgcaattgatagaatttcatactcgttatagctgagtagcattccatggtccatatataccacattttaatctaatcatccattgatagacacttaggttgattctgtatctttgctattatgaatagtgctgtgataaatatagagtgaaggtgtctttttgatataagaatttctttccctttgggtatatacccagtagtggaattgctgaatggaattatagttccatttttagttatttgagaaatcttattgtttttccattaagttgtactgaaagagatagagagcaacgtaataatactggaggacttcactccacttacatcactatatacatcatcgaggcagaaagtcaacaaagaaactctggacttaaattggacttcagaccaaattaacctaatagacgtttacagaacattctaccctacaaccacagaatacacattcttcctacctgcacatggaacattctcaaaaattgaccatatgctgggccacaaggcgagtctcaataagtttttaaaaatggaaatcatactaagcatcttctcagaccacagtgaaataaaaatataaaccagtaccaacaggaactctcaatactatgtaaataggctgggctcagtggctcacacctgtaatcccagcactttgggaggccgaggcaggtggatcacttgaggtcaggagttcgagaccagcctggccagtatggggaaaccccatctctgctaaaaatacaaaaactagccaggcgtggtggtgcacatctgtagtcccagctactctactcaggaggctgaagcagaagaatcacttgaacccggggggcggaggttgcaataagccaaattcgtgccactgcactccagcctgggcgacagagtaagactcctcaaaaaaaaaaaaaaaaaaaaaaaaaaaaaagatacctggaaattaaacatctgctcctgagtgatctatgggtaaacagtgaaatcaaggcagaatcaaaatatttgttgaaacgagtgaaaatagataccaaaacctctgggatacagcaaaagcaggctgaaagggaagtttatagtgttaaatgtctacataaaaaagwcatttcagattaacactaatgttacacctcaaggaactggaaaaacaagaacaaacaaaacccaaagctagcagaaaagagatcagaactgaatgaaattgagaccaaacatgcacgcgtgygcgcgcgcrcacacacacacacacacacacacacacagatcaatgaaatgaaaagttgattcttggcaaagacaaacaaaattggtaggcaaacaaaagaagagagaggattcaaataagaacaatcagaaactataaagatctgattttatctttaaaatcaggtaaatttaaacttaggggtgcagtggctcaagcatgtaatcccagcactttgggaggctgaggcaggcggatcgcttgaacccaggagtttgagaccagcctgggcaacatagcaaaacaccatctctacaaaaaaaaaaaaaaaaaattagctgggcgtggtggcatgcacctgtaagtcccagctactgaggctgaggtgggaggatcgcttgagcctgggaggcagaggttgcagtgaactgagatcgtgccactgcgttccagcctgggtaacagaatgagaccctgtctcaaaaaaaagcaataaaggtaatattacaactgataccacagaaatacaaagtttatcagagaccactatgaacatctctatacaattctgattttttattatgtatatgtgacttgttttttcctttctgaaaataataggttattctttgattccagtgttctgaaatttcatagtgatgtatcttcaaatgggtctgttttctatccattttgccggatattcaacaagccccttcaacttactaacatgtattttttagtttagggagacwttctcgtatttttaacttgattttctccgcttctttatttgtttctctttctggagctcttaatgtttggatgttagaccttttaaatgaatctttttcttttctttcctattttgcatctgtcttctttctctgctttttgggggagtttcccaatttccagcctgtcttttgactttttaaaatttctactagcatttgtaattcccttccataagctcctttttattctctgaattttttattaacatcatgtttttgttcatgagctccatatctactctctctaagtttattaaggatagttttcctgttttagtttttaaatctgtattttttttgcattgatctcttttattaaagacttttgagctatctggttatccttggctctctgctaataattaagagtggaggccaggcatggtggctcacacctgtaatcccagcactttgggaggctgaggtgggcggatcacctgagcacctgagatcaggagttcgagaccagcctggccagcgtggcaaaacygtgtctctactaaaaatagaaaaattagccaggcgtggtggcacgtgcctttagtcccagctactcaggaggctgaggctggagaatctcttgaacctaggaggccgagtttgcagtgagctgagatcgtgccactgcactcctgcctggtcaacaagagcgagactccgtctcaaaaaaaaaaaaaaagaatggaaactctgagcttatgggtgagatatgtacgctctgagctttgctgtagggtgatctggctgaactatttgttacagaacccccgttgctagtatgtttagatctttcttcttgggctgctaagattcctcagagaaaaaaaaatattctaatctttcaaagagtaaaggtctattccagcattttgagaacctagtcagggaagagggttggggtgggggagaatctttatgcttggtgtataccagtcatctccattctcagtgtggtgctaaactatcaactgtgcctggcatttaactttcatgctttagaccaaaggctttttggtggcctctccagagaataaatacccagatatctgccaggatgaagaagaggcatttgcccagggtatggactagggaaagagagatttaactgctcttaaacagcttttatctacccgttttagccacccccacttctcagttctctctgattggtacctgattctcctggtaccttttgaagattctgaaatcacgttgttctcaacccttctcactactagcttgggattcatctttcttgggtaatcatacattgtgttgggtgtccctaaggccaccttcagccttgatgatttgctaggactcacaattgttaaactcatggttacagtttattacagtgaaaggacgtagagtcaaatcagagggaaaagatacataaagcctggaataaaccagacacacacttccaagagtcctctcccagtggagttacacaggatgtgcttaattcattcagcaatgaggtgtaacaacacatgtgagatggtgtctaccacagaaratcattagaaactcagtgcccaagattttttttattgcgagctggccgtgtaggtaccctctacctaacaaataccaaatrtcaagattccaagaaagaaaacaggtattcagtataaactatattatttgcacaaatgctttaggtaaagtgaagcacagctcatcatttaaggaatggtgggaatcctcctgaaagccagatttccaaatgccagccacaggccaactttataagcagtctttctaaggatagcagtcttgagcctgccatgttaacctttttctgcacgtacacccatctgctttctagcttccaacattcattattgcagtctttcctattctactcagatttatgggtttatgcctttcatgaaaattcctttactgttgttttagtagaatttcaagttggaacaaaattagatatggatattcgatatttatttgaatcatcaaaattcatttgattgtaaattaaaccatcccaatttgtataatatcatttttaagcagcttagaagaaatcagactaagcagagagaagagactaaaagaaaaaaaaattttttttttgagacagagtctcaccctgtagcccaagctggagttcggtggcacgatctcggctcactgcaatcttcgcctctgggcccaagcagttctcctgcctcagcctcccaagtagctgggactggaggtgtgcaccaccacacccagttaatttttttgtatttttagtagagatagggtttcaccatgttgccctgggtggtctcgaacttctgagctcaggcgatccacccacctcggcctcccaaagtgctgggattacaggcgtgagccaacactcctggccaatgaataatttttttaagcattagggtattaagaccctaagagagatgcaagaagatattgaatcctagaaacaagaataggctgctgtaaatatatatattttttagtatatatatctactaaatatatttatatttatatattatttatatttatataataatatttatatgtatatattaaatatataaatatatatttcttagtagataaaatatatacatatatatttttagtagataaaagttattggccaggcctggtggctcacacctgtaatcccagcactttgggaggctgagacaggtggatcacctgaagtcaggagtttgagaccagcctggccaacatggcaaaaccccactgaaaagtacaaaagaattagccgggcatggtggcagatgcctgtaatctcagctactcaggaggctgaggcaggagaattgcttgaacccgggcggcagaggttgcagtgagccgagattgcgccactgcactccagcctcggtgacagagtgagacttcttctcaaaaaaaaaaaaaaaaaagttgttaaccatatgatagacatagaaggtgaacatctggccgggtgcagtggctcatgcttgtaatcccagcacaytgggaggccgaggcaggcagatcacctgaggtcaggagttcaacacaggccagccaacatggtgagatgccttctctactaaaaaaaaaaaaaaaaatagctgggcatggtgatgcacgcctgtaattctagctactcaggaggctgaggcaggagaattgtttgaacccagtaggcagaggttgcagtgagctgagatcgcaccactgcactccagcctgggcaacagagagactccgtctcaaaaaaaaaaaaagaaagaaagtgaacattgaggaagagtgcatttattcaatttatggctaaagtagctaaatgcttcatattttatttgcaggcaataacaatggtaagcttgggaatggtgcgctactctctataggaacttaagcaattgatatggaaattggataactgcttctgtgaaaatcatctacttaattggatatgtatgcctaactcttcaccatggaaaagagattatgtttaccacaattcatttttgcatcaatttcaaattttatattagatatgctctccagtaaagtttctattttagatcaacaaaagagggaaaattaaattgacaaaaatgaattccatagaaaagcatttgttctataagtatttcagtacctactatcttcaaagcaacatggtctacatgtcatgggtgaaaataaacgatacacagctccagtgtaaccctcttgtcttagtctgcttagtcttcaggctgttgtaataaaatatcataaactgggtagtttataagaaaacaaatttatttctcaccattctggaggctggaaagtttcagaccaaggtgccagtagatccagtgtctgataaggatccactttctggttcatagacagtgccttcccactatgtcctcacatgttgtaagaggtgaggaatctatgggatctctcttataaggatactaatctcattaatgagggctgcatcctcatgacctagcaggtcccaaaggccccacctcctaatactaatcacattgggggttagtatttcaacatgaatttgcaggggacataaacatttcatatcattgcacattcctcaagtcttgggatacttgtattaatattacattaggtgacagtcacaaacaatatatttgcaatactctcatctttcctttatttgaagcactaaaggagacatataagtctgcattttaaaatggaaatatctggccgggcatggtggcttatgcctgtaatcccagcactttgggaggccaaggcgggcagatcacctgaattaaggagttcgagaccagcctggccaacatggggaaacccagtctctaataaaaatacaaaaattagccgggtgtgttggtgtgcacctgtcatcccagctacttgggaggctgaggcaggagaatggcttgaacctgggaagtggatgttgcagtgagctgagatcatggcagtgcactccagcctgggcaacagagtgagactctgtctccaaaaataaataaataattaaaaataataaaatgagaaaatcatttcaaatcacttgtatatgagttgaatattacaaaataaaattgagtatgctagtaataacattattttaaatcttcaataattcaaatatcctaaaataatattttctaaataaggatctgctagtctgtatatgggataaaagtagattatgtgatataaaatatttgacagccattaacccttaaaattctttatactttcatagaaagaataatattcttttataaatggcccatttatccagttttttctggtattaagaaagagctggaaagatacagcccatctgacttaaattgacatcagtaagtcatttagatacattatttaccattctgaacttaaaaaaaatctacataaagcatgtgtttattgtttcatgaattatttcagtatcttaacaaatgatatataattgcttgatattttttcatattactaatttttaactcatgatcatgtcctgttagctatattctataatatacttggaatctattaatagcagataattgtgtttaagcctactataatccaaatgtgatttaagcacctggttatgcttctataatgcattggaacatgttctgcaaatctgggatggtagctgacctttattttttttctcatccagctcaactccctgtcacacccattatcccaagacctgtaattttatggattatccctctcaccctgtaccgattcttktcttcacatgatccttttaaatgccttcactgaaatctagctcttctcagatgacatctcatgtcttttgtgggaaaaatgatcagcctattttatacttcccaatactacttactaatattataccatcatcatctctgaaatctgtgccatctgattagatcatcattggctgtaataataacttccaccttcctggatgaatcagcactttcttccttcttccctggtttcctgtgatatatgatctttctcaaaacccttattgataacccatctaatgtctcaattcagtggtttcttaragctctaaaacccttcatttctatttgagccacccagtagcatgaccacaccttggatcagctcttaaaaactgagctattctttctgaccaatgtcttctcttttcccttatatatattcagtttattcttttatctgttttttaccctcatcctgacttttagtcactttatctcttctgttctccccactccattctagtattcctcatcccttgactttttgccgtgccaaacctgttcattcaccagagtgagttcttcctctacaatagtgcccacattttccaattctaaattactacatgaaaaaatgcatcctggttatttgaactttttataatgtgtcaacctaaaataacagagattgtccaaagacaataagtttattcaggaatgagaatgattataatccaggttatatgtgctaagctggatcatgggcatatttggggaggttgaggcaaggggaaacttttaaaggcaaaattctaaaggttgcatagttgttttgaaatggttacccctcgtcacaaggattaataacaagggcggtgtcattccaaggctgaacaggcagttgctggatagatgtcctcacagaagtattcttcgtgtaaggttacggtgacttttgtgcatgtttgtggtcttcagagaatccttgtaatcatttttattatagaaatgtgtataagactcctcctttttggcctcctgactcccttttgttaagatttggcataagtgactccactttgattctgacaactttcacaggatctcgccctgttgcccaggctggagtgcagtagcgcaatcataactcactgcagcctcaaactcctgggctgaagccatcctctgcctcagcctcccaagtagctaggacgataggtgtggttatagtcctgattgattgattgcagagacagagccttgctatgctgaccagattggtctcaaactactggccccaagcaatcctcttacctcagcctcccaaagtgctgggatttcaggcatgagccactggatctggcccatttttttttctgttaaattgtttccattttaaaatcagaaaaccttgctaattatatccactatcaactgctcaactttaactggaccttgctgtttctcaatatattcttttataacctttctattcatgtgttccaaatgtttttcatattccagtgcttaaatctaacatctttcacaagaagtgaccttgccacctactttcctagaaaaaaatagaatccatctgccaaattctcttatccttctcgatatcaaaatatcagaatccatactatatccacattttttattataacaaagagctggtttgtaaattattttaaattttctgtgcagacctccaagtttttctttaattttcttttcttctctcttgactcaaaagtgtcttccttttcaggactaacatgcctcttctgtctagagccttcctaacaattaaactaactctctcttgctctcgctctcacttgctctctctctygctctgtctctcactgtctctccactctccatcttctacttcgccctctatttagtcaatttctgaccaacagattgctgaatcttcaaccacgaagagtcttttaccctactttaawtttaacagattagcctgctgttgttttatgtacacaagaccaaggccaggtatggtggctcacgcctgtaatcccagcactttgggaggccaaggcgggtggatcacttgaggtcaggagtttgagaccaacctggtcaacatggtgaaaccctgtctctactaaaaaacacaaaaattagccaggtatggtggcaagcgcctgcagtcccagctacttgggaggctgaggcgtgagaatcacttgaacccaggaggcagaggttgcagtgagctgagattgcaccactgcattccaacctgggcgatagagggagactcagtctcaaaaaaaaaagaaaagaaaagaaaacacaagacccacaagtcagagtgaaagaccgtttatcactcatggctaaagcagcaacaaaagcaatgtctttttgctgtgagtctcaaagcccccaaattcatagggcagcactgtgagaggatgttacctgcrcatgcagtggggaatgctacaggagagaaaaccctgaaataaaaacagagacagagatagacatttattctagagtgtaagcaaatcttcaccagggagagagagggagagtttactatcctggaatgtcctcagggaggacagcgttctctacctttattataccagtcaggaatattccttctgaccttaaagtaaacactatctcttgcattcagggatgtttgtcatgcaaacccctttgctcagaagatccagaccatgcaaaaacatgagacattcatagagaattctcttccaacacagattttcccaggtttctgttagcttcagatatctctcagtctgtactcactgcttctgttgtcttacttcctatcaactccttgcacttctgctctgtcaatctgaaaactattctctgcaaggtaccagtgacataccagtcactcaattaaatggtcttttcttaatcatttctgacgttttgcagaattttaacaacggctctactttcttgcttttaactctaaactactctgctgttttctatgactagtctgattcttatgtttctctcctctgcccatctcccttttctttactcttgtgctttctaattgtgactattaaatgtgaacatatcacaggttgactctcattctacactttttcccttaagtgtattctactgagtttcagctgtcacctctataggtgactgtaatttccttcttgcattccaaaactcacctattatctttatttctgcctagawgtaatacattttaaatataacaatacatttcgtgacctggcttttaagttttttgtcagtggtgccctcattctatcaattgtttagattcaaaacctgagaatatagtttagtcagctcaagttcaacagtcttttaactggaattctttgccccaccgtaatgcattttctacactgtcacttaagaaatcattcaaacgtagaatcatattacagagtttatagccagcccaattcttcagcattttatacaaagcctccatgatttgatgactgcttgcctccagcttcaacttctgctgtttcccacactatcccacacaccaccaccacacgaaaacactttmtttgaccttaattcactgctcatttattcaaacactgtctgaaaacctactgtgaactaggcattatggtaggtattgggctctatatctgagtaagttatggtctttcttaagagagaaataaatatgtaaataaatgatatagattatgattaataatgcaaggataaaaagagttttctctctccctgagacacttaacctaacaatataaagaatgacattctagtaatgtctggaaggatgagttggaatttgttatctggccataaaacatagtctaagcaaagtaaaaatatgtacaaaggcacagagatataaaattgaaccacctatttgaagagttgtaaataattcagaatgaccaggccaagtgcagtggctcatgcctataatcccagtactttgggaggctgaggctggcagatcatttgaggtcaggagctcgagaccagcctggccagcatggtgaaacccttttctactaaaaatacaaaaattaactgggcatggtggcacacgcctgtagttccagctactcgagaggctgaggcaggagaattgcttgaaccatggaggtggatgttgcagtgagccaagatcgtgccagtgcactccagcctgggtaacagagtgagactccttcaataaaaagtaaaatgaaataataattcagaataactaaaccgtaagtttgaaggtaggcctaaaaggatacaaggatgggaaggtggagctaggcaataaaaaaccttttatgtattaaaggagtgtggacatttttctggaatagtgtgatcagatgtacttttttaaaagaagttcctccatcataataatttattcaggtaagaatcattggtagatattatgaactagtcaaggaaatttgaagagtaaaagatatttacatcatctctaaatattgctgtatgtgatactctttaaatacaatgggaaaacagtaactaaatggtggaaaagcactataaataccactttaaccagttgattaaagttttttattgtgttttgtttctgagacagaattttgctcttgttgcccaggctggagagcagtgatgcaatcttggctcactgcaccctctgcctcccgagttcaggcaattctctggcctcagcctcctgagtagctgggactacaggtgcatgccaccactcctggctgctttttttttatttaatagagacagggtttcaccatgttggccaggctggtctcgaactcctaacctcaggtgatccacctgcctcagcctcccaaagtgctgggattacaggcatgagccaccgcttctggcccaattgattaaagttaacatcacagtaattggacaaatcaacatcattaacctcctgatataatgcattgaagagaatgcaacatcatcacttctgtggtaatcctaccaaaatgcatatccaaaatctaatcataaggaaacactataagatcactggtctctatattcttcaaaattgtgaatatcatgaaagacaaaggaaagaagtgaagattaaaagagactaaatacacatgaaatatgtacctaatgcataatcctggattttttttcataaaatactttattggaatgattggaaaaatatgaataaggtctgaaaattacatgatagtatacatattcagttttatgatttttgtaattatactgtggttacataggagaattttcatctttaaagaagtatacattgaagtacttagggcaaagtagtgtcaaacaactttctctcaaatgattttttgaaaatcatatatagaacattgatgttcatagcggcagcattcacaatagccaaaaggtagaggctacctaagtgtccattgattgatgaatggataagcaaaatgtggtacacacatgcaatggaatattattcagccttagaaagaaaggacattctgacacatgctacagtgtaaataaaccttgaagacattatgctaaatgaaagtcacaaaaggacaaatattgtatgaatctacttatatgaggtacatatagtagttaaattcataaggacagaaagtagagagatggctgccagagcctggaggaggagggaatggggagttgttgtttaatgaatgggtatagagtttcagtttgggaagatgaaaagattcaggagatggataaaggtgatggttgcacaacattgtgaatgtacttaatgccactgaaccatacactaaaaaatggttaaattttatgttctatctatgttaccacaatttttaaaaattaaataaatcatgtatggggggaattttaaaaagtgatcaaatgaacagttatcatctgaagagggtggatggaattaagaatgaaggtaatcaattaaaaggctgctgtaataatccactgtgatagtggagatggcaaaagtggatgcatctatgacttaatataagtagtacagtttagagactaacagtatactattttagactccttcattacattcagcctctagtagatggtagtactgttaccaaaatacagtcaggcaccgcataacaacgtttcagtcaataactcaccccacatacaacagtggtcccataagattataatgaagctgaaatattcctataacctagtgatgttgcagccattttaacatcatagccattgtaacgtcatagcacaatgcattactcacatgtttatggtgatgctagtgtaaacaaagctgtgctgccaggggtataaaagtgyagcacatacaattatgtacagtatataacactggataataaatgattatgttactggtttatgtatttactattattttagaatggctttctacttattaaaaaaaagttaactgtaatacagcctcacgtaggtccttcaggaagtattccagaagaaggcactgttatcataggagatgacagctccgtgcatgttattgcatctaaacaccttccagtggcacaagatgtggagttagaagacagtgatacagatgatcctgaccctgtgtaggcctaagctaatgggtgtatttatgtcttagcttttaagaaaaaagttcaaaaagtaaaaaataaaaatgaaaacattttacaataggaaaaaaaaagcttattgaataaggatatgaagaaagaaaatatttttgtacagctgtatgacgtatttgtgttttaagccaagggtcagtacaagagtcaaaaacttaaaaagtgtataaatttaaaaagttatagtaagctgaggttaatttattgttcatttttaaaaataaatttagtgtagcataagtgtacaatgtttataaagtctacagtagtgtacagtaatgtcctaggcctacacattcacttaccactaactcactgactcacccagagcaacttccagccctgtaagctgcattcatattaagtgccctatacaagtgcaccattttttatcttgtataccacatttttactgtatgttttctatgtttagatacacaaatacttaccatcgtgttatacttgcacatagcatttggtacagcagtaacatgctgtacaggtttgtagcctaggagcataggctatataccatatggcctaggtatgtagtaggctataccatctaggtttgtgtaaatatactctgtaatgttcacacactgacacattgtgctttttttgttgtttgttttgttttttattatacttaaagttctaggatacatgtgtacaatgtgcaggtttgttacataggtatacatgtgccatgttgtttgctgcacccatcaactggacatttacattagctatttctcctaatgctacccctcccccagccccccacccccttataggccccagtgtgtgatgttccccaccctgtgtccatgtgttctcattgttcaactcccacctatacatgagaacatgcggtatttggttttcggtccttgtgatagtctgctgagaatgatgttttccagcttcacccatgtccctgcaaaggacaggaactcattcttttttatggctgtgtagtattccatattgcatatgtgccacattttcttaatccagtctatcattgatagacatttgggttgcttccaagtctttactattgtgaatagtgctgcagtaaacatacatgtgcattgtctttatagtagcatggtttataatcctttgggtatacacccagtaatgggatcgctgggtcaagtagtatttctagttccagatccttgaggaatcgccacactgtcttccacaatggttgaactaatttacactcccaacagtgtaaaagcattcctatttctccacatcctctccagcatctgttgtttcctgactttttaatgatcaccattctaactggtgtgaaatggtgtcttattgtggttttgatttgtgtctctctaatgagcagtgatgatgagtattttttcatgtgtctgttggctgcataaatgtcttttcagaagtgtctgttcatatccttcgcccactttttgatggtgttgtttgtttttttcttgtaaatttgtttaagttctttgtagattctggatattagccctttgtcagatgggtagattacaaaaatgttctcccattatgtaggtcgcctgttcactctgatgacagtttcttttggtatgcagaagctctttatttaattagatcccatttgtatattttggcttttgttgccattgcttttggtgttttagttatgaagtctttgcccatgcctacgtcctgaatggtattgcctaggttttcttctagggtttttatggctttaggtcttacatttaagtctttaatacgccttgaattaatttttgtataaggtgtaasgaaaggatccagtttcagctttctgcatatagctagccagttttcccagcaccatttattacatagggaatccttttcccattgcttgtttttgtcaggtttgtcaaagatcagatggttgtagatgtggggtgttatttctgagggctctgttctgttccattggtctatatatctgttttggtaccagtaccatgctgttttggttactgtagccttatagtatagtttgaagtcaggtactgtgatgcctccagcttcgttctttttgctgttttgctaggattgtcttggctatgggggctcttttttggttccatatgaactttaaagtagtttttccaattctgtgaagaaagtcattggtagcttgatggggatagcaatgaatctataaattaccttgggcagtatgggcattttcatgatactgcttcttcctatccatgagcatggaatgttcttccatttgtttgtgtcctcttttatttcattgagcagtggtttgtagttctccttgaagaggtccttcacatcccttgtaagttggattcttaggtattttattctctttgtaacaattgtgaatgggaattcactcatgatttgcctctctgtttgtctgttattggtgtataggaatgcttgtgatttttgcacattgattttgtatcctgagactttgctgaagttgcttgtcagcttaaggagattttgggctgagacgatggggttttctaaatatacaatcatgtcatctgcaaacagggacaatttgacttcctcttttccaattgaataccctttatttctttctcttgcctgattgccctggccagaatttccaacactatgttgaataggagtggtgagagagagcatccttgtcttgtaccgattttcaaagggagtgcttctagtttttgcccattcagtatgatactggctgtgggtttgtaataaatagctcttattattttgagatatgttgcatcaattcctagtttattgagagtttttagcatgaagggctgttgaatttaatcgaaggccttttctgcatctattgagattatcatgtggtttttgtcattggttctgtttatgtgatggattatgtttattgatttgcatatgttaaaccagccttgcatcccagggatgaagccgagttgattgtggtggataagctttttgatgtgctgctggattcagtttgccagtattttattgagtattttcacatctatgtttattagggatattgatctaaaattttccttttttgttgtgtctctgccaggcctttgtgtcgggatgatgctggccccataaaatgagttagggaggagtccctctttttctattgattggaatagttcagaaggaatggtagcagctcctctttgtacctctggtagaattcggctgtgaatccatctggtcctggacgttttttggttagtaggctattaattattgcctcaatttcagaacctgttattgatctattcagagattcaacttcttcctggtttagtcttgggagggtgtatgtgtccaggaatttatccatttcttctggattttctagtttatttgcatagaggtgtttatagtattctctgatggtagtttgtaattctgtgggatcggcgatgatatcccctttatcattttttgttgcatctatttgattcttctctcttttcttctttattagtcttgctagyggtctctctattttgttgatctttcaaaaaaycagctcctggattcattgattttttgaagagtttttcatgtctctgtctccctcagttctgctctgatctttgttgtttcttgccttctgctagcttttgaatttgtttgctcttgcttctctagttcttttaattgtgatgttagggtgtccattttagatctttcctgctttctcttgtggaatttagtgctgtaaatttccctctacacactgctttaaatgtgtcccagaaattctggtacgatgtgtctttgttctcattggtttcaaagaacatctttatttctgccttcatttcattatttacccagtagtcattcaggagcaggttgttcaatttccatgtagttgtgcagttctgagtgagtttcttaatcctgagattgattgccctgkggtctgagacacagtttgttgtcatttgtgttcttttacatttgttcaggagtgtttcacttccaattatgtggtcaattttagaataagtgtgatgtggtgctgagaaaaaggtatattctgttgatttgggatggagagttctgtagatgtctattaggtctgcttggtgcagagctgaattcaagtcctggatatccttgttaaccttctgtcycgttgatctggctaatattgacagtggggtgttaaagtctccgattattgggagtctaagtctctttgtagatctctaaggacttgctttatgagtctgggtgcttctgtattgggtgcatatatatttaggatagttagctcttcttgttgaattgatccctttaccattcagtaatggccttctttgtctcttttgatctttgttggtttaaagtctgttttatcagagactatgattgcaacccctgcttttttttgctttccatttgcttggtagatcttcctccatcccttttttttgagtctatgtgtgtctctgcacatgagatgggtctcctgaatgcagcacaccaatgggtcttgactctttatccagtttgccagtctgtgtcttttaactgggggcatttagcccatttacatttaaggttaatattgttatgtgtgaatttgatcctgtcattatgatgttagctggttattttgcccgttaattgatgcagttacttcatagcattgatgatctgtataatttggcatgtttttgcagtggctggtaccggtgtttctttccatgtttagtgcttccttcaggagctcttgtaaggcaggcctggtggagacaaaatctctcagcatttgcttgtctgtaaaggattttatttctccttcgcttatgaagcttagtttgtctggatatgaaattctgggttgaaaattcttttctttaagaatgttgaatattgaaccccactcttttctggtttgtggggtttctgccgagagatcccctgttagtctgatgggcttcccttcgtgggtaacccgacctttctctctggctgcccttaacattttttccttcatttcaaccttggtgaatctgacaattatgtgtcttggggttcctcttcttgaggagtatctttgtggtgttctctgaatttcctggatttgaatgttggcctgccttgctaggttgtggaagttctcctggataatatcctgaagagtgttttctaacttggttccattctccccatcactttcaggtacaacaatcaaacatagatttggtcttttcacatagtcccatatttcttggaggcttttttcatttctttttactcttttttctctaatcttgtctcctcgctctgttttattaatttatcttgaatcactgatatcctttcttccacttgattgaatcggctattgaagcttgtgcatgcatcacgaagttctcatgctrtggttttcagctccatcaggtcatttaaggtcttctctacactgtttattctagttagccattcgcctgaccttttttcaaggttttttgctttcttgcattgggttagaacatgctcctttagctcggagaagtttgattactgaccttttgaagcctacttctgtcaactcgtcaaactcgttctccatccagttttgttccattgctggcaaggatctgctatcctttggaggagaagaggcagtctggtttttggaattttcagcttttgtgttctggtttctccccatttttgtggttttatttacctttggtctttgatgttggtgacctacagatggggttttggtgtggatgtcctttttgttgatgttgatgctattcctttctgtttattagttttccttctaacagtcaggcctctcaactgtaggtctgttggagtttgctagaggtccacttcagaacctatttgcctgggtatcaccaggggaggctgcagaacagcaaatattgctgcttggtccttcctctggatgcttcgtcccagaggggcacccgcctgtatgaggtgtctgtcggcccctactgggaggtgtctcccagtcaggctacacgggtcagggacccacttgaggaggcagtctgtccgttctcagagctcaaactccgtgctgggagaatcactgctctcttccgagctgttagacagggacatttaagtctgcagaagttgtctgctgccttttgttcagctatgccctgcccacagaggtggcgtctagcgaggcggtaggccttgctgagctgcggtgggctctgcccagttcgagcttcctggctggtttgtttacctattcaagcctcaacaatggtggatgcccctccccctgctgggctgcagtgttgcaggtggatctcagactgctgcgctagcattgagcaaggctctgtgggcgtgggacccaccaagccaggcacaggagggaatctcctggtctgccagttgctgagactgtgggaaaagtgcagtatttggacgagagtgtaccattcctccaggtacagtctgtcacggcttcccttgcttaggaaagggaaattccccaaccccttgtgcttcccaggtgaggcgacaccctgccctgcttcagctcaccctccatgggctgcacccactgtccaaccagtcccaatgagatgaaccaggtacctcaattggaaatgcagaaatcacctgtcttctgcrtcaaccttgctaggtgctgcagactggagctgttcctatttggccatcttggaaggaacccatcttatatctccaaatggtgcgtttgtaacaatgcatttctcagaacatatatctctgtcattaagcgacacgtggctgtacagtaggtatgagtagatgcacaggcatctatctttgcctgatgattcacctgcctaacaccaatttactcttcataagttggctcaaatattatgagaagtcctccctgacgctccagacagtttttccccttacctcataccctttcttggagtgaattagtcttttctccttctagattttgtgatagcatattttgcatttatatcacaatgtatcaaaatagatggtttttctgttctttcatactctgagctcctagagagcagaaaccgtggtcatgtttatgaatccatagcacctttcatagagtgtgatatataataggcacttggtaaatgtttaaatgaaatcagtgagttaccatgtaccttcactatttttcttcataatgtactttcttctttctttccaggtccccaaacttcatactctacttcaatagtcctgtaactggtctttctacttttattttgtagttcctctgtagtagcctgtacactaatgtcagattagtgaaattccatattttggaatagctgtataaaaactttcaatatcttcccattatctaaagaataatttaaagttcaccagtaaggacttgagatccttaatactatgttcgcagaatataccatgtttatttcaaatttggtttacctactcacctgactttattcaacaagtatctgagcacctgccttttgtaaggctttataaaagaagaaagtttactaaatatgatatatcctcattatctttgtgttcacttttggtacctcatttcgctttacwaattcatttcattactgaagaaaatagtctttggagaatactcagccatattcatatttaagcaagaagttccattttagaataaaacatgactaatataatgaagtttaggataggtggcaagccattcagcacaatgtctgcctcataatacaagtacagtatatgtttaaactgaattaattctgtttaaatctttaaagatagaaatgtaggtttatgttgataacaaagaaagttattgatttattgttttaagcctttggaaacctgtctcttagtttatggtagctcaactgttaacatttcaactttgcgtgctatatgttatttatagtggtagcactttaaaacacaaaatcagaacatatttaagaattctatattacacgttttcaaaattttttttttatattctctttataggttatatgtaaagtcagatgtgccactgaacttgacagacacaagtaagttttatgagtatctaaatttctatctaaaagatctaaagcattaattcattaatattaaggcttagtatctaaaagatctaattttttttaatagtagacttctcgtggtagaagggagtggttgttgagggcrccttcacagttttatagaaaaccaagttgttagattggttcaaaggaatcaaattgagtagcccacatttctctcccttcagccatacagctgactaattttttgtttttttgctgctctgtccctgcttcaaatgttagatctaacttcatagggtccacttttgccaaagttagattatgctgtttggagtgagaatgttccatgaaataggtaatatttcagtactgatcaatctcaatagcgagagtgctaagctgtggagtcaggagattggggtttccaacccaattttcccactaacttgctgactgtgcaattcatgtaccctctactagtttctaaactactctaattatctggatatgtaggtgatttcaagatcctttttgggtttcaaactatgtaattactgtttttattatttaatctgagagaacttcaaaatacaaccttttaaaactaaaatctttttgctttgcatgtacactaagcagttttgtttgcttgttacagattgcacattaccttcaatttacctygtttaaaccatttccaaaggcagctactttctgatttccactattgaaatgacccaatatatcaggaagccagataaatttcagcatcatatgtatttaatttggaagtataaatgtgtttgaactgggattacgttcgtgcagatagttgttactgctacttgatacacatagcagccttaactgaagagttcttatgaggtagcctaaattttcttagggggaagagatwaaggagttcatgtgcagagttkctcttcatgcacagtaaatatgcaactttttaagaacatgaggtattaatgggtgcttgaagctctacatatactgtccctatgttcttctttagtcaagtttgaaagcattttttgctacaatcagaagttcataaggaatattgtttaaaacatactttaactcttaaaaatttttttttccttttttttttttttttattgatacagtctcrcagtctcacccaggctggagtgcagtggcgctgtyttggctcactgcaacctccatctcctagattcaagtgattcttgtgcctcagcctcctgaatagctgggactacaggcgtgtgccgccatacccagctaatttttgtatttttagtagagatgaggtttctccatgttggccaggctggtctcgaactcctggcctcaagtgatctgcctgcctcggcctcccaaagttctgagattacaggcatgagccgccatgcctggcctaactcttaaaattaatattttaatcaattaaaatttaatyaatatgaatttagatacagtatattaattttcaggcacattgtaaaagcctgataattcttggattggaaaggttaatgtaaatatgcttaatagttataaaaatgaaaaatttgggattacttgaaatagtgttaagatagtcctatcttattcctggtggagaaactgagttcaagtcaacctgagactatttctgaataaatgcttaaaaatctatgccattcataaacatttcaaactgaaggaattcttgtacctaacataacacactaatgcagaattaaatttgatttcttattagttatataaccatctaatatactttttttctttcagaattctactgcatttgggctttataatggcaagcctgctctttttagtggtgaacttgacttgcgcaatgctagttcatggagatgtcccagaaaatcagttgaagtggactgtgtttgttcgagcatyaattaatgatagcctgtttattctttgtgccatctctttagtgtgttacatatgcaaaattacaaaaatgtcatcagctaatgtctacctcgaatcaaaggtaagaatatttcttaaattggcacttgaaaatctaatttcaaattcttaccctactaatcatattttaatggaaagtttatattgctattttattttattttattttattttatttgagacagggtctcgccatattagtcaggctagagtgcaatggctattcacagatgcaatcattgtgcagtacagccttgagcttttgggctcaagtgatcctctgcctcaacctcccaggtagctgggactacaggcatattgcttttttaaaaaatatcctgaatgacagttacactttgagcgtgaaagaataatcactagaaattaaaagttattcagtatttggtccttactaaacaatggtttaaagaaaagaagaaagaatatactaagcatgttgtattttctgtgattctgcattggaggctaatcacatgaaataaatcagaatatatatgaatggatcaaaaatagtctataatataaaatcatgctagcatcttaagattttgcacaataagggtggcagggttagcaatgttaagatgtcatataggtaaaagtggtttttatttgtataaaggttagaaaatgttacttcacccaataatatgaaggctgtatgatatttgaaacaactaattgtgtagcaaaatttataaatgccttgcttctcccttgccttatactttggatcaacaaacagaagccaaatagtagcccattaacaaagaaacatggaagtttctaccattgttgattgaccatgtgattgagtagaaaattgatcatcacagtttatgtgtggcattgggtgtgagggggtagatatgtggatattggggtatgggtatgtacataaatacatttttacaatcacttccacaggagagcttgtcttcttgctttaatttgacatcattgcctattcactaataataagttgagatagtatcttagttaaaatagtcctctgaaatatttttaggcttctatattttcgttatccttaatatagtcctagtaaagtaaggtactataattaaatatatggtaatcaacttgtcctttaaatgtaggcagagattttaattttactttttaaatatatttcagtggaatgctgggggagatattatgtgtgtgtgtgtgtgtgtgtatatatatatagagagagagagagagaagagaagagacaaagaaaatcagactttcaaacttattaatcttacctggaaaattattttattaaatttctagtctagtttgctcctaacatttaaatattttagctaattcaggctttggtttgactgttaaaaataatactgtcactgttacagtccataatcttttggtaggagcaatggcatctttatttagtataataacatcactatagaattcatacctgttgcttgtctagggataaagcayaaatagatgttgaatttcaagtgcttcttctctagatacctagtgtatttctaagtttggttttttactcgctttgaaatagataatactctgaataaaagtcaccaatctgagaagaaaatttcatttactaaatcctccagaattattagaacaccattcccttactatcatatgaaaggtattcacttatttattattatttaaagttttaaatttaaaagctgtatggattcggaattatctaggaatactgcagatatacatgttcagacgtgttcacctatgaaggtagatgacatactagatgatttgtttaatattgtaatgttaagtagttcccagtcttcctaactagattataaacttctgtattcaaagagcatgtcatcttgctttcatgttcttgtataatcactagactcatttttgacttttgacttctataacagtgtacaataatagtcattccttttattcaatcaacaagtgtttattgagcatctacctctttcactttctggggtttttttggttgtttctgtccctctctctctctctccctctcaatacctttgttacgctttcactatcaaactgaccctgtttcttgtctttaagagcatttccttaaagttcagactttggtcttctgtcttcctcttttcattctttcttccttcctttacatgttctgtgacaataagatcctctgtaatttgtctcaaccaatcttaccttccttatttccaaataaaacacagtatgccctctatctctgtattcttaggctgttttattatccaggaacggctttcctctcacacatctctatctgattgttcatgtcttatctaactttaaagacctcacttaatctttcccctttttatgaactcaatttgatcccttctcccccaactctaaaataaaatttagaaataactcactatctgaattatcttaaaattttatttatttctcttggggcacttatcagtttatacaaagtggcatttgtatgtgccatctaatttttttgtattttttaattgacgtcatatttagttgtacatatttttggggtacatgtgatattttgctacatgtatacaatatgtaataatcaaatcagggtaattgggatatcatcacctcaaacatttatatttttgtattggaacattacagttctttctagttattttgaaacatataataaattgttattaactataatttccataatgtactatcaaatacttactcttatctaactgtatttttgtactcatcaaccaacttctcttcatcctcccctaccactcttccttttccagcctctagtaaccattattctactctacctccatgagatccacttttgtagctcccacatgtgagtgagaacatgtagtatatttgtctttctgtgcctggcttatttcacttaacataatgaactccaggtccatccacgttgtttcaaatgacaggatttcattctttttatgcccatgtaatagtccattgtatacatgtaccacatttttttattcattcatctgttgatggacacttaggttgattccatatcttggctattatgaatagtgctacaataaatatgggagtgcacctgtctctttgacatagtaatttcctttctcttggatatctacccagcagtgagatttctggatcatatggtagttctayttttagtttttcaaggaacttccatactgctttttggggttgtttgtttgtttttgagatggagtcttgctctttcgctgaggctggagtacaagtggcgcactcttggttcgctgcaacttctgcctcccaggttcaagtaattctcctgcctcagcctcccgagtagctgggattacaggtgcctgacaccacgcctggctaaattttttttgtgttattagtagagacggggtttcaccatgttggccgggctggtctcaacctcctgacctcaagtaatccaccctcctcagcctcccaaagtgctgggattacagatgggagccactgtgcccagcctcatactgtttttcataacggttgtcctactttacattcccatcaacagtgtacaggcattcccctttctctgcatctctgccagcacttgattttttgtctttttgataataaccattctaactatagtgagatgataacccattgtggttttgatttgcatttccctgatgattgatgttgaattttttcatttaactgttggccatttgtatgtctgcttttgtagagatgtctattcaggtatgttgcccatttttaatttgattatctatctttttgctattgattgtttgagttccttatatattctggttattaatcccttgttgaatggataacttgtaaatatttactcccattctataggttgtcacttcactttgttaattgtttcctttgctttgcaggagctttttagcctgatgtaatcccatttgtctattattactttggttgcctatgcttttgaggccttacccaaaaaatatttgcccagatgaaggtcctggagcatttccccagtgttttcttctagtactttcatagtttcaggtcttaaatttatgttttaaatccatttttgtagatggtgagagatggggcttttttttttttcttgagacagagtctagctctgtctgtcacccagactctagtgcagtgttgtgatcctggctcactacaacctccacctcccaggttcaagcgattctycagcctcagcctcccatgtagctggaattacaggtgctcaccaccacgcctggctaatttttttgtatttttagtagagatggggttttgccgtgttggccaggctgctcttaaactcctgatctcaggtgatccacctgccttggcctcccaaagtgccaggattacaggcatgagccatcgcgcacagccaaaatggggctgtttaattcctctgcatatggataaccagttttcccagcaccatttattgagattgtgacttcccccagtgtatgttctgggcatctttgtcaaaaataagttggctataagtgtgtggatttatttctgagttctgtgttctattccactggtctgtgtgtctgtttttatgccagtaccatgctgttttggatactatagctttgcagtataatttaaaatcaaatattgtgatgcytccaacttcattctttttacttaggattgctttagctattcagggtcttttgtggttccatataattttaggacttttcttctatttctttgaagaatgtaattgctattttgacagatatttcattgaatctgtagatcactttgggtagtatagaaattttcacaatattgattctttcaattartgagcatgggatgtctttccattttttgtgtcctcttcaatttctttcttcactatttcatgkttttcattatagagatcttttacttcttaggtttaatttattcctggatattttttggtagctcttgtaaatgagattgatttcttgatttctttttcagattgatcactgttaacatatagaaacactactgatttctgtatgttgattttgtatccttcaattttactgatcatttatcagttctaatagttctttgtggaatctttaagtttttcaaaatatgagatcatataatctgtaacaaggattaatttgacttcttcctttctagtctggatgccctttatttctttctcttgcctaattgctctggcttagacttccagtactatgttgtgtaaaagtggtgaaagtgggcatccttatgttgttccagattttagtggaaaggctttcaatttttccccattcaatatagtattagttgtgtgtttgtcatatttagactttatcttgctgaggtatgttctgtaccctatttttttayggcttttatcatgaaaggatgttgaattttactgaatgctttttaagcatctattgaaatgaacatgtggtttttgttcttcattctgttgctgcgatatatcacatttgttgatttgtgtacattgagccttccttgcatccctgggatgaatcaatttgatcatggcaaatgatcttttcaatgtgttgttgaattctgtttgccagtattttgtcaaggatgtttgcatctattttcatcagagatgttggcctgtagagttttttgttgtttgtctcttttcctgtttttggcatcagagggtaatgctagcctcatagaatgattttggaaatgttcccgctccttcaattttttgaaattgtttgagcagaattggtattagttcttctttaaactttcagtagaatttagctgtgaagccataaggtcctgtgctttttctttgttgggggactttattactgttttaatactgttactcattattgatgtattcaggttttcttcgttattcagtcatggtaggttatatgtgttcaggaacttatccatttcttccaggttttctaatttgttggcatgtagttcgtaatagtctctaatgatttcttgtatttctgtggtatctgttataatgtttccttttctttttcttttttattttacatgaatagtgcttttatttattaattaaatttgtttatttactttgagacagtgtcttgctgtgtcacccaggctggagtgggcaatggtgtgatctcagctcactacagcctggacctcccaggctcaagtgatcctcccacctcagactcccagggctgggactacaggcatgtgccaccacacccagccaattttttaaattttttgtagacagaatctatgttgtccaggctgctaatgtttctcttttcatccttagttttaattatttgagtcttctctttttgttagtctagctaagtttgttgatttattttttcaaaaaacaaactttttgttttgttcctcttttgtatttttttaagtctcaatttcatttatttctgctttaatcttcattatttctttccttctactaattttggctttggcttgctcttgcttttctgtttccttgagatacattattagattgtttatttgtctttctatttttttgatggaggcatttacttctataaacttccctcttgctgctgcatttgctgtatcctatagtttctggtatgttgtgtttccatttttgtttttctcaagaaattttttaatttccttaacttattcgttgagccattgatcgttcaggaacatgttatttaatttccatgtatttttacagtttcagaagttcctcctgttactgatttctagtcttgctctgttgcagccagaaaagatattgatatgatttgactttgtttaattaatttgttgagacttgttttctggcctaacatgtggtctattctggagaatgttttaggtactgatgagaaaaatgtgcattctgcagcagttggatgaaatgttttatggatgtctgttagggctagttggcttagagtataatttatctccaatgtttctttgttgattttccacctggatgatctgtccgttgctaaaagtgaggtgttgaagtcccctactgctactgtattgcagtttatctctccctttagctttgctaatattaatatttgcttcatatatttgggtgttcttggtgttggatgtatatatatttattgttgtcatgtcttcttgctcagttgactgacacctttgtataatgacgtttgtgtctttttacaatttttgacttaaagtctattttatctggccaagtgcagtggttcatgcctgtaatcccagcactttaggaagccaaggtgggcagatggcttggctcaggagttcaagaccagcctggccaacatggcaaaaccccgtctctagtaaaaatacaaaaattagctgggcatggtggcgcatgcctgtaatcccagctgcttgggaggctgaggcacaagaatcgcttgagcacaggaggtggaggttgcagtgagctgagatcacaccactgcactccagcctgggcagcagagcgagactctgtctcaaaaaaaaaaaaagaaaaagacaaggtctattttatctgatatgaatatagctcttcctactcctttttggtttccatttgcatggaatatctttttccatcccctcactttcagtgtattgtgtctttacaggtgaagtgattttcctgtaggcaacatatagttagatcatgttttttaatccattttgccactctgtatcttttaattagacagtttaatccatttacactaaatgttactattgatatgtcaggatttactgccatttttgcttcttttctaactcctctcttcctttcttccttttttactgtcttcttttgtggttaagtgatttctctggcagtatgttttaatctattgctttttatttttagtgtatctgttatagatttttgctttgtggttaccatgaggcttacaaaaaatattctgtagttaacaacaagttacttaagattgataacaactttgatcacaaaaagaagagaaaacaaagaacactgtacacattagctccattctcttccccacattttgaacgtttgatgkcacaatttgcatttttatattgcctgtctcttggtaaattgtagtcattatttttaatacttctgtcttttagtcttcttagtaaatatataagtggtttatgcatcatgattataatattagtgtaacaatcatgttaacagtctttttcctgtggtttaaaaaaattccctttagcatttattgtaggacagctctggtgataaattcccagtttttgtttgtgaaagtctctctttcacttctaaataatagctttgctagatagagtattcttagaaggctttttttttttccatcagcactctgaatatatcatcccattcactcctggcccgtaatgtttctgctgagaagtctgctgccaggtgtattggatctttcctaaatgttatttgcatctttactcttgctgctttcaggatcttctctttgtctttcacctttgggagtttgattatatgtcttagagtatctttacttggactgactctgattggtgacctttgactttcctgtacctggatatttgtatctttctccaggtttgggaagttttctgttattatttcttcaaataaactttctacccctgtctttctcagttccctacctaactccaacaccccaaatatttgcttttttatgttggcccacagattcataagctttcttcatttcttttttttcttttttctcccctgtgtattttcagctagtctgttttcaagctcactgattgttctgtttaaccaattctgctgttgctccctattacatctttcatttcattcagtgtattttcagctcctgagtttctgtttgattgtttttattatttcaatctctatattaaatttctttgatatattcctcatttgagtctctgtgatttcctgaagttcattgaccttccttaaaacagctatttaaaattctttgagagatctcacatctccatcactttggggtaagtggcaccttattttatccatttgatgaggtcatatttctctgaatgttcttgatgcttgtggaagtatgacggtgtctacacaccaaggggttacatttttattttagttttcacagtctggctttgtttatgcctggccttcttcagagggccttccagggattctaaacagactgacttgtgtttcctgagcctgtgtctactgcagttgtctcagcactggaggacgctctaagcctaggcttgctccatgtcttgtgagggctcggaagttgatgccaatttctggcccagatggatctggggaagacacaaggaaggtaccggggctgggtgggaatgctggccagggacccaagtccagaaaactgtcccagtggcccagatgggtgtgcctcccagcaggtatttacacaggagtaggtggagcttaagagacaaaggcagtatgacttcaatggcatgtaagacctggcctttgactatttttgtgattcccctaccactatcactctcctcttccttttctagccacattggctttttgtgccccaacttctcaccgcaaaacatacactaagtttattccagccatatagactttgtattgtatatattgttccctctgcctaaattgcattttctacaggtacctatgtgatggcttctttgcattcaggcctcagtcgctttttcaaagttgctcttcttcactacccaaataagactatcccccattctgattactacatctgtcaccctcttttgttatcttcacagcatttatcagtagccaaaattatttattcatttattttcttagttattttctgcttctccctgctaaagtataaaccaggaaaggagctctcttatttgtgttattcatttttcagtccttttctaaaataatgcctggcatattttagtgaagtgaagacaagggtagtctccccttatctgcggtttcctttccacgatttcagttactgcagtcaacctcagtctgaaaataggtgagtacagtacaataaaatatattgagagagagatgaccacattcacataccttttattacagcattttgttataattattccatttattactattttgttaatttcttactatgcctgatttataaattaaattttattataggtatgtatggataagaaaaaaagtagtacatatcgggtttggtactatccatagtttcaggtatccacttagggttttggaacaaataccctatgggtaaggaggggacgactgtagtagatgttcggtaaatatttgttgaataaatacattctatgcttgcatatagtcttagccagagcagctttactttagtaaccaaataagccttcacaactgggttgtatcaagagcaaattgaaccaataaacatgcccaagttcacatagttgaaccaggattcaaactcaagtctgaccataggtctctgctagtaaccaccatgcattgactccatttacatcaccctgtgtttacttataatcttttaggtgtgtatttttatataggttttaatttacatggatatgtttgtttgcttattaataacattatttcacataaattcttattggattttgccataatactctccaaaagaataaatcattttataatgctatcattaatataaaagtataccttgtttcctctgctccatcaatatttgggtctaaattttatttattttggttttttcattgatatgccttaaaagttttaatttagatttatctaattgttatgcatttataattcatgtagataattattcacatttctatatgtataaactatttctcaatgatttgtagagtggaatctgggaatttattctttatatctttggcatgtgtgatttctgtttatattaaaatgttatcttttttaagaatgatagccttcgtaagtctaatgtgtacctagttatgaatagatatttaatcttattaaattcttgttaattactttatattgctacagttttccttttctatttattatacaaatatagtaaattgtttgactagatttttgtcatattccttgaattttaaggatacaacctccttttgttattttttgttatttttttaattttggtattttcattgttatattatttaaaatgttattaaacctacacttgaagtaaaattaaccaactttttttgactttttagtatcttttcaggtttcaggatataaatgtatttatttcaaataaattgtacactacatagtacaaagtagtaataactcaaggtctagagttatattgctggatttaaatcagagatctgccatttatcagctctatgactttaacctctctgtccacctttaaactgaagataaagtatagtaatcatgtccatagtggtgttgcaaggatgaaataataatgtatggaaagtcatagtatattacgtggcactaaaaatataaatgttgactcgctatcatcttcatcatcatattttgacatagtttatagaataggcttgttcttacaaaacttggaaaaatcctttcattacccatttggcagaatgttgttctttggtaaacttttttggttttcttttgtttttcactgttatttgtctgttaactggttttatttctaccagacttgctgttttatagttttatgggcagttagccatattatccttactaaaaatgtattttttctgattattaaaacttggcaatatgaaagaatatgatttctttaatgttctaaacagccgtagtgtcaccactgacacttaactgtatttggaactcagtgtaaatgtaaatataattttataccctgcttttccccttatactagtaaaggattttctcatgctattaaaaattmtttttaaggctgcataacatttcatcatataccaaaattaattcttatcctactgataggcctttaagtggttttcaaaaaagaatgtcagcctccataatgttaattttcttcaaaatcagttttgttttgctttttatttttagtaagagttagaggttttagtaattacatctagaactgtgtatcccagcctcagtttacagagcactcacgtatcttttatgttatgatttgcattacttttttttcttgatagagacacattctcactgtgtcacccaggctggaatgtagtggcgcaattatagcttactgtaacctcaaactcctgggcttatgtaattctcctacctcagcctcccaagtagctagaactgcgagcattcaccaccacactcagctttttttttttttttttctttggagagaacaagtcttgctatgttgcccaggctgctctcaaactcctggcctcagatgatcctgtcatcttggccttccaaagtactgggattacaagcatgagccatggtactcagcccattattattttttttaattcttagaaaattttttatttttaatttttgtgggtgattataaggtatatatgtatggggtatataaaatatttttgggccaggcgcagtggctcacgcctgttgtaatcccagcaccttgggaggccaaggcgggtggatcacgaggtcaggagatcaagaccatcctggctaacacggtgaaaccctgtctctactaaaaatacaaaaaatttgcccggcatggtggcgggtgcctgtagtcccagctaatcgggaggctgaggcaggagaacggtgtgaacccaggaggcggagcttgcagtgagctgagatcatgccactgcacctccagcctgggggacagagtgagactccacctcaaaaaaaaaaaaaaaaagatatttctgatacaggcatgagaagcataataattacattatggaaaatgcaatatccatcccctcaagcatttatcctttgtgttacaaacaattcaattatacccttttagttattttagaatacacaattaaattattatccatagtcaccctgttgtgctatcaactaggtcttattaattctttctaactactttttgtacccattaaccatccccacttctccccaacccctccactacccttcccaacctctggtaaccatccttctactctctatctccatgagttcaattgttctgatttttagctccaacaaataagtgagaacatgcgatgtttgtctttctgtgcctggcatattttatttaacatgatgatctccagttccatgttgttgcagattacaggatctcattctttcttatggctgaatagtactccattgtgtgtaagtaccacatttctttacccattcatgtgttgatggacacttaggttgcttgcaaatcttggctgtttggacagtgctggctgcaacagacatgggagtgcagatatctctttgatatactgatttcctttcttttgggtatatacccagcrgtgggattgctggattgtatggtagctctgtttttagttttttgaggagcctccaaaccattctccatagtggttgtactaatttacattcccaccaacagtgtccaaggttcccttttcctcacaaccttaccagtatttgttattgcctgttttttgaatgaaagcccatttcactgggatgagatgatacctcattatagttttgatttgtatttctctgatgttaaatgatgttgagcactttttcttttttttttttttgagacagagtcccactctgtcaccgcaggctggagtgcagtggcatgatctcagctccccgcagcctcaacctcctgggctcaatcagtcctcccacttcagcctccctattagctggtaccgtaggcatgcaccaccacacctggctaatttttgtactttctgtagagatagggtttcaccatgtcgcccaggctggtctcaaactcctgagctcaagcaatctgcccacctcggccttccaaattgctgggattacaggtgtgagccatgagcactttttcatattcttgttcgccattcataagtcttcttttgagaaatatcttttcaaagcttttgaccatttttattttattttcctttttttgaaacagtgacactctgttgactaggctagagtgcagtggtgcaatcacagctcactgcagcctcaacctcctgggcccaggtgatcctcctgcctcagcttcctgagtggctgggactacaggcatgtgccaccatgcccgactaattttttatattttgtagagacggggtctcgctatgttacccaggctggccttgaactcttggtcttaagctatccttctgactcaacctcccaaagcattgggattacaggcatgagccaccatgcccagctgcccatttttaaatcagattattaaattttttttcctatagagtttgagttcctcatatattctggttattaatcccttgtcagatgagtagtttgcaaatgtttttttccattctgtgggttgtctcttcactttcttaactgtttcctttgctgcacagaagctttttaactcgataggatccaatccatccatttttgctttggttgcttgcgcttgtggagtactactcaagaaacttttgcccagaccaatgtcttggagagtttccccaagtagtagtagtttcataatttgaggtcttagatttaagtgtttaattcgttttgatttaatttttgcatgtagcaagagataagggtacagtttcattcttctgcatatgtatatccagttttctgagcaccatttattgaagaaactaccttttccccagtgtatgttcttggcacctttgtcaaaaatgagttcactataggtgtgtggattggtttctgggttctctattctgtcctactggtttatgtgtctgtttttatgtcagtatcatgctgtttaggttactaaagctctgtagtataatttgaagtcaagtaatatgattgctcgagttttgttctttttgctcaggatgtctttggctattctgggtcttttgtggttccatatacattttagggttttttttttttttggtcatttctgtgaagaatctcattggcattttaatagggattgcattgaatctgtagattgctttgggtagtatggacattttaacaatattgattcttccaatccatgaacatgaaatatctttccatttatttggtgtcctcttcagttcctttaatcagtgctttatagttttcattgtagagatctttcacttcttcggttgacttaatgtttagatatttaattttatttgtggctattataaatgagattactggtttgatttctttttcacattgttgactgttggcatgtagaaatgccactgatttgtgaatgttgatttttgtatcctgctattttttaatttgtatttattaagcaactgaaacagtgctgtgatttgattctttttcagtatagcactctcacttgctttttaaatactagttattgtaaatttgaatagtttatttctactctttcatttttttattttctcacatatttaaggttgctactttcttccatgtcaatgtccttgtatagacatttaattcattttttgtaaactaatacaggtatttagagcaatatgttttctcaagtactgccttggcacctttctataatcttgtaatattatagcaaaagtcattatttaacaaaaatcaagaaaatttctgtttggatttcagccctgtctcaaacattgcatatttacacatcagtatgagttggaaactatctctagttataagtcttccttcagctcaccttgggaaaaaaagcctaaaattcacacatatgttctcttttttgtttgtttgtttgtttgtttgttttgagacagggtcttgccctgtcacctaggctggagtgcagtggcccaatctcagctcactgcaacctctgcctcctgggttcaagggattctcatgtgttatccccacaagtagctggaattacaggcatgagccaccacgcccaggctaatttttgtattgtaagtacagatgggtttcaccaygttggccaggcttgtctcaaattcctggcctcatgtgatccgcctgcctcagcctcccaaagtactgcagttacaggcgtgaggcactgcccccagccatgttaggttcctcgtcttccacatgaaattataaattttactctttgcttgattgtccatgcatggaatctgacctactaaataatatagaatttctgtattccaggttcttgttagagaaaataaactctcaactgttaaattcagaagtttagttgccagaaagatgacctgaaggatgtgcattccatttacccacctattccattttwtgctcagcccaatccagatcattgaagttttgtaccaagactgcattgtatcctgggtagagtcgtcttttctgacctccactttgacaccatactttggcctacagcaacatatttgtaaaatttcttgtaaggaaagtttattttaaagccataattgtataatgttgttgaggatattgtctatacagtgtctccagaaaagatattttgcccagattcagtacctaaaaactggtattggttaaatccttctttcctctggctgctatgttcagaggcaaatatgtggctcacctctgtcagccatggtgatcttatgatatctatttttggtactggctctacctctaggttcatctcagtttcttacccaccattccctcacacacacacacatatatttccatatttatttttattttctgtatatctctgtaattgcttcaaattctcttgtgcagtgagagtggtataaataaaaaatagaatcaaatatactttatatttcttttgtcaggtatatcaatttgaaattaatatggaaaggccttagagagagtgtattaagtgattaaaagatggaaactggccgggcgcgggggctcacacctgtaatcccagcaccttaggaggctgaggcaggtggatcacttgaggtcaggagttcaagaccagcctagccaacatggtgaaaccctgtytctactaaaaatacaaaagtcagctgggcatggtggcacatgcctgtaataccagctacttgggaggctgaggcaggagmattgcttgaacccaggaggtggagtttgcagtgagccgagattgtaccaccgcactccagcctgggcaacagagcgagagtccttctcaaacaaacaaacaaacaaacaaaaagatggaaatttaggatcagagagataaggatgtaaatcccagctctactgtttattggctgtgtgaccttagtcaaattgcagcatctttaagcttcactttcctgatctgcaaaatggagataatgatagtgctctcatgggttgctatgaggataagagctgtccataccttataaggttgttgtaaggattaaattaaaaaatacataaaatgcttggtatattgcctaccactaaaaaattgcttataaatgttatttattatggtattaatgtaattaggggatggtaatctaacttcacagagttcctgaacacctgaaaatgttggcaaaatttgactggagaggggtcttgtataatgatcaaatctcaaaaggaacagtcactgaaaaaaaggaataagaattactgaagaacaggattccccttttgaatattttaactttgcttgactctacatgatttatatcctactctactttttggtaagagttgacctgtctgatagattacattttatctactacttaagtagtttttctgagaaatttttggaacaaatatgaaatagcctttttgatgggcatttttgttctgaaatctcatcttttactccaatctcagttttgttttgtttgcattgacatgatagactggatactgtcttttaactttttgtctattgctaacattttaagtgtgcctcactaacttaggcaaagttttatggagtttaattatgaatgagcacccctttttatagggtaactcaaatagtttccatttattaccatgattgtcagtatttgtctttttctctctcattaagtttttttgttgctgtttgatttgccttcatttgtagaatttctagggcacatttactttttatcagaattataactttttatcagttataaatcaatgaagtaaatatgctttttatcagaattataacttttaacattaaaacgcatgctaatagaattatttttattctaacattattttccatttcagaaaaaataagaacagttataagaatatagaagacatattactttcaaaggacaaaataactcgtcagcataaaaaggttcaaaccagctagatgcttagtccccgagatagcaagttgggattctttgtctgaaagaccaatcaaagaatgggtaggaataaaagtaagcttttaggcttatatatctggccagggacatgtacaattttatatctggataagggtataaaaggaatcattggtactcaagatcagcttgtctgccagcccaatcagccatttgcaaataatacattttctcactccctcctgtatttctaacagttttaattactgtataaacctttctgttctgtgttcactcaatccttgatccttactatttaacatattgggatgggagacagcatcagcctttttcagagacacagtaacattcaatcaaatatttcttatctttcatacaaggcaactaattctatacagctaacgcaatggtttatggtaacttaggccataattaaagaaacaggctaaaatattattaatatctctcttccagcaccttgaaataccacttaactagaatttggagagagtgatggtagaaaaatacagaccgcattatcccctgtaatatagataggattgccaccttcctaatattttaatatttaatatcctaatattataatttctcccttgagttactgggatttactttatccctcttaagctatagagcttctttagtttgctgccctagctactgcagttgttgtactgcaagtcttatttcctattctgttgctgagctgacccaccacaccttgtcccatttgaaagatccttgcttacacttaggtttatatctcttatcttctcctaagcctaagtagttttctccctgcttctagacccttttactctatgagctagcattttcagaattttttaatttttccatggccagatagcccacccagtaaaagccatccactccataatgtcagggtcataggagccagagattgagtttcattgtgacttagcagcatgaaactgtttgtgaaactgtgtaggccttataattatcaagacatgtttttaaatttattaattaattctactttgttttcttgtttttaatgctgaggttggcattttaatttcaaaatggaaatagtatttgtaagattatttgaaaaaaaatacatgcacgattctatgtctggtaatggctaagattgctcctaatggaccaactttccacagatagcaatcataaattctggacaaagtgtaaaaaagcactgaaggcaatggagaacaaccacttagaagaagaaaatgacactgagtgagtttcctgttttttacagcttctagcctgagagaaggtcccatccatggggcagccaaaactggaagagaaatccactgttttactggcttgaaaaatcagragataaaattgtagtcactactgcagatgtaaagtgagtaggaaatctcaggaagaagataccagatagaagaagacccatactcttattataaagtctgtcaaaattttatctgatacctgaactacacatgtgaaagacaggctccaaacagcacagttaaagataaagaaatttaactgagatttcagctgaccaacgtatgggggacagagtttgggatttcagttcagccaagttaattgtttgctaaaataattaaaaatcaacatctttcagaacataatagcagaatccagactctaaaatatgtcactcacaatgtccaggtcaaggttacaaatatatgaagaaacaggaaatacatactcaagagcaaaaaccaaaactcaaaaggcaatgaagacaaccccaccaccaccaagataacctaaattttggatttatcagacaaagcatttataatatgctcaagggcttgaaggaaaatacacttggataaataaataggaaatctcaagagaaataaaaactattaaaaaaaccaaatggaaattctagaatttaaaaatatagtatttaaaataaatgtcactagttgtgcttaacagcagcatattggagatgaaggaagagtcagttcacttaaagataaatcaataaaaagtatccaatctaaagaacagaggaaagtggggaaagcctgtaataaaacagacagaagctcaggagtctaattatgtgtaattatcatccccaaagggaaagaggaagaacatgaagttggaaaaaatatttgaaaaaataatgacctaaactttccaattttggtgaaagacrtaaattataaatttatgtctttcaagcttagcaaacccaatcaggataaatatgaagaaaattttgtctagggtcattacagttaaagtgctgcaaactaaaaagaataagaaaatcttgaaaacagagaaaaataaattatagaattacataaagggacatcaatgtaaatgatgactcacttctcatcagaaataatgaaggccagaagacacggaaacggtattttttaaatgccaaaagaaaaaagctgtcaactctgaaatacaaatccagtgaagatattattaaagaacagtggagaaataaaaacatttccagaaaaaagaaaactaaggggattacttaccagcatacctaacactgtaagaaatgccaagaaaattctacagactgaaaagaaataaaaccagcttgaatttcagctcttcaagaaggaatgaagaacatgagaaatagtaaatatgtgggtaaatatgatttttaacttctttaaaatatgattatgcaaaacaaaaatcacgtaatattgtgaggtttacatatgtatacgtaatatataattctctgtgtattatatataacaaccatagcataaaggagaggttgtaaatggatctatacagttgcaaagttctaacatttatatcaaatgataggatattaactactatctagactgtgagaagttaaggatatattttataatccctagagcaatggttctcaaattttttggcctcaagaccccatcacactcctaaaaattattgatgatgccagagagcttttgtttgtgtatattatatctattaatacaaatcatactataaataaaaaattaagagattataaaaatatccatttattaatttatttaaaataaatccattacattctaacaaataacatgttttataaaaaaatttttataaaacaaaataatactgagaagattggcattgttttacattttgcaaatctctttaatatctgacttaatagaagacagctagatttttatgtctgcttctgcattcaatctattgtggtatgttgtttaggttgaagcatatgaagaaaatccatcctcacacatatatatagttggaaatggaggagaattttaatagacttttcagataattgtggatatcttctttaatactacaccaaaactcagaagtggaggtttcttaaaggttagttgccatgtggaatataaaaccatattggtgaactttttgtcctctccattggtcaatcttgcatttgaatcattttgtaacatcgcgcattaatcatttggaaaagaatggtcctagatcttcaaaatgttgatacatttcattagacaatattcaaaagcatgtgttaattatcagaccatctcattagaaaagtcttttagttttaagaagctgttaatcttacagtacaagtatgtacaagtttctaaaaattacaattttcacttaaragcttacattttatcattggaaataaatgctgccagatgttttcattgaagtgatacactcattttatttatttttgaaaaaaaatatgcccagtagccaagtccaaataaccattgtttgtctgccagagttgtctgtcaggtaaaaaatggtgttctatgaaaaaaagtggttagatccactaacaagtcaatcacgtaagtgcttttcctcaatacagctgctgtacttgagtgtgcagcagaattactttaagggcacatctcatcacatagaatgttaaatacacatgtactctagggtttatatttaatataaattatattttcagtgcttcaccaaagacattcttcaatgaaactgactttctttttttaagtacaagtgcatggtagtgaagaatatagtcactgccggtacagttcattgccaccgtcttgatttgtgctaaggcccaataattttacacacaattggtctagcacagataatgaatttatcaacacagttggcccaggataaacaatcagaaaagttattcaacactttgattattttggtaccacttgtgtttcctatcaggcgttgacataaaagaatattttcttggatgattagttggtgctgacaccatataaatgcaacaaaataagccctgccacatctgtacattcattcatttgtaagacaaaaatgtgtttgtagacaaaacattaamttaatctttacattttcagttaaatccttaaatcagtgaatttctgtataattggaaatggcaatgccatggttcttttataaactttccatccagcaggcattcagcaatgtcaattatataaggctatactagtttctaagctattgtgtactttattggccaatgcgatataataacttagcctttaaaatgcttcagtgagtggccatttcctttctagtctggaaagttataaaaacaatatttggtgtttaaagcattcatgatacctacatctaaaatttgaattccttttgctttaaactctgaatgattggtctcaaagtgatgctgcagcttaacttggaccatgaaactattcaaaaatgttctgttacagaagacacaataaggtaaattattaacatttataaagcttactgaaagaggcttcataatattttttcataatattttcataatattttttccttatttatagtttcactcagttcatttgacgtagattcctctcttcattgagtcagagaactgtctatcactttcatctttctcagcatcttagaggtaaacagggacgttggatgttgggaaaattatagtgctaaaatatataacacaaaatttaccattttaaccattattaagcatagtcagtgtcaagtatagttcattatcattaagtacattcatattgttgtgcagctgtgactactgttcattttcagaatgtttttctcatcccatactgaaattctgtatccactaagcaacaattcccccatttctaagctaatgatccattcttaaatatgaaaatatatataattttttattttaaagtaaaatattctaaaatcagttttatttctaattaaatttttttaagtttttgaagaaaattcttaaatattgtaaaataaatcttcatggtatacgtattcttgtgtttccatgtaggtgtgagcacaattctaaataacccatgggtaaaaaaaaaaaaaagaaagaacaagggacattagaaaagatttcaaactgaaggataatgaaataaaatatatcaaaatttgtggaatgcagtaaaaattgtacttgaagggaaaagcacagatttaaataatatattagaacataaggatataaaatgagtgactcaagtttctcccttakaaatggtagtgggagtgtgtggagtaggaaaaagtaagcccaaagtaagtaatagaactgaaatagtccaggcatggtggctttgggaggctgaggcagacagacagtttgaactcaggattttgagagcagcctgagcaatatgatgaaacctcatctctacaaaaaatacaaaaattagccggtgtggtggtatgcacctgtagtcccagctgctcaggaggctgaagtgggaggatagccggagcctgggaggcagaggttgcagtgagccgagatcatgccactgcactccatccaacgcaacagagccatatgctgtctcaaaaaaaaaaaaaactgaaataataaagataaaaatagaaatcaatgaaataggaaacaaaaaatggagaaattaaagccaaaagttgattcttgaatacatcagtcaatttgatctacaggaaaacagtgaaaatacaaattgccaatgttatgaatgaaagagggactatcactaaacatcttacagacattaaaagacaagaggatatatgaacaacactttgctggtaaatttgagaactgagatgaaatggacaaattcttttaaatatacaactataaattgatagaagatgaaattgtattttatcttagattttgtaatctaagtagacccatatttattaaagaaattaaagttattatcagaaatttctcaaaactgcagctccagatgatttcactggttaattcatcaaatatttaaagaagaaacaacaccaatagtatacaaactcttagaaaatagaggagggggctggacacggtggctcacacctgtaatcccagggcttcgggaagccgaggcgggtggatcacaaggtcaggagttcaagaccagcctgaccaatatggtaaaaccccatctctactaaaaatgcaaaaatgagccaggcgtggtggcgcgcacctgtactcgcttctactcgggagactgaggcaggagaatcgcttgaacccaggaagtggaggttgcagtgagccaagattgcactactgcactccagcctgggtgacagagtgagactccatcccaaaaaaaaaaaaaagaaaaagaaaagaaaatagaggagggaagaacacatcttttttttttttttttttttttttttttttttttttttttgagacggagtcttgctgtgtcacccaggctggagtgcagtggcgtgatctcggctcactgcaatctccgcctcccaggttcacatcattctcctgcctcagcctcccgagcagctgggactacaggcacccgccaccatgcccggctaattttttgtatttttagtagagacgggttttcaccgtgttagccaggatggtctcgatctcctgatcttgtgatccacctacctcggcctcccaaagtgctggaattacaggcgtgagccactgcgcccggccagaagaacacttgttagaccaggttttatgagaccagcattacctgatgccaaagcttgacaaagatagagtggcagccctctgtattcacaggtcstacatccgtggattcaactaaccttgaattgaaaatattaaataaatacaaagtaacaatacaacaataaaaataatacaacttaaaaaacaatacagaataacaactatttacatatcatttttcacagtattcagtattataaataatcgagatgatttaatgtatacagtaggatgtgcacattatatgtaaaactataccattttatgtaagggacttgaatatctgtggagtttggtatccacaggaggtcttgggaccaatccatggatactgacagatggctgtacattaacacttacagactagtgtccctaatacttagagataaaatctaatcaacatataaaaagcataatttattgtgtccaagagatgtttatcctaggaatgcagcgagaatcagtgtcattcactacattaaaacaaaagagaaaaaccacataatcatttcaataaacaatgaaaaggcatttgactaaatttggtacccttcatgattaaaaaaaaaaaacctctcagctaatagtagaagaaaaggaaagtacttcaatatcataaaaggcatctactaaaaaacctaaaattaatgtcatacttaaatattgaatgttctccccctaagattggaaacaaagcaaggatgtcagctctcaccatttttattcaatattccaataagacaagaaaaagatacaaaaggtaaacaatgggaattaagaagtaaaactgtctctaattgcagataacaattgtttaaggagaacatcttaaggcatctactaaacaactagaataaatgactttagcaagttctcagaataggtcaaaatacaaacaaattgtatttttatatataacaggaataatcaactggaaaataaaatttaaatgaacaacaccatttacaatagtagctcaaaaaaaagatatttaggaataaattttccaaaaagcaagcaatatctgtatactgaaaactacaaaatactgctaagaaaaaccaaagaagacctaaaattagtgaagagatataccatgttcgtggattagaagatgcagtatcattaagatggcaattctcccctaatgaatctgtaaattcaatgcaaaccaaatcataattttaccatgcttttttttaaaaaaggaaattgggctggaggtgatggcttacacctgtaatcccagcactttgggaggccttggtgggaggatcactttggcttaggagttcaagaccagccttggcaatgtagtgagatgctatttctacaaaaaattttaaaattagccagacatggtggtgtgcacctgtagtcctagctaactggggaggtgaggtaggaggatcccttgagcccaggaagtcaaggctgcagtgagctttgatcacaccaaagcacttcagtctgggtgacagagtgaaatcctgtctcaaagataagtaaaaatttaaaaattgaaattgacaggttggcaaactcaccaagtggtatacagcttttcacatgtcaatcatacctcaataaagtggtttaaaaagaagacaarttgattccaaaatttgcacgacaatgcagatgatctaaatatttaaagtgtgctgtctgggcagtgcggtggctcacgtctgtaatcccagcactttgggaggccgaggtgggtggatcacaaggtcaggagatgagaccatcctggccaacgtggtgaaaccccatctctactaaaaatacaaaaattagctggtcatggtggcacgtgcctgtaatcccagctactcaggatcctgaggcaggagaatcgcttgaacctgggaggtggaggttgcaatgagccaagatcacaccactgcactccagcctggcgacagagcaagactccgtctcaaaaaatatatgtatattaaaaataaaaaataaartagtgctttcctatggaattttctgtgttaatgaaaatattctttagctgtaccattcagtatgatagctagccaaatgtgacttaaaaagtggctagagcaacaagaactgtttaggaacttttagtttaatttaaatgtaaatactctcatgtggctagtggctattgtgttgaacagtgcagaaagtaaccctgaaaatgaaagggattcatactacattatgytgaaacttagtataaagctacaataattaagacagcgtgctactgacatgagaaagacagattagtagaacagaatgagagcttagaaatcaatctacacttaatgtggtttattgatttttgacaaagatggtaaagcaatccaataccacaaggaattttttaaactagtggtgctgaagcaactcgatatccatatggaataaaatgaacctccaactccatttcataccatacacaaaaattaattcaaaatggaacatagacctaaatgtaaatgaaacaagtgaaaagcttccaaaaraaaacagggtagttgcagcagatttcttagaggggcaataaaaagtaaccatgaaaaaaataagttgataaattagaaataattaaaatttaaaatttctcatcaggctgggcatggtggctcatgcctgtaatcccagcactttgggaggccaaggtggtcagatcgcttgaggtcaggagttcaagaccagcctggccaacatggtaaaactccgtctctactaaaaatacaaaaatttgccaggtgtggtggcaggcacctgtaatcccagctactcgggaggctgaggcaggagaatcacttgaacccggtagacagaggctgcagtgggccaagattgcaccactgcactccagcctggatgacagagggagactgtctcaaaaataaaaaagaagttaaaattcttatcaaaggcaagactgagaaaatgcaaagacaggccacagacttaaagaaaatgtttgcgatacgtatatctgacaagagttgattgtcagcatatataaagatctcctacaactcattgatttaataagacaacccaatttggaagtggtcaaaagatttgaatagattcttcacaaagaagatatacaaatggccaataacacaatattattagtcatctgggaaatgcaaattaaaaccaaaatgagacatcacatcttccagcatggctaaaaagattgacagtcccaaatgaggcctagaattggacagtttggtggaaaaactgaaactctcacactttgttggaagtataaaattgtacatccattttgggaaaagatttgtcaatttcttacacagctgaacttaacgaccaccatatgacccagcaattccgctcttaggtagttacccaaaagaggtgaaaacatatccacaaaactatttgtacaagaatattcaaagactctatctaactgtcatataaacaaactcatataatcagaaagtggaattagtgtgatttactttctcaattttcctgggtctcagttttctaggatgtgggacttcaggtgctaaaaccagaaaacccctaagcaaatcaggaagagttggtcactgtaattatcctctcagcaataaaaacaactaactcctgatagatacatccaaaaacaaggatgaatctcagaaacattctgcagagtgaatgaaacatacaagagttcatattctatggtgccacttacatgaacttctagagcaggtagaactaagttgtaaaaaccaaagcaggggagcatttgtgttttgggtttggttgatggaaggggtgtgagggaactttctggaatgatgatgttctgtattttggtggagatttgggttacatgtgtgtatacatttgtcaaaactcaatgactagtaggttaaggtgtctgcatatctgcgttctaaaagtatctgtaaacactattgaactccaatgttatggatactgaggtgtttaggagtgaggtgtaactctttttcacttatcaagtgtggaatttctttaaaagtggtatgtaggtgtcagagaccgggaaaggaaaatcattccttgagaatttctcctgagttgaattgcttgttctgactctattttaggaaggttttcttcgactttcgataacactttctatgtcgctggatccttatttttcattttgtaatcctgtattttgtgggggtgaatcttttgttttccaaatcaatgggtgtctttcattgttttatgtatgtaatttgactagaggttgttttgtttgttgtattaattcggcattattgcttctttgctcttttctcacaatctttttttaaaagcttctatagtatttacaaatttaaacagtttctctgtattatagcatgtttctgacagttgtcatatttcccaaagcagtgcatataaacttttgcagttatttttgaggatggtaattcttacagcatcctgttttcttgttcttgtttccttacttttctttaataatacattacttctaaaattggatctggattggtttagattaacttttattaactttttttggattcacaaaaataaaatagcatattktagaaaattttagccttaatttttaagttttgccagttttattttcacacatactttttgtgatggtagtgtgttagctcaaagaaggtgctctgttactatcccagcatctttcagggtatcttttatcttttagttctttcttttcatatacctctaaaatgaattgttctgaggaagtcagttataataatggttctcaaccccgcaagagccccgcaagacccagtgcagttctaataacaaacatttttaattacctgtttctaccctgaaattaatggatttttaacctacctacacacataaaattcagtgtaattgccttaattgtaacataaagaggaaataaaaggagagcaattaataaatatttcaacatgttacttttagagcatgatgtaatagatgtttgtgtttagacacagaaaccatgaatggggcagctataaatgcagactattacaggtgtgttgcattggtcacttgtataccacaagcartattgctgtcaatgtcatgattttctgaaatatttgaacaactgataaaattctgaagaaaacaaagcacaaatttccttcaatttacacattctatgtgtttgtggaaatttgggcctctatttaaactatgtaaatatatacttcgtttatattcaaaacggaattaggttctgactcagataattataaacaggtgtttcatcttcatgactgtccaggaggacattagaaagttatcaaggccagaggacagttagcttaggtggaggattctcctgtgacttgcaagtcatctagcatccctggacgttgtgcactaaatgccataattgccccttaatcattgtgacaaccaaacacaaacttccaaaacactatactgggtgtttctgtgcaatggaactctttggcaaggatgtcacagagtaatttttttaatgcataaaataaaatacataggattgcaaagaaaatggattgtatggaaatacagaccccaggttaagaatctctgcaagaggtgactaccacacccttctccaatatacacactccagttgagaaccactaagttggaagggctttttatgttgagggaaatggtgaaagccatagtcttaaaattttaaggatttgaaagtacatatgggtgcccagaacatttgccatcaacactgtagcatcaataggggactaacaagcactctgtaatagaatctaaaagaatgaaagcaaatagcataggaactctatttctattctaattttgtatcagaaattaagtgtatcaaatgaactaatgcttctattttccattcttttctcattatgactaaactacctctttgattaacatcaattaaagttcagatcttttgccaacttgtttattcatatattacaaggcaaccttggcagaacaaaatctttctccagctgctatttggcaagttggcaaaaaaaaaaaaaaaacttacacatattaaacacaagcagttctaggaataggaattgaaaagcaagataatcaagagtttatttcaacaggtactcagtgctttgtaggagtgcattgcaagaggtgaccatattgtatgtacatgaatagcttgtygtgacaaatgtgtagaatactaaagatgatgatttttatttgttttagggtatgtctctgtgccagactgtcrtcgtgggctctgtagtcattcttctstactcttccagagcttgttataatttggtggtggtcaccatatctcaggatacattagaaagtccatttaattatggctgggataatctttcagataaggtaaatamctaccacgtattgccagtctaacaatgtgataattaacttaccctcatctagaagaacactgtagtgtttgacttacaaacacatttatggaatctctgtctactgtcagtaatcatacttaaagctttgtgtttaaaaatctttatgtacgtgtgacatttgaaatcattcttcacagagaacttctctcaaaggagtattttctctctcttttttggtaaataataatagtgccacaagcctctcggtcatatgctaattttacttatttttgttaatgatgatgtttaaatatttctagataaatgaattccctattattagccagtgaatatggtctttgttaggaggaaagtaactctcccctacccaagaactacatatactcttaatatttggttcaggttaacatgtttaaataatggctttcataaaaatctggctttgtcagtcttgataatgggagagcattcgtagttccttgggtgtccaggtatttgctatcgtaattcccagtactctaactacgcatatttaacttcctagcattcccatatgcttcctaaacatacattttgacatagctatatgtcatatctttatagtaatttagctttgtactgaatttaagggttccgggaatactatttttcatttacctttctaaagtgaaggaattttcacatgtggttccttgtggcagattctattcactcctttttccatttccctcttccaacatctgatagaacagaaacaaatttaatatgtagattaggtccaaaagcatattttaagtagagctgagctgagtgacttaacatgttacatttttctataggtgtaattagggtaagtgctgttattttgcctatggagcagctggaacagtaatgtctttaaaagtcactctctttagattatggggcctaaataggagatcactccttattatccatatattaaaattgtcataaactgatacattgaaaaaattaactgctttttattttttgtagcttcaaagcattttatgtcctttaaaggataagtgtcatttcatgagaaaccacaaaatatagaaagttttagagtttatgtgcttgtagttgatatattttatcttacctgacttgaaacaagttaactgtggaggtgattgcttatacaataaacagatgtaaaaattctctgccatgctctatttacaggctcatgtagaagacataagtggagaagagtatatagtatttggaatggtcctctttctgtgggaacatgtgccagcatggtcggtggtactgtttttccgggcacagagattaaaccagaatttggtatgatataatattccccaatgcctgttctyctatttttaaaaattatggaacatttatattgattttctatttttggcaaaggttaagactaaaaattattatagattctagcctcctttcttagtggaaaagtaaaaccttcatatgctatctaatactttgttcacaggcacctgctggcatgataaatagtcacagttatagttccagagcttactttttygacaatccaagacgatatgatagtgatgatgacctgccaagactgggaagttcaagagaaggaaggtagatgtaacaaagccacttagcctgaattactattgaaattgattgaaaaaaacaaatctaagctttaaccaaaatatgaaaaaaggtgatttrgtggtaatatgtcaataaataagatcggcaatactggagtttaaagcagtagatgttaaacccagggtgggacctgcattatcaggaactaccatttgactcaaagcctatatgccttttggctaaaatggtaccatttcatttcgggatcacttgttggttcagagctgtttgtgggagggggatgcacaaggaagaaatactattatagtgattatatgtctgtttccatatctttagtgctggtcaaaatccagagaaaccctagataaaactcttgggaagcttaattgccataggaaatgttcccatgccctccttgttacaaaaccatttcaagtccgtaactagtacactattgactgtgattcgggcaaagaggaaagcttaatggctgaagccatgaagcataatggcttcagcttgatatgacattttctgtaatcctaacttcatctgggcaagttatataacctcagttttttgaacctgcttttcatctgtaagacagggataatagaacctatttcagaggtttgttgtgagaaatgaatgtatatgtgtgtctgcatacatacatacatacatacatagatgtcttagaatagagctgagtacataaggactacattgttgtcatctgacaatcaagttctaccagttctgagtggcatttattcattcttttgtaacatactgcgatatagaatccaggatattagataaaagtcattaaatttgtagaaaagcattttgttatttgacaaagaacatatttcaatgtatttgagygctaactttattacaaaattcattgaaartgctaaaaattcaaatgtgacttcttatatcctgatcatagtcctatggtctttttgccttttttttgttgcagtttaccaaattcgcaaagtttgggctggtatggcaccatgactgggtgtggcagcagcagttacacagtcactccccacctgaatggacctatgacagatactgctcctttgctctttacttgtagtaatttagatttgaacaatcatcatagcttatatgtgacaccacaaaactgacagcatcaccaagtcatgattcttgagttgtttttcataaatgtgtatattcaatgtgtttaaattccatctacataaacattccattatctgttgcaactgaaaacaaaatctggaagtgtggctgtgtttggtaaataacacagctattatttttgacctcttcatagtaaaatgaagtaaaatggaaagtttggagtaggagaaaagagagattagatcttaaggcacttgatggcctccaaaaatcctgactttggaacatcaaatgcatatgtgcacttttatctttgttctgagtcactgcagtccccaaagtcatatgccaatgttcacactgaaatactgtattgtacaccaaactggaaggcaattttcctatgaaaatcaaagccggtatattcattggtatgctctatacagatatcttaataaaaattttatagtgtgaacagtgcacagagttaaggcataaaaatgtatcattctttataaaaatctactgaaaatgtgtaatcattgaagacagttcttttaagcatgattttaaaatagcaactgaaattcaatcattttaaacaaatgatggtagtaatccattagttatggccagcagtgttctttggagagccacaataatttcaagaggaaaatataccagtgaaaattgtgtggctattttgagtagaattggtcagttgattattttgtgtaattgagatatatgtagtagtttaagcatgattcttgaagaaagcaatagtgacttttgcatagggagattttggtagaaacttcttgggactaaacaagtttagagatgcatttaagaattattcacaaaatgtgtmattctaaattaaaacataaatatattttcaaaagcatttgatttctctgaagcatgatatagctggtcttacctagtgaatcaggattgtcctcaggtaaatgaaatcatgatacattattgcagtgaactcaagtgcaatactttgtaagacatataattcctatgattttcacatttttatatcttatatatgggaaaagccaaattaaattgaattcagattaattccagcattagactaaatgagcaaacttaagtaaatgtacaaactaggtaagtataaaaccacaggttaacaatattggagtacttttagaattacattaaaactgtcttaaatgtcctatcccaaatctaaaaaaaaagaaaatggcaggctgagataatacagaattttaaaatgcactttgtaccagtgtctatatggaaagaagtagatgctgaatacctcaagatgccaagggaacaagcaacattgggaagttgtcacaacatgctcaaagacaaactacaattgtctgctagctatttcttcagaactggaactaatacgactatccttttctgttttatactttgattagaatgttatttcctcgcttacttaaaatgtacttcaactttttaacaactgatacaataacttcataaaagtataacactaggttgaaaccttaaggaaaaattgaaattgttaatgctttcgatcttttgggaggccagtacacagacaaataaatttcttctttttatgatacaaaatgactttgtattcaatcagaagcatatacttatgttattttgggtttgtttataattctctcattgtaaccaaattattttaaaatgtatagtataaaaagttacccgtggtattaagtgacaaaagcgtacttttattacaactccagttgttagattgcttctcagaatgctaactgtttattttgctaataatgttaggcatctaatcatctagagctgtccaaaaagatatgttgtctttgttaatccttggggttcaaggtgataaagtttttctagtaaggctcccctcgataatgttcctatttgaccaaactaacaaagattactttttaaaaatttttcagataaaataacttggttctttctgctgcattagttgattgttccaaatttgaggtttgtaagtttattcttatcactgactagggtacccaaattcttgcatttgtctccttatacacatctaacatatcaccaaagacaaataaagatacactctggcccaatctttgcttaaaaattccaaagcactaggagcactttaagtttggtctcgaaaggagttgtttataaaatcaaagggctaccgattccctgttcatcctgcactgaagcacatgatgacagtatcaaaccttcatttttgttcattaaaaagtgaatttcattacttaagtgtgtaattctatagtgattagcagtatttgttttcatcatttcacttgggtggccattaattttgaaacctttaccactcattgtagttggttgtagttttatggaaaatgtaatttatagctaaagtggcttttttatgcatagctgccttttttattgtttaacagtgtttctcagctatataatcagtttcaaactggttgtaaaagtatagctgtggccaatgaatgtatttatttgttgtttcactaaattgtaacaaaacactactattaaaaataaaagtgtttgtgcttttatttagagttctggttttcttcatctcttataatggactatactgagtttctatcatataagaataagaacatagtgctaccacaaaaaaaaaaaaaatcaggagttacaaatgatagttcgcctttagtgatctcataattacttacatctggatgtcatattgctccacatacaccagtttgacatgaagtgccatgcagtttaaaatgccaatacgttattagatagtacaacatttttatttttattttttaagggtttttttttaatactttaagttttagggtacatgtgcacaatgtgcaggttagttacatatgtatacatgtgccatgctggtgtgctgcacccattaactcatcatttagcattaggtatatctcctaaagctatccctcccccctccccccaccccacaacagtccccagagtgtgatgttccccttcctgtgtccatgtgttctcattgttcaattcccacctatgagtgagaacatgcagtgtttggttttttgttcttgcgatagtttactgagaatgattatttccaatttcatccatgtccctacaaaggacatgaactcatcattttttatggctgcatagtattccatggtgtatatgtgccacattttcttaatccagtctatcattgttggacatttgggttgcttccaagtctttgctattgtggatagtgccgcattaaatgtacgtgtgcatgtgtctttatagcagcatgatttatagtcctttgggtatatacccagtaatgggatggctgggtcaaatggtatttctagttctagatccctgaggaatcgccacactgacttccacaatggttgaactagtttacagtcccaccaacagtgtaaaagtgttcctatttctccacatcctctccagcacctgttgtttcctgactttttaatgattgccattctaactggtgtgagatggtgtctcattgtggttttgatttgcatttctctgatggccagtgatggtgagcattttttcatgtgttttttggctgcataaatgtcttcttttgagaagtgtctgttcatgtccttcacccactttttgatggggttgtttgtttttttcttgtaaatttgtttgagttcattgtagattctggatattagcctttgtcagatgagtaggttgcgaaaattttctcccattttgtaggttgcctgttcactctgatggtagtttcttttgctgtgcagaagctctttagtttaattagatcccatttgtcaattttggcttttgttgccattgcttttggtgttttagacatgaagtccttgcccatgcctatgtcctgaatggtaatgcctaggttttcttctagggtttttatggttttgggtctaacgtttaagtctttaatccatcttgaattaatttttgtataaggtgtaaggaagggagccattttcagctttctacatatggctagccagttttcccagcaccatttattaaatagggaatccttttcccattgcttgtttttctcaggtttgtcaaagatcagatagttgtagatatgcggcgttatttctgagggctctgttctgttccattgatctatatctctggacctcttcaaggagaactacaaaccactgctcaatgaaataaaagaggatccaaacaaatggaagaacattccatgctcatgggtaggaagaatcaatatcatgaaaatggccatactgcccaaggtaatttatagattcaatgccatccccatcaagctaccaatgtctttcttcacagaattggaaaaaactactttaaagttcatatggaaccaaaaaagagcccgcatcgccaagtcaatcctaagccaaaagaacaaagctggaggcatcacgctacctgacttcaaactatactacaaggctacagtaaccaaaacagcatggtactggtaccaacatttttatttattcaaacattaagctaagaaaaattgttgtatgaaataatttataacacttctccccttcccttcagaatcttaaacaggaatccatttatctaccttataatcctaggaaggtattatttgattattcaagaaattcctcaatgatgctgccttttcccatgaaagaagttcctttttttccccgaatagacccctttcatgacccaccaaaaaccacaccaaatcttgaatacaatttcagctttattgaccccctaaagtctacaaatccttgggactctactgacccttgctgtaaagtgaagggagtgaaagtatttggaatataggtaggacctctaatataataaagatgtcactttaaaatcaatttattcaacaaacatttattaaacattcatatgccaaaaactatgctatggagatgcaaaaaataaaaaggttccttttcctgcccttaaggagctcacattctagtaaagacttttgaaaaataaaacaatacagtacgatttaagtgacatacaatagaggtaggttgtaattacagtggtgacacgaaagtggaagttagatgactctccttgagtggagcaaaggaggtttcacagaggaaatgcttatgtcaggcctgcaagatgcataggaattttccaagtggggaaggatgactagcacacttgatgcaaagagtacagcatttaccaaggcgggaggcctggccaaatgtggcttctgaagaagtgtaagtctgtttcaccagaacattcggtggaggaaacacatcagaagaccttgtacaccaaacagaggagtttggctttctcctgaaagttcctgaagtcactgaaggatattagggagtaacactgtcagagtgcttctagaaagcctgctgtggtaacattgagcaacagagaggagaccagctaggtataggaggcaggttagtactgtaggtatttattaataatagcaatgaagatgaaagagtgatgtatcagagaggtggagataaaatcagtaaaacttagacactaaatgataggggaaggtggaggagaggaatgagcctagaaaacttagaatataatggttctaaaattaaccaaagtaagggacacaggcattagagtaggttttgcagagaatgaatgttttaagacacacacaggtgtctctgggacaaccaagaaaagtgcaacaggcagatggattgaggagtctggctaaagataaggatttaggaactgctgaattaaaattacccaagcgtgagaagtggtgttgtgattaagagagaaaaaaaaaatggaggtctgaggaataacatttaaggaataaatgaagaggccaaaaggtggggggtggttcaggagtgagcaaaatgtaagaagtcaagggaataaatctttaaagtaggggttgtcaaaaatgtcaaatacagaaaaaaagtcaagtactagcttgtgaattaaactgtggatttagaattaagattttagactttacaggaagggactgttaaccagagagccaaatggcagattttagttaaggagccagtagaaggtgacaaagtagaggtaagaatattccttcaaaaagattggcagctaaaaaaaaaagaggccgggcgtggtggctcacgcctgtaatcccagcactttgggaggtcgaggtgggtggatcacgaggtcaggagatcgagaccatcctggctaacacggtgaaacactgcctctactaaaaatacaaaaaaaaaaaaaaaaaaattagccgggcgtggtggcgggcgcctgtagtcccagctactcagggggctgaggcagaagaatggcgtgaacctggaaggcagagcttgcagtgagctaagatcacgccactgcactccaacctgggcgacacagcaagactccgtctccaaaaaataaaaataaaaaaaggaagggaagcataagatgagagagagggacacacaaaaaatggccatttgaacccacactgtatttatattttatatagagtgatcacttcatagtcttttgagtctccaagaggattgacttaattaatggtttaatgtctttcctttcctgccttagagaaaaaggaagtgacagagaaaaataggacaaattattaaacttacttctgtgattattcatttaaaatatactgaatacatatgcatacattcatccaacaaatatttattggataccaagtatgtgcttggcactgtaccaggccttagggacacagaagaagaagtatacagcagtgtaaactgacatttcttaaccactatataaataaaccccactttactactaatgtgacatttcaacatgttatacctgataagacatatgtaaagagggcacgattttgaggtatatagcttctttttctctacaattaccatgtgatataaattcctaaaccccttcaaatagctttataaatgaagagcttccactaatgaaaacctcccaaaattacagttcagttttagggagacaaaggaaatgaacttcgggtataaaaaacaaaaatgaaactgggtatggtggcagacacctgtattcccagctacttgggaggctgaggtgggaagatcacttcagcccagtcgttcaagttccagcttgggcaacacagcaaaaccttgtctctaaaaaaaattttaataaaataaatagcctaccctattactatacacatcaagcataaaacgggcaacaaaactcaaaaagaactttagattggaacttgaaagtattatttattctaaggcttacagtattatagttccagaattgtgggagtttttttttctgagaaaatcatttttagtaattattcagtattacacactgaagtatttagggtttaaggggcatgatgcctataactgactttcaaatgattgaggaaaaatttgtgtgtgtgtgtgtgtgtacagagaaagcatgaaagataaagcacgtatgaacaattagtgaatctgggtaagagagctctttgtactatttttgaaacttttctgtaaattggaaattatataaaaataaaaagtgttccccaaattttatttagtattagtgaaagtattatgagaataaatatataatctattcaacttttcacaatgtttagaaatctcctgtgcctttgagttgttattgtacgtttctacacacaaaaacaacccaatcaaaatagcaatatacttctaaaagtgatttgtttcataccaatgtattttaggattgccagataaaatacaagactcccagttaaatttgaatttcaaacaaataattttttagtataagtattttccaaatattccatgtaaaatattaaaaaactaattgtttatctgaaattcaaatctaactgggcaatctttatttttatttgctaaatccagcaaccctaaatgtactgaaaaattctacgttggtaattatgggtcatttatgaggcctccttagcattttcctattaaatgcttgtcacatttaccatagttttatttatattacatattattacataaaacgctagtttgagagacttagaacattcacttttatcatatatgaatttgataatcctccttttattcaatattaaactttaaaatttgtaccacattattaaagtattacttttactcacagtagtattatacatagacttaacacaatttttaaaaatgtgtttacttaaaacaatataattctcctttacaaaagcaactttatataaaatgtttggcttaagactgtcattgctattatgcctttgaatgaaattccactctttcgcctccattgtccagaaacaggcacatatcagcttgttttctttaatgaatattctgtaacaagttcctgaagttttctaattctttcacacttgtagaaattctgtaaccaaaaaatatttcactcagaaaccatcttagataaattttatctgtaaaagttattcactttgcattttaaaacattttt

SEQ ID NO: 96630 - DNA, 22480 bp, Homo sapiens
gctttgcaatattctaactctgggaccttcggtgagttaattaacctctctgtgtctgtctcctgatctgtaagaaaggaggataataatattaacaatctcatagggttgctatgagtaacaaatgagtcagcacatgcaaaacatgtagcacagtgcctggcacagaaagaacactgaaaggattctttgtttttatcttcatacaggccactgcctatccattatattccctgccttttcaccataaggaacaattcctctaggctgagaattgcttttttctggtattacgtgttagattgtaaatactggtgacacataaggattacaaacatttaatcttgttttgtgttaatatttgtttatgaaagacaccattaaaacagagggtggaggaaatcggaagaggtcagagaagagcaaaagaggaacagtgtgttgggtgtggtccctgagtgctatcaagtagaggcttctctgagggcaggtcatgactctctacacagccagagcccacatgtagacacacagtaccctgggttggggaggaggacagggaattgggcacccagggaggcaaagggagagactgaagacccactttgccaagcatcagctccagagtcaagtgaggaagcctctggaggaagctctggtctgagctgtgctacacattaattagatggtctcggcaagttgctttatgtttctggactttgatggttcattgttcagttggatgcaaccccttttctaccttcctcatggggttatttgcacaaggatctgctacaccgaattctgcaatttcttggctattgagcaacagagacaaatggttaaaaaataaagccatatatgaaaaatcgaaatgaggcatatctggcctcatactgcctcttgccatctctgttctgtgctgtgtgcctgtgcacgggctctctctatcactgatgctctctttctctctcactctttctcatgcattctctgtctttctcattctctctgattttctctcccccctcattttctctctctgtttcgctttctggcacacacacacacttacacactctcctatacattcacttccttttattttgccttcactaaagatgccaaggttgctacaaaacaaaaagctcagggcagtctagaaaggcagggacccactggtgaggtctccaggtaaatggtgtcctttataaatgttgcaaagcaattgccaagacaaaaagcttcagaacataaaaacgttgtagacaagaaaaataactgatgtgggattttctagatgagaagtaaaggggtctggtgtccaaagtggctgcctctcaagttctgggtcagggccagaatccagtctctggacaccccgtccagtgtctttcacatgatgccatttatactatttaatattctttttatgatgattgtgaatgtgggattggcttagatttgactacaactttctgtaacttgctagaaaaggttcaccttcctgcacccatgcagggtttaaaatggagccacacatccatgaatcaagtttacttaccagaaaattcctccctcagctttggtctgaaggccttgtccaaggccctgatctccttcagctccttctcctccaccaagaggcggatgatcctctaacccagaaaccctcctgctcctgtcacaaggcagctccagcctgtcattgccaatccaatattgcaggaaacactcgccaggaaacagaagatgctggggagcagatctgattctagattgaccctggagagggctgaaaacgagatcaaatggttatatactcacacaaatgctttattttcctccaccccattttttttggcaaaaattccatgtcttcaccattgccagaagtagctaaaagaaaataaagaaactccaactgttagattattaaaaagctggatagaagagtcagagtgctggtcacttcatcccctaaggtagccctggagttctatgttctgtggctcctggctttccccttatcactttgaactcctgccacatactcattgctcctgtctcttccagtatgccttttctcagaagaaaagtgacctttaatgtatatctctaattcttcccaggaacaggaagagaagtccaattgtaaggctgtagtgtggtaaagggtcttaggtttagccttaacaggacactagttggttgattccagttgtctgggatctgcaatctgtgatcttaaactagactgagagaaatctccaagtgtaatgtgaactttgcctttgtgcagtaaatatgtttggagggaaatccacatgagcccattctctcctctctcagagtgtcatttgaaatgctgctgcagtcttgcaaagtttagaaatttgtaatggtgacagctccaattactgttttatggagttgactttctttcccactcaatatatccaaaacctcagttgccattttaccctggagagctctgggttcctagatgaagaacatcattgaaggaaggctgtctagtgatagccacttaattatatggcctgtactgttgctgtcagttactacggcatgaacgaagggggtcaaatgtagaaaggaagacaaagacaaaaggatatgttttaaaacaagaggtcagggggctccttgcttctagtgagcaaaggcagctctgagcttctaaagccctttgtatttatgaggtagaaagagcaggtagggagagataatggttggtcagctgcttgatttatcacaggtacacataattgctttctttatacaacagcttcagaggttcctatagataatcacaaggaacactgcactgggggtgtgacggccttcagcaccccttctggcagcagacatagtttgtcagttttaaaacgtcctgctttcatgagaacagttttctgtttgctcaaatagcctccagtggtatactgagttggtcacgaccctcattctttttggcctgtaacactgtaccacaagagtggggatttgtggttgtatgccccaatgactcttatcatagatgtttgaacttttcccatatttttgggtacaaaaccattctcagcaaatttctgaactgaagatgttgtgaatgctccttgagcctatgccagagaactgcccaaatttcaccaccataagctctccaagacactttcctctatctaaaaaaagaggtgtaatttatattcattaacatgcccagatctcaagtgttcagttcaatgaacattgacagttatatatgtccatgtaagtagcaacccaaaaatgtataggtcattttcgtcactgcagacagttcttttctgcctgttattggctaattccctgccctactcccaatctacctggtaggcaactactttctgatttttattcccacagaattcttattttatccctatattttcttatttattcttctaagatctctgtggttctggatatatatttaaatataaaatcattctgaaatgaatttttgtgcatggagtacagaaggattgaccattgattgtctctattgtttgttcatttttctatttcatgattttctttgtttttattatcagcttatgtttattaacttgggggttgttttactcctttttttcagggttcttattataaaagcatatataattgactttagtcctttgctcatttccactacaggcatttaaagttgtaagtttctctctaagcactgtgtcagctgcagccaacattttgatgcatcgggttatcatcactcagttaatgatgttttgaattttttcttgtgagttcgtctttgacccaagtgaccgataccaacagagtatgtagcttgttttctgaaattgggaatcttctagatatcttattgttttgaatttctaattaaatactactgtggccatagcatatactctgtatgattttgatccttgtgtatatattgagacttgttttatggtgcagcaaaaggtctgtgttggtgaacatcccataaacacttgaaacgaatgctttctgcagttgttggaagtaatattctacaaatgatttgctttgaaaccccactctaggtcttgccctcctcccatgttgaaaacattcaactgctacttgggacctgactaccaatgcttcaaacccacttgcctagaaaaggttggccctgtgctgcaagatgtagcagcttgttctccgatagctacaggccctgggtcttgctgagacatgtggagcactatctgaaccacccaggtgcatcacacacctttgcctgctatagcacatgctagagtgcaccttacagatcccatcacctttcagatggggccagacattccctatgctgttgagagttctggaggctgatagatttcagccagtgtctcttggagtctctgagtggaaccgataaataaaagccctaaagaaagtgagaaattaaacaaagggcaagactgatgggggccacactactaaatttcttttgtttttaaacagctttactgaggtataattgacataacattcgcttgttttaagtgtgcagttaaattattttcagtaaaattttagacttgtgtgaccatcaccatgatcctgttttgcaacatttctatcattcctaagaaatcccctatgttcatcagtcaccaccactttttcccagtccccagctccaggcaacctctaattgactttctgactctacagatttgccttttctggagaccatataaatgaaatcatgcaatatgtggtcttttgtatctgtcttctttcatttactttaatatacttttatggttcatgtatgtggcagcacatatcaatattttaatcctgttaggggacaaatcctattaaattgtatggatagctcccattagtttattcatttatcagttgatacatatttgagtgtttctactttatggacaattatggataaagttgctatgaatattcacattcatgtgttgtgtggacataggtttttttcttctgggtagatagctagaagtgatagtgctaggtcatatggtaaatatatcttcaacattttaagatactgccaaactggtttccaacgtgactgcatgtcccatcaacaatgcgtgagtgttttagtttttccacgtcattatttcacttcccccaggtgttactgtccttttttattatagcattctagtgggtaagaagtggtgtctcactgtagttttgatttgcatgtccctgctgactgatgatgctgaccatcttttcatgtattttattgtctattcctacacctttttgatgaaatggttattcaaatattttgcctattttaaaattgggttatttatctttttgttgcgtagttgtaagtgtatttcatattctggatatgagtcctgtattaaatatatgatttgaattttttttctcagtctctggtttatctcttcattttcttattggtggcttttaaatgccaacatttttagttttgatcctgtttcatttttcaactattttttaaccaggaaaagttgggtttttgcctaattcaagatcatgaatataataatctatgttttcttctaagaggtgtatagtttagcccttaaatttaggcctttattttattttgagggaagttttgcctatgtgtgggttaatggcctaaattcatatggccaattgattttgacaatagcaaattcaatagggaaaaagattgtcttttaaacaggtgacactgagacaactgaattgtccacatgctcagggaatgtcagcctgctatgtcaagtgatgctcacccgagtcaccacctattgacatcagagtgtgtgaagaatttctcaatatgataactatgggttaaataatatgctgtagctttctgcttctcccattcgacagacagccgcatcttcttgtgcagcactagccacatccctgagacaccatggtaagggtgaaggccagagtcaatggatttgtccctattgggtacctggtcaccaggggtacttataactctggtaaagtggatattgtcaccatcaatgaccccttcattgagctcaactacatggtctacatgttccagtatgattccacctatgacaaattccatggcaccatcaaggctgagaacaggaagcttttcataaatagaaatcccaccaccatcctccaaaagctagatcccaccaaaatcaattagggcaaggctggcactaagtacatcatggagtacagtggcatggagtaccatggagaaggctgtggctcacctatagtggagagctaaaagggtcattatctctggcttttctgctcatacccccatgttcgtgatgggtgtgaaccatgagaaatatgacaacagcctcatgatcatcagcaatgcttcttgatgatgttaaaacatgcttcccaccaaatgcttagcaactgtgaccaagatcatccatgacaactctgatatggtggaaggactcatgaccacagtcaatgctatcattgccaccctgaagactgtggatgacccctctgtgaaaatgtggcaagaaaactgcagggctcaaaggaacatcatctttgcatctcctggaactgtcaaggctgtaagcgagtatatcaataagctgcacaggaaactcagtggcatggcattccatgtacctaccaccatcatgttggtcatggacctgacctaccatctggaaaaacctgccaaatatgataacatcaagaaggtggtgaagcaggcatcagagggtccccataagggcatcctttgctacactgagaaccaggttgtctccagcttaaccactgacacccactcttctaccttggatcctggaactggcattgccctcaatgaccatttgttaagctcattttctgatatgaaaatgaatttggctacagcaacagggtggggaacctcatggctcacatggcctccaaggagtaagacctctagaccaccagccccagcgagagcatgagaggaaaagagaggccctcagctgctggggagtccctgccacactcagtcccccaccacactgagaatctccccttctcacagtttccatgcagaccccctgaagagggaggggcctagggaactccatcttgtcatgtaccgtcaataaagtcccttgtctgtgctcagaaaaaaaaaatgctgtattaggaaagctcacaaagattactgatcagaaaaagaatagacagcatgatttctccatcctcctatttaatactgatgcataaatggtcaggaaatgctgggctcacaatgggagtctgcattccagtgtgggagcattagtctcccttgttataattttttattattttaagcacaaggacacagctttatcagtggaggagcacacagkcttttggtgtgaaacagtctagatttaggtgccagctgttcacaagatcatctggaaaaatcaactacccagcacctgaagtccttggggctcaggcaaagggcttcatttttcttasaggagaaagccacccattctacaaggagctgtactaggcacagccccccatgctgggaaaaggaaaattcctctccttggccagcttattaaactcctgggttactttaggatacttacatcccttgtgcttgagtcctagagaggtcaatttggacatgagtagcatagaataagttttaaaggcacaggagtagtttaaataagctagggtaagaatattcatggataatagggaaagtttctggactgaaccctggaatacacatatcaacatttggaagttgaacagagaaggaggggccagctaaatatgctgagtaggagttggtggcaggaaggagaaaaattacaaggagatggccttgtaaaagtcaagtgaagaaagtgttttaagaagagtttggtccactatgtcggatgctgctgacacatcaaatgcaatagtaaaataattgattactggttttggcaaaattgtaagtaatttgtaagagcaatttccacaaatagttgggttgaaagttcaactggaaagtccaacacacaattcatctgcgtgttgaggaacagaagaaaaatgtgaagagagtgactattaaaaacaacacctgttcaagaagttgaaccatgaagatctcagtaaaaaggtgttacagccaatggagtgaagagtttgtttttgttgtgttgtcttaaactggactactcctttattgatccttagcaccttgtacagagcaaatgttcaaacattgttgagtgtttgactaaataaagtgtttatgtctcatacgtctttttattaccgtaagaatttgcacatatgacataataggaacttaacrcatgtttattgaataaaggaatggaaggatgagtgaacaatcaaggactctagaatgtcttagtgcttttgaaagttagtgcttgtggactaatacaaagaaggagatagaagagaacagtgaccacaaaaatgaaaatactagaacgtttcccatactaatgagaggctggaatcattgctcaggccaaagctgtttgccaaggagaagcaaatttcttctcatctatagcacggatatgagtaggatcccaggtgtttgaagtgtacttgaagagccagttttcagaagtaaggaacagtgggccatcccctccaccatgtagggagaactagggccagagcttttgggttatatgagctcagcttggctgtatttccaagcaagaccttcaaagtgagaaaggagaaggctttagcaaaatctctttttaatttcttactgaatcctctgtttgtcaattattttttgaggggggtcagatagatgtcactcaaccatttcctccggagtctgacaatgatggtatggtagccagcctctaagttgagtccagtgatctctgcttcctggtattcattcccttgtgtgtgkgctgaacctagtaacttgcttttaatcagtataatcggacaaaaatgatggaatgttgcttccatgattaggttagaaaagatcatgacttccatcttcttttacacttcctctttctcattgggctggatgaagcaagctgccatgctgaagaggacaatatagtaatgaactgaggtcagccaacagtcaaatgggaactgaggctctcagtccaataatcttcgaggaagtaagttttccaacacytatgtaagtgagcttgaaagtagatatttccccagttgagttttctgatgaaattggaattttgtgccaatcaagaactcttcgtactccaacgtttaagaagaaaaaggtaaactgacatacttttaacaagctgctttcttttcttgggaatttctcttgcattacaaagaacattatcccttcattaaactcagtttgaaaactacgagtggtttagcaaatattagattcactgaagttactaagtgttggtgaagatgtggagagacaggcatgttattcgtggaagtgtaagttaacacaaacatctggtgagtacgtgacaagatattttaaactttcacacccttgacccagcaagttcagccagatatttattttaaggaataatcagttgagattagaccaagaggtcatatgggacatctccttgcacatagaaagctctacatatgagctctaacatattaatcgagccctttactatgtatcaggtgccttacatatattatctcatttagtttttaaaacggactttattttctatgatagttttaacagctaggaggagagaaacagtgtgatgtgatgagtgaagcagagcctattcggcagaggatggtcagggacgtctcacctcactggggcggtgacagttcagctgagatctacatgtcaacagaaagccaaccatgagaacatggggaacatcattttatgtaaagggaatgataaatgtgaagatccagaggcaagaaagtattgcgtgtttacagaattgaaggaaggccaatctggctgggacaccatgagtaaaagagagagtgatgaagacagaagttggaaggatgagatcatgcggtgcccaggagagctggagatcagtttagagtctatagtaaatggaatgggaagccccagaaaggttttatataggtgagacataggatttgagtttacttaaaacatctctcaggctgttgtatggagaacagaatgtggcaagcagcaagagagattatgggaaaagccagtgctgagggtgttcatttagagagagattttttttctctaaccttctttcgttttttgttttttagtgacagggtcttgctctgtcacccagagcactggtgtgcagtggcgcgatcctcaacttcccagaccaagagattctcctaccccagtctcaggagtgtctaggacaacaggtatgcaccaccatggctggctaggcttttaatwaatttttaattctgtagagatggggtctccctatgttgcccagggtggtcttgaaatcttagactcaagtgatcctcctgccttggcctcccagagtgctgggattatagacatgagattttgtgcccagctatctctaactttgatgtgtgtgagcctctgcccagattccaattaaagaaactatacctggtcaccgtggaattcttgaggtttgattagtttaagcgacagattttcttaaccttggagaacttttctgtttgtcttttaaatgtggagagcaattagttgaagtgaagcctaagtacctgtaattttgtagaaactccctgggtgattttaatgggcaaagagggtgagaactctttaggaccaattarggaccccctttctttcttggggattacagkaagtataatacataaggctcaaatcctctcctcccccagaattatggargyaaagggcagtgcaaggtgcatcaggctttgtctgctcctggcaggccacctttcacacaactactccaaatagggaagacaatatcataagtaagagccaggaaaagtgcctgtcttggctgtccatcagatgacaatggaataggtgtggaaggctgctgctggccttcactgtcttcaccactcacagtcagccttcttctgcttctctcagatctttattcccccaactcagctcacttaacaaagcaaaaccccaggcatgacttgttttctcagctgcccttggcaatcacataatttccatcctctctgcccctggtgggaggggaggagcacacttggccagtctccagcatgaattgcctagtgtttgctcctctgtctccctatcacagctgcaagtaccctgtagatagcagttttctgctgccagactgtggttttaaggtcatttctgctaatgcaaagcacattccaatgggtttcaatttccagctgctcctgtgagatccaggccacttttctcagtgctctctgcattcagccagtgccctgccttattctagcagccaggaatgttcagctttggaagccagtgaggtgggtggcaagttgttccatataccacgtttccctctgtttaagaagtttgaaaatggtatcagtgtatgtgcggtgttcaagctggcattctcacgaacatatttgaaggatgttcaacacaagtaaagcaactgacagactcctgttcatggagactagggattcactggaagcagttccatgcagtctttttattcactgaagacactccactgagatgcttttctgaaagcatcaagggctgaggtagggagtggttctgcctgggtgttctgataccatctgtgtatggctggccttccccaggccccaagactgtgactcattaagagcagagactctgggaagttcacccctcagytgagtagacatgttccaggcatagtgctcaatgctggggagacagatatgagagaggtagagatgcttacacattccaacaccatttaagggtgaaggtgaaggctgattttgtttcctgcctgcccaacctgcttggggtgaattattttgccaactgtatgtatgactttaaggatttggcccctggggctgcaggtggtgagaggtggacagggtgaacttcatgtcaaggcttcacatgttatgctagggcaagacggtacattcaacaaaggctcagtgttaagcagattctctgccaaggactttgcaactataagtcagggttcccaccactgctgcaaattaggcaatgtccactgtacctggctttgttgggtgagggaaggaacagtgtgtaaccttggaaaagctaattcactttgtcaaggggctggaaaaggatctggctagacaggcctcttgtcaagggcagcattagctaatgtctgaaatgagggtcacctcaaggtttcacctgaagtagctctgccgatttctgtgttgaagttaatagagttggtagaaatcacagacatgacttcatagcctgagattcactggactgacacagccactgctgagtgttgctgcagcctagaccaagccctataggtattcttgatcttgctctcatctgtgcagtggaaagatgcaggtatgaggtgtggggaaatcaaaccaaatgacaaacacgaaggctcttgtaagattcaggggcttgtgtgaatgttaggaagcaaggtggttaccaggtggttgtgctcagtgctgcagagaaggggctgctgaggggtgtcctaaagtcttgtgtcatagctcctgggagcctagaaggaggagagaggcagttgctgtgcatgtggcctgtgtcctctgggatttccagctcctggggcagggtgatgaggaagtgagaaggcatggcctccctttcctgagaacaggaagaaagaaggaactagttctgcctctcctttgagggtgtgctgtgcgtggagtgtgcagggcagagctttggcattaactggcagtggacttgagcaaggcatgacttttctgggtttctgattcctcttcagtaggcactatctctattggctctgcccacttttgtgtctagtgattttctaagaattttaaaacctacttgggaaacatccacattttaatgtaaagacaaaagtccttatttaagtcatcactaagttttgcagttcagtggtcagcagatatcagggagggagggcatcggccacactttttggccccacttcttgatccttgacaaccctatgagaggtatgatgcccctttcccagtgaggtgccaggtgccactagagccagggaagtgctgggaaaccactttctcaagcgccttcagcttcacgcaaacaaataagcacatggaggcttgtgttattatgaagtttagctgcagaagtgtgcaggtgycagaggatgcaaatcaacttacttttttacagcccaatgtcactggcaacagaccttagaaatgagccataaccttcatttctcaggaaggtaaacagacccaggaaggtgaagagatttgcttaacttcgatggcaaaattgaaatgagaactcaagatttgcacccctcactctcatttgtagaaatattctgtttctaaaatgaaagaatacttgtttctttttgccctcctctccccctttccttagtccctctcacagccagctacttttatttctgtatcatgaaacatctgcctgtctccgttcgtggagcacccacgttcctcaagctgttgttcccatgggaggttgggctgtatgggccagacaaatggcttagctagctgacttctggttaaacctgccctctgccctctttcaaatgtctcccatcccagtttttttaaatcccttcataaatatgttggtagggcaaccttctagttctatgccttcaccccccttttcatcttaaaggtagcaaatcctaggtcactattacagatggtggtctaggtgaacattgggaaagtcatcttgcttcccaggcctcrgtttcctcattggtaaaatgaaataaggaaaggagcccacagttaaaagctggagtaaaggtctctagatccttctttaacttcaatttaataaaaattttagagatgaggtcttgtctggccttgaactcctggattcaagtgatcctcctgcctcagtctcctagtagctggggctataggtgtgcccctccatgcctgaggaagctttctttagctctaaaatctgaactccacaaggacattgatctgccctggaagaaccagggagccttttccatttacccaccataggtcaggcaacaggtgttttgcctgctgctgaaagaagttctcataatcaagactgcctgcatattttacagggatcagtgcaaaatgaaatgtggggtcccatggcagccccttaagccaagcacagggcctgggtgatggcacaggccatgtgcccatggaactgctctgctcagggctacaccagggatttgacagactccagctgatgcaggaaggagttaggtctgggctcatgagaagggtattcctacctcagtggccagggttcatgctaggatgacaatagtcccacagcccacctcatgcccacacctctgtcaccagtatctgtttaggaagaatggctgactttgctagtgctggttcttccatttcttgaggaaagagtccgctgttcaatagggagcttcaggtttccagaacagattactgactgttttggagtctgcaactgaccccagtgccccctgcttttggggacagagtggccaagccactttcttctgttcatctagccttcccccttcacttcctcataatgaacctatttcatgcctcagatcaccgactccattccctgctcattagacttgggtggcatcttggtccatgattaaaaaaaaaaaaaaaaaaaggaaaaaaaatccctccaaattgccaccagagtctcttgatgtctcaagaagaacatgtagccagagatgttgagtgatcctcacttgagttgcctaagagtgtgagattctcttctgaatttaatttttaaaacaaattttctttttcttatagtataaaaatgctctgggccttgtgccatttcaggttttggatttaattcccagtccctttataaccttggcagctgggcttcactttcatcagcctttccatttccctgcttgtaggcctctcacaaccccactcactcttcatatcacacaaatgagttcattctcagctccatacactccgtgcgccttctctttctcctggatctctttatgatgatctagcttcttcaggttcatggacaccttgaaaagtcatctgtgaattctttcttactttgtcattcaaagcattctgctccctgactgtctatcccttcctctctccattctaacagatgagtttacttgtgtttcatccttccatccatccatccctccatcagcccatgtgtctattttgtgtcagtcactggggayagagagatgacatggtgagttactgtcctcaagacacggcagtgtaggggtgcggaacaggatatataaatgaaaaatyagtgagagtgcaactcgatatgcacaagacacagaggctgtaaaatgagacatattggatagtaaataaggagctgggaaggatgtgctggcaggagagctgggcaccctttaagcggaaggaacaccatgcaccggcctgggtggatataaaagcatgctgcatgcaggaagcgctgagtttggaaaattgttgaggcacaaagtaggagaatctggggacagggcagggattggtgagaattagtctggagtgtcaggcagggcccagggcttcagaggccctctatgttctgctaaggctctcaggctcgtcctgacagtcctggggctccccctattggttggttttaaggaagggagtgacatggtgagactagtttggagagaactctggcaacactgctgaggataggtttcatgggtgattctccaagacaaggaggcctgttgggggtacgagtaggaatgatgttaccagggaggaagacgacatattcaagaggtgttgtggaggtaaagttcgtagcactgaatgataggtgggcggagtggggggctgccatccaggtttctggcttgagaaagtgtgtgcttgggaattctgtgcccacacccagtcctgtctaaactagcggccattctgtctcaggcctgccgcagttgcccctgtagtctgttttgttaccaacacataaatcaggccttcatttcttacctaaattcttcaagtatcctcttcatctctttcagtccatcctacaacatgctgccaaggtaatcttccagggacagctgaacaatgcccattgcagagtgaatgatgtcccagcttttagcatcaccatcaatattcattgctaaaggagacattcgtttcctgtagagtccaatttttgagagaagatgagccatgttatatgtgaagtaattgaatgtcaagtcttctttaagggggtgtggggcacagaattcctactctgagggcaatgaaggaagcaggcacggtgtctccagggatgaccccaggtgatcctgcctgtgcccatcatttttttcaggtgtatcttccatgtctcccctggccttgggctttctggtctggtctcattgctgcttaaaatggacccctttctcacctgggtctttgcagactgcattgtctctgcctggaataatttcactcacattcctgtctgttgaaatcctacccatcttttgatatccagccaaaatgcaaggaccccatgagtcccctgtgggaatggatccttcagaagcattttcctttctatggcactctgcatatttactatgcacagcacctaacatgtcttgtattttatctcccccactggaccactagattgggagcagaaatggaaaatcagagctcttaatcctgggtccagcctgtgaatgtgttttgttagtttgcatgttttttccccaccaaatttaatttattaaaaaattataacctatgttaaatatacagaaaaggtgacaatacgatataataatgtatatttgggacttttcaccaagaatgaacagatttgctgctgacatctcaccacctactttttaagaaataaaatattacacatacattttgaatactagcccacgcattcctctcttggagcaggtctttgagctgttttttaaaatttagagttagttgctaatatttagaaatcaagagatttcacataaaagttggcctctggctactttcctgccagttctcagcaggccatcacgggttcccagccccatcctggccctcagagcctggctctcaggtggtggaaacttttgtcaagtacctgagctcctcatctgccctccatacatgcttcccagcagacgggaggcctccttatgcccctcgtcttcctctgcaccactgcccatgctgtgccccctgtctggacccaggaattcaaggcctcatttaagtcccgctggttcctgtggcttttcccagtgaccagctcagctccattgtctgtattcatatacacctagcccttaagccggtggctgagaacttacctgtgttttcattcattcccttgccaggtaccctgcagagccacctagatggaggaaagggacccaaaaatccccactgggtcaggcttccttgctcttccctccgagacttgctgcctccgtgtggtgcatggcgtgaggttcagcgaggcttgcttggtgcaggagctctgcctgcctggcacccacagttgtaagaagggatggcacattttgttggccacaacactccgaggcctttgtgcttgtccagttgagactgctggcccatccaatttcttcctctctttctgtgatcacccctcactgcccattggaggtataatctttcccatcacttctctgtgaacattgccctcattggtcaataggagtggggtttcactaggctgaaaaaccagggggaaaggctcttgtcccagattccaccaccctcctatccttcccatgctatttgtcataaacatatggatggtgggcatgccttacaagagctggagaggtgctggctcttgcattttgttcagtggatggggcaagaggggtgttccatttttcactttaccccactgcctagggccattccaccctgatgctggtgctgatcacctgtcccttggtgctttgaggttaatcatctgtaaattttctgtgtaagaaagaagccatcttgatgttgagtgtgaccctcatcatggctgtgatatacccaggtccagagggagacagcttcccttcccacactctggacccacagcaacctcctcacccgcttcagttcaactgtgtccctaatccccctgaaagtgtttcttttgaccgttgcttctttggttgattaatgactatgtcatcactgaagtccccaaacttgtctttattggcctcctctcctcagggaaattgagaagaatgcgagggccagtgataaaaggggagatgtagggaaggagaagctaaggagttggaagaataaaggaagaaaggatatgatttaatggaaagatggataaaaaaggagggagaggcagttatatctggggatgtgggatagtagacttctactttttgagctgagtaggagataaattttctgggaagctcacccttgttctctttacttgcccaggaacctatggtatggcttcattgtgtgatttgaaaggttgaaatgcagggttatgaataaccagaatgaccagcacacatatagccatgggaggtgtgttctacagaccttcaaggaaattgacactgaagctggtggaggctaaatgcatttttccttctctctcccctgctcagggcggtttggtaaggcatgcaaaccttttcaggtgccctcagggattctcttgggttctagagagtttcctgcatggaattgggcaagaaggaggtaacccatgggagttggggctctctcaaggaatggcaccccatgctccagtgctctgctgtaccactgacaagacaaattcaggctgagtgtttcagtggaaagataaggactttcaaggctgactccctggtagcaggtctagtcactaatcagttggtatgaccgtgaacaagtttcccccctgataaaatggaaatagtcatctcacatcagaggtttctgatgagtattaaataaggtaatatatgtcatatgtaggtcatgttgtagttgcccgaaacatactagagcttattcagtcttcatccgcccttcctgaccctcccactactctgcccacccctcaaaccctggtttcatggtactcttctaaattggagatggtgataccttgaaatgaagggaaaggaggaaagtatgtattaatagaaaccacacctccctccagttaagcattaaagcatttattgctcttttcattgaactgtgtgaagaaataggagattaaaaaaaaaaagaaatactttctcatttaagaggggaaatggagctctagtagtcaaaagagaccctcaagttaaaagagatcccaaattgttcagaattagccactgatatttggtaacggcaaatcacattgtctgtcctttggtatatggttagcacagaaagcttctggttgggccagtgactgcacaggttttgatgacacgaggaagacaataagttggccattgtgtgaaagggaggcagcaggacctgggcttgtgcccttgtcaccttctgtatgaagccaggaggatgaagcttgatgatatctcctgtagcgattgaaggggagttgacaggtataaattggcctgagcaggaatctcactatttccaacaggaagccaatccagcatatcagggctaaaggaaggctccatctggaatcaaggcagaggccaaattctttgctcagggtgtaactaaggtagtcatagctttggtaagacgtgtcatctgagatatagtagaactgtcctcggatgcttagggccttcttggggtcctgcagggaccacaagaccagaatgtgggcccaggccacattgccaacatagactgtgttgatgtggataacttgctgacacttgacaggatcccattgtaatggggcctcatttgtagtggcagaaagtatagggcttccttcctcatagatatacatgagtcttaaggcacaaatgtacaagataccgctatttttcagtgttcactcattagctgccagcacggcctcctcagcaagctttttgctctatgggtatggagcaggccatatgttttccaaaggctcttattcgtggccattctggatgatctcattgcaggagttgggcctggatacttctatgatgctggtgtggatgaagcctggcatactagcttggacacaggttcccaacagaagttgggtacctgcccacgaagagtatgctgtcagtgtcaggaaatatccctatggggccgcaaccacgtgcacagatccatgtgccccactccccactcccaagtgcagtggttgtaacacacttgggttacaactgagtgttgtattcttctgtggctctgacagagattgggccatgctgcagccataggaaaaacataaaaataaaaataaatgaacatttgggctctagagaggaagaatttctagacttttgggttttgtggacgtgtgtgtgtgtgtgtgtgtgtgtgtgtgtaagtgtatactttaattttggaaaagaacctagggttatcactttatattttggcaagtaagaatattggaaaattatgatttttcattgataccattaaagacagattatttaaaatctaaaaaatcaggaagctacactctgagaatatggacagtcccagtccttaggcacaaaagggctgtggaagaattcacatcacgcacacacattcacagttgtatattaaggcaatatatgctcttaaatatatacatgcaattgctggtatttttctcattttgttgaggactaataaaactttttctcattttattgaagactaataaaactttgactagcaaaaccaaatccctgaagtcactgagcaaatagtgtgtttggggagattctggatacccacacacttttcctgattgtgtgttctccaggcaagctgcttccaattctggttgtgactctgtttacccagttatgtaaagggggggtggtggtaataaataaaccttccttctacttagtattccaaaccctgcactggtgtttcctgtggagcctggtggaggactggggagggagtgtgccctctgctggtaacacctgcatggggaggaccttgcagcctcccctgagctgtgtgaaagcaaagctcatggaggtatccagagcgtcttcccttgaagaaggaagaaaaatcatgggcaaaggatcatttttatttgcttatttttgtactcttggctccttttaaagtctctgtgcaatttgagtttctggagagacagtatcatcttcaaaaattagtctagtggcagagaaaatatggagttagtttaccttcaaggggtaaatgaccaacgttgtgaagtattctctaagcctgccagtgataatggttttaggaaacagatgcctctaacacttcccctgtcatttcacatcccctgttgctgggagctgtagagaataagaattaaaatgaaaaactagttttcttagcatactccttgcactgtaggggtacttacaggttatgggcaagtagaaactgacaaggttttttttttttttttttttttttcttttagatggtgctggagacccaaaagcaattagttgcattagaaaaggcatcagagtagactgaatgtggagggccaggccagcagtggggtgctatggtcctgaagagactgggctctgggaatcagagggtgagactacatgacaagattctttaagccaatgtgtctgaatttaaagtaggttggaaagccacaatttgcaaaaaccacccaatatttaagggatgaggatcgaatgaggctgcactttgggcacctggcaagaaatggctctgtaatagtaggcccggtggtgagctgaagagattgtattctggatacagggaaaatcttatggttaagaaaatattgtgggaagacatgtgctggataattctgtcctgacagacctctgtgaaccagctttgctagttctctcaagaggacttcttctttgaggtgggcaggagggctctgaatgttctcatcagcctgcacacaaggttcaaaatgatgactatggtgacatctggaaggtatgatttttgcgctgggaggcaagtggtggcttgacatcaa

SEQ ID NO: 96631 - DNA, 42543 bp, Homo sapiens
gccggggaaccggcgggcttccacgcgggggccccagtgcgccccgacacgcgcccaggccccgcggtgcggcactcagggcgcccggcggcctggcccgcgcccggggcagataacgagtaaccggagcgccggcacgcgccggcaggccgcctcggagtgcccgggccctgtccgctggctgggggcccgctggaccagggcagccaggtcccctcccgtcgccgctacactcgcgacccctcctctccctccgcgagaaacccgaggatccgcggacgatacccacctcagcaggcgagagaggtggtgcccagtacctacccggtcatcctcaaaaatgattttggctggtatttccttgcggatgatcttcccaaagatcgtgtcgccaccaggccgagcgacctgagccttggcaatctcatctgccatctcggcctctctcccgcgcggcggccagaggagaggctcggaagaagggaggaacccgcagagcgtgcggcgcgagagggcgcagccaagcctgcgcaggtgccccggctctggcgccccacctaatcttgcgcgtgcgcactggcgacctgggctgcgagtgcggccagcgcgctagagcgcctcagggacctccggcttggggaagttcctggtcttgagctccaaggagattcctaagtcgtttttctatcctcctttcttgtctcctggggaatgcagttactggtataaacccttcgtctgcctatggatgcttgtagggaaagttggatactgtaactgacaagatttgataatttaagtggtgctggctgcaacttagcacttagattatttaaggtcttgctgctgcagcagattttaagtcctctcttcaacagagtttttttctctctctaccagtggttctcaatcttgactacacattaagatcacttggggagcttttaaaaatccccgtgaacctggctgcagcccagatccattaaataagaatctttggagatgagccccaggcatcagtagtttgtaaacctccctagactgctctgcaaagaatttttcccagcagcaatcaacataatgtattaataaaatgacccactttaaaaaaaaaaaccttccttaatcccacatccccctccgtatctttgctcgttttataaagaagttttctacataccatgtctgctttcttatctttcatttttgagtccatttccctcttgtcaaggtcactaaggacatccatttataaaatcctatagacaattacagttatcataccagacctctaagtgtacgtattaagaaaaagtatacctcctcaatgccttttttttttttagatagattcttgctctgtcgcccaggctcgactgcagtggcacaatctcggctcattgcaacctctgcctcccgagttcgagtgattctcatgcctcagcctcccaagtagctaggactacaggcgcgcaccaccacacctggctaatttttgtatttttagtagagacagggtttccccatgctggccaggctgttctcaaacttctgacctcaggtgttccacccgcctcagcctcccaaagtgctgggattacagatgtgagctcagctgccttttatgattacattactacccttgtcttggcaaaattattgaatgtggttgcctttaatctcaaaagtgtccatttggtacttttgctatcaaagacattactgggacaattcgtaaaatctaaataatgcctataaattagataatagttttgaagtcatgttaatttcctttcataaccacagaaaaattgtcaaaatcagttgatctggggtggggccctacaagttaggtttctaactttccaggtgatacagttgctgctggcccgggaaccatactttaagaactactgatacaagggaatgtctttgtaggaaaaacccactgaagtatttaaggctatgggtatcatgtccgcaacttactttcaaatagttcagagaaaaagtgtctgtctataggtaattagagaaatagaaaaggataaagcaattacaataaaatgttaacatttggagaatctgactgaaaggcatatgcaaattctatgtattattcttgcaacttttatgtgtctgaaattgtcaaaataaaaaaatgtgtgctggtttggataataaataacatggtcagctttcattccatctgaaggctttaccatctatagagtagtgactctcaagtatttgtctcttgacctacctcttcccttaattccagactggtctgtgacatacattacagcctattgaccacctccacttagatggctaccaggcactgcaattttattttgactccctccacaacaaacaaaccaaaacctccttttgcaggattctgtatctgctgtaccaccattcacccagtcactccagccaaaaagccttgaaatcatccttaaaccttctctctgtactttcaacacacatcaccaaggatctaatcacttatctcctctatctccactactctaatccaagctactaacatctctttcctggagtactttgaaaggctcctagttggataacctatctgcttccattgtagttaatttgccacacagcacccaaaatgatctttataaaatataaatcataatgtcactctcctgctggtaatatgctagtgtataacatcacagaataaaatccaacatccttaccttggcttatagggccctgtgtgatcaggcccattgctgctgcttctacctcatttctttccatttcaaccttattgactggcatcacgcgaactcagtgtgctaggcagaagatgcccatgtcctaatccctggagcctgtgaatatgttactttacatggtaagtgggattttgtagatgtgattaagttaaggatcttggaatagggaggttcctgcattatctaggtgggcccaaagtaatcacaacagcccttgtaagtgaaagagagacacagaagagtgagagtaagagaaggagatgtgaccacagaggcagaggtgagagtctgagatttgaaaatgctcggccgggtgtggtgactcacgactgtaatcccagcactttgggaggccgaggtgggctatcatgaggtcaggcgtttgagaccagcctggccaacatggtgaaaccctgtctctactaaaaataccaaaaatagttgggcatggtggcaggagcctgtaatcccagctactcgggaggctgaggcaggagaatcgtttgaacctgtgaggcggaggttgcagtgagccgagatcatgccattgcagccttggcaacagggtaagactctgtctcgaaaaaaaaaaaaaagctccattattggctttgaaaatggaaggagttgggccaggtgcggtggctcacgcctgtaatcccagcactttgggaggccaaggcaggcggatcacgaggtcaggagattgagaccatcctggctaacatggtcaaaccccgtctttactaaaaatataaaaaattcgctgggcgtggtggcaggcgcctgtagtcccagataatcaggaggccgaggcaggagaacggcgtgaacacgggaggcggagcttgcagtgagctgagatcagggaggcggagcttgcagtgagctgagatcatgccactgcactccagcctgggcgacagtaggagactccttctcaaaaaaaaaaaaaaaaaaaaaaaaaaaaaaggaaaagaaaatggaaggagccaaaaacaggtagcattttgtaagtcagaagtccaaattgagtttcactgagctaaaatcaagtgttggcaagggtgcattccttctggatgctctagggaagaaatcatttcctcaccgtttccaatttctagaggaggcttgcttggtttgtggccccttcctccatcttcctccatcttcaaagccagcagcagaacatcttcaaacttctccctgactctgcttccttctttcacttataaggatccttgtgattacactgagtccagcacacaatccaggataatcttcccatctcaaaatacttaatttaatgacatcttcaaagcctcttgtcatatataacatagtcagaggttccggaatctcaacagttatcttctggaggccattattctgcctactacatagctctgtgaacttacatgatgaacatgctggaatttcctgttcagttctgcgacttatactttgagatgcaaactttaaaaagacaatgaaatttcagaaccttccaaatttattaagccaagggggcaaagttaagccttgaaaactgagtcatgtaatacagctgtttttcttctctggtgcatgactattgttgcttcccgacctttgtgttgagatgttatacattaatcagactccctattcttcgtttcaaacctggactacataatattagagctgtagacccttgtgattgttacttttttacgatagaatattaagcaaccaccttagagtgtaatcaatactagccaatcagatcttaaatctggatgttatccattgtttggaaaatgttgtaattctgtttggcatctccattttgtcttatataaaccatcttcaattttccttacgctggaagcactgatcagcattctttggtgtctacatgttcccatatgactgcccttacactttacagttgaataaacctttttaactggatccttagccttttgattattttggggtgacaagacaaaccaggccatgttcccagaacaactagaatagtgaagagcccacctcatatgtggaacagttaaaggagacatgcagatttatttaagaaaagaggagccacagaactgaactgattctgtcattatagaactgttttaaagtatcagcagatgagggactttggttaactgaattcaggacagtagctagcaagaaatcatcacaataagttatgaattttcaggaagctgcactatgagtctacactgaaaatgggggagcggggacggggtatcttttaaatcaccgtcagcattcagaaaacacaatgcaaggtccaagatcatctagtttattgtttctcagataaaagacaatatccagtatacttggtttaatcgcttcattacgttaaatgttctgcaaatcgaatgcatcttaattttaaaaaatcgattatcttgttattctcagaatgacttgcaataattccttagaataacatagatcacagagaaagaaaagggccttggaaatccattggtccagatctttcatttttaataagaagtcaattttacctaaaagttaacctgaaaggctacacgggtagggaaggagaacaattatgcaataggaacaataggaaaaggttgtggcgcgttagtaacgtgactacagagttttttcttgatgcttgcaaggtcataagttgaaacgcacttaaatacttatgattgtttctaattatgatgctgctgattaattacccatttctgacctctttatcagcaaaaccaaggagtagagagagctgaataggcaaaatgtaaagggtaaaactaggctttacggtcaggcatagcggatttgcatcccagatctccatttactaaatgtgcgaacttcagcgagtaatttaacctcaccttctatggaaataaatgagagaatatacgcataaaatttttaggagtcagtgttccaatcaatgcccgctgcagctgttaggacttggcttttatttatgcacatttccaaagagatagtcgcaactgggaaacgttaaaataaaggttcttttacagacgatcctataccctaaacaggaggtaacaaaacgcgggtgccgacgccatccactatatacaaacctagtccgcctagcagacgatccctgcgccggaagtgactgtgcccctaactaacatggcgtccaggtgatttccgttctcttctggccagtaattgggctctgcggctcctcgcgattttaccagttcccatccgtttagcaaacgcctttagcaaacgcccgtttagcaaacrcctcctccgtcctttggaggagggcggggctaaaagggagatgctgcctagtgattcgttgtggcgcattagtaacgcgactacagggggctggaaacagttcagtctttgattggttgctgagaggcggggctactcgactgctctggaggtagcggccgcggtgaggagagccatgggacgggcagtcaaggtgacagggyccgggaaggggtgggtacgatgccgtcggggagggtatgttcgcgtccttgagaaaactgtctggagtctctggaggctggggctcctgaccctttatggaggatgtggctgttaccccagagaagccagatgaccaactcctaggggcagttgagggtttgtgcacgtgcggaggagagcgggaggcaccagtgtggttcctacttcttggtactaacttggtactcagtgtttatccatgatacaaatctgcgacttgagttctgccctcgtttcatcttcagaccgagtatttgtctgagggacccatttcatatccctgggaagtataggagacgccaaaggctgacctgagcaacagcagttcaatgaggtgaaagtttattcagataaacagaaggtgcacagaagtctagcagccaaggaaaccgaaccccagcaaagttacttgtcaaaagtaacagcaagacagagcagggactggtgagacctgagctcactgaatgagcttgggatgtgatggctgtgctcggattatacctctctgagtacctacctggtctcagattcatttctcacgcccaagcatgatgcacgttcctgcccggcgcacaattctcattggcagccatcctttaacgtttaacatcagcatggccaattgggatctgtagttgtcactggctgaaacataaacatgaggaaatagcctgctataatatggtgaagaaaagcagtgtttatgtctagtcaataatatgggaaccaccaagcagccttcatgtacttttgtacataatgtcacagcaccaatagaaacagaattgctcagggttattcattcaaaaatttatttgaatgtccataatagctattattatagccaacaaccaacatttagcctatattgtctaagcatagtggatgcaacaataagctgaacatccttgccttcataaagaaatctagcaggtggggagaccttaaacagttatttaattacagttgtaataaatgctttgatttgaaactgcagtgttttgtgagcatataactaggatttcacatacgatctctcaaggggctgggtgcagaggctcacacctgtaatcccagcactttgggagaccgaggcgagaggatcacatgaggtcgagagttcgagaccagcctaggcaacatggtgaaaccctatctctactaaagatacaaaaattagctgggcataggggcgggtgcctgtaatcccgctactcgggaggctgaggcacaagagtttctcgaacctgggaggtggaggttgcagtgagccgagactgcgccactacactctagcctgggtgacagagcaagacttcatctcaaaaaataagtaaataaataaataatctctcaaggaagttcagacctgacgtttgattagaaattagctagagaagagaaaaaagcattctagaaaaggcaactagcacatggaaagtccttgaagtggggatttggttggaaaacttggatacaaatrgaattaagtaggattcattccaaaaacacttttggtagagcctacaatatatagaaggcacttatgctacatgtgggaagatacaaaggtgaccagtccaacaagggtgacaacaagatcctacgtccaaaaaaaaataggaaagtgaaacctagcacagaaattataacccttaaaattaatccattattcaagaaaattgaggcaaaaaggctgttacttgtccaagcttacattaagtgacaatctcagattcaaactcatctgactataaagaatccacttttcatctacactgcctgaattgtccaatcagtataagtaaatgaggaagagaatacagtctgtgacctggctttctgcattttaataaaagtttatctgctccaaggtaatgttaactccaatagtgctatggcaataatgataacattttcttacactagtcctcttaaattagggatgctaatttgttgtactaatgttgtactttaaatagcatgtaaaaccattatgtttacttacttctcatttttttaatcccatgcaacatgtcttctctgctcttgcaatattaaaatccctgggattctacgatgcttgcaaagcccgtatttttaccaaggcaatccaggcttttactatcaagcacctcagagttattccagcctctacacattactcaattccaaagccacttccacatttttagatacaggcatacctaggtgatgctgcaggtttggttcaagcccacggcgacgaagtgtatattgcagtaaagcgagtaatacaagttttttggtcccagtgcatataaaagttatgtttacactataatgtagtctattaagtgtgcagtagcattatgtctttagaaagtacatatgttggctgggaaaggtggctcacgcctgtaatcccagcactttgggaggcccaggtgggcggatcacaaggtcaagagttcgagacccatctggccaacgcagtgaaaccccgtctctactaaaaatacaaaaattagctaggcttggtggcacttgtctgtaatcccagctacgctactcaggaggctgaggcagcagaatcccttgaacccaggaggcagaggctgcagtgagccgagatcgcaccattgcactccagcctgggcaacaagagcaaaactccatctcaaaaaataaaaaataaggaagtacataccttaaataaaaaaatacttttttgctataaaatgctaacaattatttgagctttcagaaagttgtaatctttttgctgatgaaagatcttgcctcgatgttgatggctgctaattgatcagattggtggttgctaaaggttaagatgactgtgacaatttcttaaaataggactacagtaaagttgaccacattgattgactctttcacacacaaaagatttatctgtagcatgcaatgctgtttgatagcattttacccacagtagagcatctttcaaattggattcaatcctctcaaccccagccactactttatcaactgagttcatataatattctaaatcctttgttgttatttcaacaatgtttacagcatcttcaccaggggtgaagtgatgtgagtgatgatcttcataaactcaagaatccactttctttgctcattcatgagaagcaactcctcatgcatttaagttttatcgagattgcagcaattcagtcacatcttaaggctccacttcttatcctagtttcacttgcactttccacgtatctgcagttaattcctccactgaagtcttgaacccctcgaagtcatccatgagtgttcaaataagtttcttccaaatgcctgttattgttgctattttggcctcctctcttgaattctctgaatggcatctggaatggtgaatccttcccaggaggttttcaatttactttgcctaaattcatcagaggaatcactgtctatggcagctatagccttatgagtcttttaaataagacttagaagtctggctcacacctctaatcccagcactatgggaggctgaggtgggcagattgcttgagtcaggagttcaagaccagcctgggcaacatggcaaaacctgtctctacaaaaagtacaaaaattagctcaatgtgtggcatgcgcctgtgctcccagcaactttggaggctgaggtgggaggatcgcttgagcccagaagatcgagacttcagtaagccatgatcgtaccactgcactcgagcctgggtgacagaacaaggccctgtctcaaaaaaaaaggacttaaaagccaaaattactacttggccttgacctgcggggctgcaaaatggatgttgtattggcagtcatgaaaacaatattaatttccttttacatctccatcagagctcttgggtgatgaggtgtgttgtcagtgagcagtaatattttgaaaggaatctttttttttctgagcagatctcaacagtgggcttaaaatatccgcgaaccatgctttaaacagatgcactttgttgatttgtagagcacaggtagagtagacttagcataattcttaagggtcctaggattttggaatgacaaattattggcttcaactcaaagtcaccagcttcaatctcttttttttttttttttttggtgatggagtttcgctattgttggccagggcagagtgcagtggcgcaatctcggctcaccacaacccctgcctcccaggttcaagcaattcccctgcctcagcctcccgagtagctgggattgcaggcatgcaccaccatgcccggctaattttgtatttttagtagagatggggtttctccatgttggtcaggctggtctcaaactcctgacctcaggtgatctgcctgccttgacctcccaaagtgctaggattacaggcatgagcaacatgagcaaccacgctcggccttttttgggtgtgtttgtttgttttgttttgttttgttttgttttgagacagggtctcactctgtcacccagcctgcagtgcagtggtgtcatcttggctcgccgcaacctctgcctcccaagctcaagagatcctcccacctcagcctcccgagtagctaggactacaagcaccctccaccacgcctggctaatttttttattttttgtagatacagggtttggccatgttgcccaggctggttttgttttgttttgttttgttttgtttgagatggaatctcgatgtcacccaggctggagtgcagtggcaccatctcggctcactgcaacctccacctcccaggttcaagcaattctcctgcctcaacctcccaagtagctgggattacaggtgcccaccaccacaccagctaattttttgtattttttagtagagacagggtttcaccatgttggccaggctggtcttgaactcctgtgctcaagcgatccacccacctcagcttcccaaagggctgagattacaggcgtgagccactgcatcagcctgcgttagcttattaagagctaattaagctcttattaataaggatatttcacattttacttccccgttcatgagttcatggacatttaggttatttctactttttcactattatgaataatactaccatgaacattagcatacatgtttttgtgtgaacatgttttcatttgtcttgagtatatacctagtagtagaatttctgggtcataagataactgtaggtttaactttttttagcaactgccaaactgtttcccaaagcaactgtaccattttaaatgccaaacaatgtataagagttcctatttttccatgtccttgtcaactctttttattgactgtcttttttacagtagccattctactgggatgaaatggtatctcattgaggtttagatttgtgtttccagatggcacatgacattgaacatctttttatggcttattggccatttatgggtttttttttttttggaagaaatatctattcaaattctttgactttttatttttcttaattttattttagattcagagagtacatatgcaggtttattacatgggtaaattacataatggtgaggtttgggcttctagtgaacccatcacccaaataatgaatattgtacccaataggtaatttttccaccctcaaccccttcctatcctcctcccttttggcgtctcccttttggcgttctatccacaaaggcgtaccctttgcttagcacctacttataagtcaaaatatgcagtatttgattttctgtttctgagttatttcatttaggataatggtctccagcagctgctgcaaaggacatgatttcattcttttttagtattctatgatgtatatatacaccacattttctcatttgtgtcctataaagcaaacagctgccctcacagttctactagcacctagtactttaacatctttgatgttattattgctataaaaattacccacagctgagccctttaagtacattatatgattgtcttttttcccatttcttcatctttaaattaataactgccttttaaaaattattactttttaaaaatatcctttaatagatatcctagatatctgttcccaaattctaggcaaaaccagtctaccagtttcatttttccttgcaataactttcctggagcaattcagtcttttgctatagtcctgcctagttgctttctagtctggctgcacaaatgttgactagcatttgtccttccccatggtctttgcctctcccatgttagactacctgtctcctgggttcccatgtcttttccttttgtgattcatttccttattttggtggaggatattcttctgtagctttccaataaagtgtgtatgacagataagagactttgcatttctgaaaatatgtatttgcccttgtctttgagtgatagtttgagtatctatggtgttctaaagcagacattttttcaaaacttgaatatgttattccattgtcttcttacagtggtgctatttagaaatcaggtaccattctgattttttccatcctttacatgtgaaatgttgattctctgagattgttctcattatcagcattgcactgaacttaacatcatgctgtgctgtgttatgagttttatgttgggcacttggtggaaccctttctatcttgtaattcgtgtgccttacttggtgaaattttttttcttcccttttacccaaatattaagtgaaaattttaaaatttcttccctcccttttctcttttctctcttgttggcccttctgctaatctagctgttgggccttctcccttaattttcttatctttcctctcctcaatttctgtttctgaacttttattctacattctgggcaatttttctcaacttaatccttactttcacctgtttgatagccaagagcttttgggagtttttggaatgttcctttttaaatttactgtagcttttcattgatgttattccatctctgcgataacatgtttctgaggaagttttttatggcagcttggtttttatttttaaatttttttgctctgtttcttatttctgttttcatgtctgcctttgatgttataggttttctaatatacgtaaaacacttaaaatggtgtctagcacacagtatgcttagtaaatgttagacagtatttgcagaacagactggaggacaggagggtgtggtggcaaagtgacaaacctttgtaagtagtctaagagatggggagtgcctgaacataagtgattttgttgagagaggataaaagaaagattacagagacatttctaaagtttccacgacaagagtaaggtataataaaaggatgacctactgatttctggcttcagaaacttggtggcctccaataagtaaaatagagaagagtggaggaagagcaatattgagagaacaatattgagtacctttttggacttgagaagtgtgaagtgacctcagcatatcactaaagcctcttcacaatctgtcttttaccaaaatgccaggctcttttctctctttttatttttttcaatacagactcagaatattcataagtctcaacatttcacttatcttttatgaaatagcaattaaaagggccagacgtagtggctcacacctgtaatcccagcactttgggaggccaagtcagcggaccacgaggtcaggagtttgaaaccagcccagccaacatggtgaaaccccgtgtctactaaagataacaaaaaattagctgggcgtggtggcacacgcctgtaatctcagctacttgggaggctgaggcaggagaatcgcttgaactcgggaggtggaggttgcagtgagccgagattgtgtcattgcactccagcctgggtgacaaggtgagactccgtctcaaaaaaaaaaaaaaaaaaaaaaagggaatagcaattaaatttgtctaaattgtttaaaacatcttccttctgtggcctcttttaagatgcaataaattcataattttgcatatgtgtgtgtatgatattgagcagattaaaacttcaataggttaagaaaaatgagaacagatacataccagactggtaaagtagcagactggtttttagcatgaggattattaactttttaaccatccttatattgttttatttatttcaaagaactttgtattatttttgtaaataaggctaaaaatgtttttaatgtagagataaataatcaaaggaaagttattttggcaagtcctggttttcaccaactatttttaaaaatagtctatgaaacaaacagaaaaggaatactgtttaatccttataatacgatttgtgtgaaatgtgaaatgttttccttttgaggtctgaattctgattttctttttctttttcttttctttttttttttttttttcttttttttttttgagacagggtcttgctctgtcacccaggctggagtgtagtagtgcagtcagagctcattgtagcctcaacttcctagactcaagcaatcctcccacttcagccgcccaagtagctaggaccacaggtgcacaccaccatggcctgactaattttaaaaaaatattttggccgggtgcagtggctcactcatgtaatcctagcactttgggaggccaaggcgggtggatcacctgaggtcaggagctcaagaccagcctggacaacatggtgaaaccttgtctctactaaaaatacaaaaattagccaggcttggtggcaggtgcctgtaatcccagctactcgggaggctgaggcaggaraattgcttgaacccaggaggcggaggttgtggtgagccaagatcacaccactgcactccagcctgggtgacagagtgagactgcaagtcaaaaaaaaattttttttttgtagagatgggggtctcaccatatcgcccagggtctcgaactcctgggctaaagcgatcctgctacctcaacttcccaaagtgctgggattacaggcatgagccactgtgcccaaccttgaattctgattttcttaacaggttttacagctctttaaaacactgcacaggaccagacaacaagtttttaaaaatgatgccagagcattagaaggtaagtatgttctttacccctttggagccagtctactttttagataactactaatctctctgagaaaccctgtgtggtcaagacccattttagggaatgaccttcactacctctctctgatatcttttataaagattagcttatattacacttatttgagaaatatctacttaaagaaaaatttttaaagatcaagtcttcataaagagttggtcaaaaaaaaaggcgagggaccagaatttcagtgtttatcattgcttgccttatattcaagccattgaactttctgttacataatcaaattttcacagtctctaggaccagatattaccatgttgttaatgtcttatatcagtctaaaagagcagctgtgaaagagaatccatcccaaatgattctaaattcagtatctccctgttttaagtagtttctatcttatctggaagtcacaggctctgaaacttaggttctgtgttattcatgttcagttccactcctcatacatttmtgaacctccttaagagtgcacctaggtaaagtgtccccactgtttccagggatttaagtttttgtaactcatcaaaaataatttctgaacaaataagatatatgtattgtattatatgtactttacatgaattcctgatttaattcttgtaacatttctgtaagatagttgctattataattcctatttttacaaatgagaaaattgacaaaatgtgaaaatatctgtcccacatcatactgagtaaaaggtggacctgggatttagtctaagcagtctgattcaaaagtccaaactctaaaccaccttacgtattgaaatatatgcaacataggctgggctcagtggctcactcctgtaatcccagcactttgggaggcagaggcaggcaaattacttgaggtcaggagttagagaccagcctggccaacatggtgaaaccccacctctactaaaaatacaaaaattagccgggcatggtggcacacacctgtaatcccttgagggaggagaattgcttgaacccagaggcggaggttgcagtgagccgagatcatgccactgcactccagcctgggcgacaaagcaagactccatctgaaaaaaaaaaaaaaaaaaaaaaaaaaatatatatatatatacacacacacacacatatatataacatatatgttatatatatattaacatatatatgtatatatataatatatacatatatattatatatacatatatatgtttatatatatataacatatatatgtatatatatataaaacatatatatgtatatatatataacatatatatgtatatatacacacacacaacatagaaggaagtttttatggtaattatcaacatggaatatttttgttgctttaaatttttcaagtggaatagttataagaacagctaacaatttgttgcatatttgctaagcactttatacggattgttccattaaacgctcacagcagcacaataagaccagtgagattctaccaaagtatgctgctataatgatatcaaattctcagtggtatatgtaaacaaaagttttatttgtcactcactttatatgtcagccaagacacttaaaattttacatatatgtacacatatatcctgtttgctgccaatctctgtgtatgtgtgtatgtagtttaacatacttgtatgtattgaattttaccatcttaaaaaagcattttaatagaaatccttagatttgtaaaaataaaacattaaattagatttattataattcagtagctataggtatacaaatgaatttgagagtaaaaatcagtggaagaaaaaatattagagtgccaaaggtttatagtaggtttacctacaaacttgtcaccctgtcaaaagctctccaagagacttcrttaataaatttcttattcttatgctttgtttttcatgagggcaatttctatagtagagaagtagccattcatagtgaataaygtgtcaattattgagataggaattatagattacaaaagcgaataactatatgtatttttctctttgtagcagccagaataaagataaatgaagaattcaaaaataataaaagtgaaacttcttctaagaaaatagaagaggtacagtaattttttcaattatagtaaaacttatacaattatcttgtcaaagaggaaatgatgaagatagaggggttatgtaaaataaaaaccattacttgatagttaaggccatcacaactgtagataaccttcacttatttggtatggctcacctcctcaggctcatctgccgacaccaaaatacagcaaggtaccccatcaacagaacatggaaatagccatgatcaaagccagaacagctgaacaaacccagaaacctacagaaattctatcttcacttaaagcaagtgactggaactaaagagaatgagtgttgtagtaactcagaactacagaggaaacttctactcttaactgaactaagcggttagatatttatttttaatcccatcttggcaatgacaaacagccgcagtatgaactattcttgctttgctttctgtatttgcattttggtcacttgctctagttgaagacactgtacagacactactttctcagctccctaatactcctagtagaagtttattgaaaaaaatgcacaatttttcttttcctatatattatgtattctggcatatacatattatctctgtcctcagcttcctatgtctaactatataaaggtaaggaaaggacccttaggaagaaaacaaaacaaaaaaatggaaaataatttgcaagatagttatggttccaagaattgatttggttccaagaattgatatggttccaagaattgattcctttaaaaagaatcctttttaaaggaaggtacaaactagagaaattttctatgttcatagaatttccagatgtttaaaaaaaactgataaaaaatgcatttatatttagtggagaaaatgctatttttgaaatagtaaatacctttaataatggagctcatgagacaaaatgagatagcctaagtattccctctctataaaataaacaaaaagggaaagattttgctgaaacatgatagggcaaatagggaatatgtaatttttattcatggcagaaattaaaatgaccatataatcaactcatgacttgaagggaagttaaaaggtatatgaggaagtttgtactgtttgctattcagtagactaattcataacatatgataattttttaattttgaaattatgattaaagacttttaaattgaggtctgtttatatcaagtaaactgggaaaatgaactacaatctcccaaattcattttacttacagagcattaatttaacattaagcaatctagaaattccatatttgttatatacaaatgtatattttgtactttctgcaactgaaaaatattaagattttagtaattttaaaataattgctttgttattagagggttgatasagtcttggcactaaaaggaatctcaggcatcctctctagaccagcagttctcaaacgtggtcatctcaaagaacctttacactcttacaaattgaggaccccaaaaagctttgtttatatcattatttaccatattagaaatgtaaactgagaatttttaaaaatatatattgattaattcattttaaaataacaattttattatatgttaaaaagtaacatgatatttatgaaaaataactatttttaaaaatgtagtgagaagagtggtattggtttttttgtttttgttttgtttttgtttttgttttgagatggagtttcgctcttgttgcccaggctggagtgcagtggcatgatcccaggtcactgcaacctccacctctgggttcaagcaattctcatgcctcatcctcctgagtagctgggattacaggtgcatgctaccacacccagctaatttttgtatttttagtagacgggtttcaccatgttggccaggctagtcttgaactcctgacctcaggtgatccacccacctcagcctcccaaagtgctgggattacaggcgtgagccactgtgcccagccccctgcaatatgttttttaggttgaagtatatgaagaaaattcagccttacacagatttgtagttggaaaagagtaaaacaattagataattgtgattttttcttttctttatttttttgggtagagaggaggtcttgctttgttgcccaggctggtttcaaactcctggcttcaagcgaccctcctgccttagcctcccaaagttctgggattacaggcataagccacgtaattgtgaatattttttaatactacgccttgacatgaggtaatttctttttttttgagacggagtctcactctgtcacccagttaaaggttagttccaatgtgcaactctgttatctgtcagacaaatggaattttttttggcggggggggggttccaggattcatgcagaccacctcctcctcatcttctctggacccgcctaatcccttattcctcaactagccttgtttccagccttatatctaggacttgactcagtttatgtacctccagtggctgaggagacccattattttctccttctctgccctgctaagccccttcccaggtgtcaggagatgaggctttgctctcccacagctctctccatggcagttaattccagctccctccttttgatgctcagaccaaaaaccttggtgctttcttgactgctattcttctctcacacttatatccaatctgatagcaaatcctgttgacttaaatatcaaaatattaatatatacagaactcaactacttcttatcctccctgtaattatctccgagtccaagccaccatcatctctcttgttataacagcctcttaatgggcctcctgcttctagccgcactccctacagcctattctcagtacttttaaaaacagaataaaccttwaaaaaagaaaaaaaaaggcatatctcagcactctactactcacaaccccatgactcttcatctcattcaagaaaaatctaaagtgcttaacatgacctacaagactgtcatctgacctttgttaccttgccacctcaacttgaaccacatccccctcattcttccaatctcagccccttctttgagggtccttgaatttaccaaaaagtttcctcacttagggtttttatgctgttgcctcttcttgggatattctctyccatgccctcaaagcttcgtttaggtagaccagtgaactttaattgatatttccctgtgaatggattttttacccatgcatgattttgtaacatcacgcagtgatgatttagaaaatgcaggttcattaaatactacagatcttccagatattgacatagttcattacatatttttaaattatatctatcaatactaatatccatctcatcagaaaaatctttaaggctgggcatggtggctcacacctgtaatcccaacacttttggaggctgaagtgggagggtcacttgagcccaggagttcaaggctgcagtgagttatgattacaccactgcactccagcctgggtgacaaagcaagaccttgtctcaaaaacaaagcaagaaaaaaatatttaagtattgtgaagctatcaagcttaccctggcagatacaagttctccagaattctgatatttgcttgaaagcttcagttttgtcattgtcagcaaatactgtcagttgttttctttgaagtgacacactctacttttctaagaaaataagaaaatatctgccaaatagctaagtctaaataatcttaatttgtcagtggttctgtaaaggtaaaaaatggtattttgatggagaaagctctactgctgacaactcaaaccatgcagaaggctgtagtgttttgaaagtaattttgacctcacagatccctgaaagggtctcagggtctctcaagtacatattatttgatgaggtctgaaactcaaagagagtaggtgattaacccaaggccatacacttaatgacacagccaaagttggagttcaagtgttctgaacatctaattctataaaagaaagattcaactgccctcccaaaaatgtgcattttaaacacacttaaaaatacacattgtaacaaaaaatactctaaatctgttttggaagaaaatatagaattgatagataaaagttaaaactatatgcatatctgagctttctatactagttggaatggttataaaaagttaaaagcagtaccgtagtccccctttatcattggggaatacattttaagatcctcagtggatgcctcaaatctctgatagtaccaaatcctatatactatgtttttattatatatactttcctatgataaagtttaatttataaattagacacagtactcttgtgctttggagccattattaagtaaaataagagttacttgaatataagcactgcagtgtggcaacagtcaatcttgataaccgagatggctactaagtgaccacaggtggacagtgtatacaatatggatatgctggacaaataaatgattcacatcccagacaggctggagcagatggcatgagatttcwtcatgctactcagagtgacatgtgattaaaaacttatacattatttattttgggaattttctatttaatattttcagaccacagttgaccacggataactgaaactgcagataaggagaaactactgtattacttgaaaagaaattatagtaaaactatcgttttcaaaaacagtacattcatatgaaacacctaaaggacttactctatttgtttggttttcttaacagctaatgaaaataggttctgatgttgaattattactcagaacatctgttatacaaggtattcacacagaccacaatacactgagtaagtaaaattaaagaaaaatggtttctaactgcaatgtgttttaaaatattgaataattatagcacatgtaatgctgagtgataaaacagcttgattttgccagacaatatggtatatagcatatatattttacaaggttatagtctataagactgaattatgaaactttgttttgccacatttgtttcaatttttattttttatttttatcttcttatatttcaacactaattatgaagacagtacaactatatatttttatcatatttatttacagttcttaatttttctggcatcatttatcacttacctagactatttctttaccttttactctataatgagttttgttttttgtttttttgtttttgttttttttttgggttttttgagatggagtctcactctgtcgcccaggctggagtgcagtagtgcgatcttggctcgctgcaacctccacctcctgggttcaagcatttctcatgcctcagcctcccaactagctaggactacaggcacacaccacccatgcccagctaatttttgtatttttaatagaaacagggttttactttgttggccaggctggtctcaaactcctgacctcaggtgatccacctgcttcagccccccaaagtgctggtattacatgcatgagccattgcacctggcctataattagttattttaattcagaagatttaggattataggaaatggaaatatagttgaggatcctccatcatatctcgagactccagatggtgcttcagcaaaatctcatttcacataatattttgtttttattctctaaagtatctttggggacagtaacaacaaaaagatgacattcaaaattgttggccaggtgcagtggctcattcctgtaatcccagcactttgggaggccaaggcaggagtctagattgagcccaggagttcaagaccagcctgggcaacatgaaaaaaccccgcctctacaaaaaatacaaaagttatcaggatgcagtggtgcacacctgtaattccagctagtagggaggctgaggtgggaggatcacttcagcccaggaggttgaggccttaatgagccgcgagtatgccactgtactccagcctgggcgacagagtaagaccctgcctcaaaaaatatatatattgaaaggctttgttttttaagcagactatggaagtataacatacaaacaaaaaagtactcaatttgtaattgtatagctcagtgaattttcataaaatgaaatacccatgtaaccaacatgtaaaacaagccacatgtaaaaaaaaaaaaaaaaaaaaattggcctttctgatggatatgtggtggtatcacattgtgattttaatttatatttctctggtaactaatgaatgatgaggaccttttcagttgtttagtggacatttggatattcttttttatgaagtgcctgtttgagtcttttgtccatttttctaaggggttgtctgcctttttattgttgatctaaaggatttctttgtatgttctgaatatagaaatttggtgggtatatgtattacaagaatcttctactttgtggctttccttttcactttggtaatgttatctttctgtgagaagttcttaatgtagtcatatttatggatttcttaataattagtgctttttaattctattaaagaaatctttgactagctcaagcaagatcgtgaagagattctcctgtgctttcttccaaaagctttattgtaggctgggtgcagtggctcacacctgtaatccctgcactttgggaggccgaggcgggtggatcacttgaggtcaggagttcaagacgagcctgggcaacatggtgaaaccccattttcactaaaaatacaaaaactagccaggcatggtggcgcatgcctgtaattccagctactcaggaagtaagggaggagaatcacttgaatgtgggaggcagaggctgcagtgagccaagatcatgccaccacactccagcctgggcaacagagtgagactccatctcaaaaacaaaaacaaaggccaggcgtggtggctcaacgcctgtaatcccagcactttgggaggccgaggcgggcggatcacgaggtcaggagatcgagaccatcctggctaacacagtgaaaccccatctctactaaaaatacaaaaaattagccaggcatggtggtgggcacctatggtcccagctattctggaggctgaggcaggagaatggcatgaacccgggaggcggagcttgcagtgagtcaagatcgagccactgccctgcagcctgggcaacagagcaagactccgtctcccaaaaaaaaaaaaaaaaaaaaaaaaaaagctatattgtttgatcttttccatttggttgtttatatcaactagagttggtttgtatatggtatgagatgggagggtcaagatttatttttttacatgtgactatccagttgatccagcaacacttattgaaaagaccactcttccccctactactctacaggatcacctttgtcataaaatctaagaactatatatgtgtgcatctgtttctggactttataatctcttcaatctgtttttctgtcctgcatcatataccttcatgtcttgatttttacagccttataatagatcttcctacctggtagtataagtccaaagggcttttaaagttacttttaattaatggggacttatcagaaattattagatcttgggctgggcactgtggttcacacctgtaatcccagcactttgggaggctgaggtgggcaaatcacctgagctcaggagtttgagactagccagggcaacatagtaaaaccctgtctctaccagaaatacgaaaaattcaccaggcatggtaatgtgcacccatggccccagctactagggaggctgaggtgggaggatcacttgagcctgagaggcggatattgcaatgacccgagatcgcaccactgcacctcagcctgggtgacagagccagaccctgtctcacaaaaaaaaaaaaaagaaaagaaaaaaaaagaaattattagatctgagttatggttttttcgttttgttttgtttagtttagatggagtcttgctctgtctcctacgctggagtgcagtggtgtgatctcgtctcactgcaacctctgcctcccgggttcaagcaattctcctgcctcagcctcctgggtagctgatattacaagcgtgtaccgccacacccagctaatttttgtatttttagtagagacggagtttcaccatgttggtcaggctggtttcaaactcttgatcttgtgatccgcctgccttggcctcccaaagtgctgggattacaggcatgagccaccgtgcccttttttttttttttctttgaaacggattttcgctctcgtcacctaggctggtgtacagtggcatgatttccgctcactgcaacctccacctcccaggttcaagtgattctcctgcctcagcccctcaagtagctgggattacaggagcttgccaccacgcccagctaatttttgtatttttagtagagacaaggtttcaccatgttggccaggctggtctggaactcctgacctcaggtgatccacctgcctcagcctcccaaaatgctgggtttacaggtgtgagccactgcacctggctgatctaagttatgtttataagggcagaaaacatagttaatcctaaacttaagatgtgtagtcatcagcttttatcttaataatgatctttagagtttctgtgtagtatagccaacattttatacaggtaatcacagatatatattatttttatcatatgaataaagttttaggttattttaaataactaaatttagtatctatttcaaatgccttgttttagatataacactattgaatattatttagatttctttttatcctttggttttatgtatactttaattttcccacagaattaaatattttgactcttttatgagtattaatacatattgccttaataatagcctcattctttctgtgtgtgtgtgtatatatatgtatacacacatatatatacatatatatatgtataggtccaaaatgtaagaaatttgattccttaatctctctttctaaaagttactttaagcaaaattccttcaaatattttagcagtgtctatactgtcacgtagaaatgacaagaataaaaattctgcttcttgtttagaaaatggaaagttgtgattatgtgtttctaaaaaatataatgtctcaaaatgaaaaataatagaaattgaaagtaataaaatgaaacttcatttggaagagtaatcaccttgtatgcgtgaattctaaatcaatctctctttttcttccattcaaataatatctacagtggaaattaaattttgaatcccagcaggaactctttatcttaaataatttctcatttttaattttttttaaaaatcacttccagacatctcttaaaaggagacacacaaatggccaacaagtatatgaaaaaatacgcaacatcacttatcagggaaatgaaaattaaaaccacaatgaaatatcatctcaccccagagagaatgactattgtcaaaaagacagaaaataacaaatgctgacaaggatgtggagaaaggagaactcttatacactgttggtgggaatgtaaattaggatagccattatagaaaacagtatagaggttcctcaaaaactaaacatagaactattgcatgatctagtaattcctctactgrgtatgtatccaaaggaaaggaaatcactgtatccaagaaatagctgcattctcatgtttatcttggcactattcacaataaccaagatacggaatcaacctaagaatccagtgacagttgattaaaaaaaatgtggtgcatacacacacacacacacacacacacacacacacacacacacacacacacaatgcaatattattcagccataaaaacaaggaaatcttgtcatttgtgacaacatacatgaacctggaagacattatgttaagtgaaataagccaggcacagaacgacaaatattgcatgttctcactcatgtggaacctaaaaaagttcaacttatagaaacagagtgcagatagtggttactagaggccaggaagggtcagagggggatagctagaggttggttaatgggtccaaaattacaattagctaggaggaataagttctagtgttctatagcactgtagggtaactataattaacaatttattgtatgttttcaaatagctagaagagcaaattttgaatattcctaacacaaagaaatgatcaataaggtcatagatatgctaattaccctgatttgatcatcacacatatacatgcattgaactatcactgtaccccttaaatatgcatatatagtatgtatcaattaaaaataataaaaggaaaacatttacttcctttatccttgccggtgaattcaaggttctttattacaagcataattttatcatttgaaataattccttatttttaaaatctttaaaaaatattttggaaactatttttctttccaaatattttctgctctattttttgtattatctcaggtgcctgaatttgtacaaatcataattttttattcatatcattcatcattggtctagcatagcctttaactatgagttagaaaaatactcaggttattcattattctatacttgctgttttattattaacatttgtcaaaaccctctttctaatgtggatattagtcgcctggtttcagtgttggcctttgacaaacatatatattttcattcgtacaaatttatgataaagatggtcccaagaaaacccaggacttcgggtcattattttttacggtacttagttttttaataggatccatattttttaacttcctctctggcatatatgtaagaaaaaatagggatgtacttctaaacgaacgatacagttaaaaaaacaaaaagctccaagaagctgttctttagatgtattttaaacttctgccttttggtttatttagatttgtcattgtctaaaactatcttatggtttgtgttctaagacatgttaatgtgactcaacaaacattgaatcgctgttatgctagacgccagggatagaacaatgggcaagacagatctggttcctatccagtggaacttagagtgctgtgtaaaagacaggcaattaaatgtacagctacagttcttggaatgccaggataggaggcagagactgctgagacacataagcagagctacagatccaaacttgatgagttagggacaggttctgggaagaaaacacttttgtgttacagtttccctaatttgaagtcatcatttatataatatacataatgtgcttgaaatatttagaagtatttctggaacttcagtgtgaaatattttaatgtcctttaaattatttggattccaaatatctctgtgattgtcacactattataaactatgctatccataataatttattttaaaatctttacctaaatttgtactttggtccaaaattgagataaagactttatttcaaggaattgctttttggccgggtgcggtgggtcacgcctataatcccagcacttggtgggaggctgaggcacgtggatcaactgaggtcagaagttcaagaccagcctgatcaacatggagaaacctcatctctactaaaaatacaaaattagccgggcatggtggcacatgcttgtagtcccagctactcaggaggctgaggcaggagaatcgcttgaacccgggaggcggaggttgcagtgagccgagattgcgccattgcactccagcctgggcaacaagagcaaaactccgtctcaaaaaaaaaaagaaattgctttttattgatatatctaatatgaccagagtagataaggcgtttcaggggcctgaagtacaggaaataaaccatgatctcaatgcagttcctttttaaagatctggcaacatcaacaaactaaggctgttatagtactcagtatctaatgtggaaagcaaagtcagggattttacaatctataagacaaaattataataaaaacagtatatagcatataaatatagttggagtgcatttgacctaattaaagtgttaacagttaatgaatacagaagaattcagttgtaaaatatcttttgatgccaaagattatccaataaggtgaattgggtaaagaagtaaaatagtggatatttgacaggttttctgggaatttactactcttcaaataacgctgctttgtttcaagacttccaatctgcctgaattctaaatccctaagacagaacctagagaatttaagttcctctgtttcctttgtagctcaggcacaggcgtttgattaggtgaagcacactcacttgtattcagcacagaatctgttttgctggcaggagtagcatcagtggtttcaggatcaagttcctcatggagaagagaagtagcattggtatggtggcaagagcagacatagtaaggttgagtttctggcaacatccgaagtgtagcatcttgtgttccatgagggtaaaaatggcagcatttttttctggcaccccacgagagagcagcagtttttatcattagcctatttctgtggtatggctttggtcattgtttctggaagcttagtctcaagcctgcctggttctggacaatttgaaacaacctgtttaatgcctttccagcttctaagcagccagaggctgcttctgtgactagtaacaaagaccaacagttaaagcttttatagtccacttcctggtgatatgagttaggcaaaataaaattggccgggatcgctggctcacacctgttatcccggcactttgggaggctgaggtgggcagatcacctgaggtcaggagtttgagaccagccccctggccaacatggtgaaaccccgtctctactgaaaaatataaaaattagccaggcatggtggtgggcgcctgtaatcccagctactcgggaggctgaggcaggagaattgcttgaacatgggaggcagaggttgcagtgagccgagatcacagccactgcactccagcctgggcgacagacagagcaaggttctgtctcaaaaaataataataatgataaataaaattgaaaaagaggttgaatgcagattaagctagcccacaaagcagagatagaaaaaagtattactttgctaaaaggcacaattctgtctacagcctagagtctaattgattaagagtcccataatttagagccttggagagttaaaaatgctaattgttcttatccactaaaactaaagccagtacaagcagggaaattctgagctgtaacatgaaataagatcgatgcctcaagactttctcattcttccagacaaagattagatatatgattcatttactgactggaacttactattcttcattgctttaagaagtggcccctaaggtaagggttaaggagatgggcagaacgtagaggctgctaccaaaggatgacagtcttcatccttatttttctgtggctacttgtgcatggaaatgactggaaaccaatttgaagcttataaagtttttgagtgaattgtattgccaagaaactccaggcctggctagctcttttcacctcttaaggccacccctgggcccctaaactcctatcaccaggaagtagactatgaaagcttttaaagccccaaagaagggcatcttccccagtatctccaccttagaacaatgaggctcagcaggacctaatggaaacactagcactgtaaccaaacatccttgatttcagtctagatgagacctgaggggacaggtagtgagtggatgtatgctacagatggaaagaaggatttatatgcattttgcatagccaaaggggttgtgcttgttgcctctccagtatctattctcctgttcttttttttttttttttttggagatagagtgtccttctgtcgctcaggctggagtgcagtggcacgatcttggctcactgcaacctcagcctcccgggttcaagcgattctcatgcctcacacctcctgaatagctgggactaccgctcgggcaatccaaccacctcggcctcctaaagtactaggagtataggtgtgaaccaccgtgcttggcttctcctgttcttttttactaactgagaaattgtgttcagggtgcaatgtaccaagcaaaaaaaaagttattttccagaccatgtgacacctttctggtctatataaaccgtgtctattcggtgttacttccaagaaagtcattgttttcctgtttaaaaggagcaggctgagctggcactctccttttgcccttttctctcttcttcccatctggagtgcagatgtgatatgacaagcagcagtgaagacaaaaccactcatggaaggtagcagaacaggaagagagaaagagcctgggtccttagtatcactaaggacaagcactagcccagaactgccttaatctgtatttctttttttttttttccgagatggagtctagctctgtcgcccaggctgaagtacagtggcacgatctcggctcactgcaacctctgcctttgggttcaagcgattctcctgcctcagcctccctggtagctggtgcctgccaccacgcccagctaatttttgtatttttagtagagacagggtttcactgtgttggccaggctggtctcgaactcctgactttgtgatccgcccacctcggcctcccaaagtgctgtgattacaagcatgagccaccatgcctgtcctttaatctgtatttattgataatgtgagaaaaattaaatctcttacttatttaaaccagcttttggactttggttattcagaactgaacatactctaaagtgatatgggtatatttaaccatttatttttccattctcccataaaagtcttgttccacttttgtaacacatgacattatactataatttgttgtttatctagctatcttttccattagattgtgagtttctggaagctgaagagactattatatattcaccttcatatcttaatttcttgatgtaatgtctagcatgaaataggcacatataggtttgataagtgaaacaaattattgccattgttaacaagttaaaatgcacactacaatttattctctgatgaaatctccataggtttggtaaaagcaagtgagatataaacaatggttaaataatacttatttaactggttttcatttcagtaagccaaatttatcatctggctaataagagcactattcttagtcagaccagttctttcttaattaagtgaaatattcagtttgccttttgggttgaatttgttttagtgttgtcttctgtctttttttttttttttttttttttgagagagagagtctgtctcccaggctggagtgcagtagcataattattgctcactgtaatctcaaactcctgggctcaagcaatcctcctgcctcagcctcttgagtagctaggaatacaggtgtgcaccaccatgcctagctaatttttaaacaattttttgtagagacagagtctcgctgtgtttcccaagctggtctcaaactcctggcctcaagcaatcttcccacctcagcttcccaaagtgccrgaattacaggcatgagccgctgcatctggccactgtgtgtgtgtgtgtgtgtgtgtgtgtgtgtgtgtgtaaatatatatatttttaaaacctttttattttgaaataattcagatttacaaaaaaagtgcaaaagttgaagggtatgagaatttcctttacccagattctacaaatgctaacattttaccatatttgccttattgtgtttccctcatttttttttcctgaactttctgagagtaagttgcagacataatgcctatttaccccaaatgaacatttttagaattatgacagcccatttgggtctagatctyctggagaaataccttagagtatatttttttaagatacttcagtgtgtatttcctaaatatacaaggacattctctaatgtaactgcaatataatgaccaaaaccagggtattaatattgatgcaatgctatcatttaatctttccatttgtcctaataatgtattttatggcaaaaggaaaaaaaattccctgtggaccagtatcctattggggatcacacattgcatgtagtcatcatgtctctttaggtatccttaatctagagcagtccttcagtctttcttcgtctttcatgtccatgatgttttgaaaagtataggcaggttattttgtagaaggtcgtgcaagcattttttgattgatagctcatctaggttcagctcttctggagaaaagaagaagaaatcaatgtatctcctcaaaaatttggaattttttttttttgaggtggactgccactgtgtcccccaggctggagtgcagtggcaccatctcggctcactcactgcaacctccgcctcccatgttcaagcgattcttgtgcctcattctcctgagtagctgggattacaggcatgcaccaccacacccagctgattttttttttttttttcagtagagatggggtttcaccatgttagtcaggctagtttccaactctagacctcaaatgatcatccctccttagcctcccaaagttctaggattacagccgtgagtcaccacrcccggccaaaaatttgtatcttaagagctttatcttaactccagcaagatgtcttacctaggactcaacaggtttttgttgttgttttatgatatttctcaatgtgggcactattggcatttttgacaggacagttcttcactatgccagactgttccacccattacagaaggtttagcatccctggctcctgcccactaaattccagtagcattctccagttgatatgaccacacaaaacaccctcttttaagaacaattgttatttaaaatttagaatctttaaattaggagaccagtcttgcttttcatatagtagatagtataagcaaaatttccagttgttttcattatcagtaattggtaattaaatgaccaataatagaagttttagctgaattctcttcagttatttgatttgctatatttaatgataaagggttaagtggatcatatatgtttttatataatctgaaatgagaatgctattaattctaattagagtcaaggatgccaccttagatatcaactgaaataaaatatccctggaagatttatcttaaaactggatattttactattttaaattttagggggaaatgagtgtccttgcatttaattctaattttagtgatgttaattattctcttttttttttttctttcagaactggtccctaggaaagaccttcttgtagaaaatgtgccatattgtgatgcaccaactcagaagcaatgagttttctagaatacaacaagtctttgtactttttaactttaaaatctacaactctggcaaaagtcctggaaatgcagacattttccctgaactggcatattgaaaatgaatgaattacagaatagcttcatatttaaatttcatgttaaaaggtcattactgagaactaaagaacataattaagtatttctaaaggaaattagataagaaaacatttcattttcattgaaaatcaaatttcataaagcaaagtaaatgcttagggagatatattcaatctttgaccttgatgagtatttgatcttaccatagctatttgagaatgtggtgcttttacaaattggtgagttttcctgccatgtgaaatgcaattattacatttaaattgttagattaaaatgatatttagtcctgaaaaatattaaattggtcaaaaaaatcacagtgtatgccagctctctacagaaagtggcctttgttttctaaagcactgggattatttctgtagctaatatataattgtacagtttctttttagagatagagagtatctctgtgttcttatgaagacattttttatcagttttctgaaaatagatgaataaaatattatagtcacctagggtcactatggaataaagaaatcctagtttaaagaggaaatagtggcccttgatcaaactatttaatatggccttagtagaattagctgtatttagacaaagttagactttagtgtgaaatgtaatmggtggctacattctcatcgttttaattaatgaaacttaaatggcttctcttcttccacatgtcctgtccttgacaagatgggcagtatcacaaaaggtcctggcattctaccatctaacactaggaactgtaaaatactgtttaatattcttcttgtttctcttttatctgtgtatctttgccattctattttctcagtgaatagtatgttttctcccattcactgataaattctctcatttgatgatgatacagggtttttaatttttgcaagattctcaatgcaagcattgttatgtatctagaaattatacctagagaaaaatgaaagtcgtttcaaatttgaaatttgcccttttaagagaatgctgaatgtcatcgcagtatataatcactatataaatgtgctgacttacagttattttagtgtctatatgacatattttgaggaaagttggctgacgttatttaaatttaatatatattctatattttagtgttattgaatattttatcactgagcttttttctttaacctgaattccctgttccatttttcattcatattaatttaaataactccagatttctttcttatagtcattattagtagcagatgagattaataattcacatgtttattaaagatagtggcttagaaattttaagatatattgatataggcccgggcgctgtggctcacacctgtaatcccgcactttgggaggctgaggcgggcagatcacaaggtcaggagttcgagaccagcctggccaatgtggtgaaaccccatctctactaaaaacacaaaaattagccaggtatggtggcgggcgcctgtagtcccagctactcgggaggctgaggcaggaaaatcacttgaacccgggaggtggaggttgcagtgaactgagattgtgccactgcactccagcctgggggacagagtgagactctgtctcaaaaaaaaaaaagaaaaaaaaaggaaaaaggaaaaaaaaaagatatattgatacagataggtagatatgatattgtactttcatgccataagactacacaataaagttcctgaaagttcctggctgggcgcagtggctcacgcctgtaatcccagcactttgggaggccgaggcaggcagatcacctgaggtcaggagttctagaccagcctgaccaacatggggaaaccctgtctctactaaaaaaaatacagaattagccaggtgtggtggcacatgtctgtaatcccagctactcgggagactgaggcaggagaattgcttgaacccaggagacggaggttgcagtgagccgagatcgcaccattgcactccagcctaggcaacaagagtgaaactccgtctcaaaaataaataaataaataaagttcctgtgaagtatataaacatgtcaacaacaggcttgactgtcacaaaattctgaaagatgtcgcactctattcttatatagcatatgctaatttatttatttattttttgagattgagttctgctgtgtcacccaggttggagtgcagtggcatggtcatggtccactaaagccttgacccctggggctcagcagttatgccaactaagcctcccaaatagctgagactagaggtatgcgccaccacacctagctattttttttatttttagtaaggacaaggtctcattatgttggccaggctggtctcaaattcctgagctcagttgatcctcccacctcagcctcccaaagtgctgggattacaggtgtaagccactgcaccctgcctattcttataatcatatatttatatttcaaatggattttaactggttatttaatagtttaattagataaagtaattcatggctgggtgtggtggctcacgcctgtaatcccagcactttggcaggctgaggcaggtggattacctgaggtcggaagttcgagaccagcccaaccaacgtggagaaaccccatctctattaaaaatgcaaaattagcaggacatggtgatacacacctgtaatcccagctagtcaggaggctgaggcaggagaattacttgagccagggaagcagaggttgtggtgagctaagattgtgccactgcactccagcctgagagaacaagactccgtctcaaaaaaagaaaaaaagaaaacttttttacacatgggtatctcaccatgttgcccaggctggagtgcagtagctattcataggcacagtcatagcacactgcagcctagaatttctgacctcaagcaatcatcctgcctcagcctcctaagtagctaggactacaggtgcataccaccataaccagctttaattaaatgttttttatttggttattttttttaagttttctgtattcacacaaggggttgcccaaatataattttgctttgactattgagatctagtgaaagtggggtatatgaattctaattgcaaatatccaggctcagaggcccagcaggactttctaacacaatcttttagcggaagttagaaatggtatatagcaggagagtcagatttgagaagcatatgtagattcgaagctgggggaatatggcaggtagtttgtacaacatctaattcagaacattaaaattaagattttagtcaaactgtgtttaagttagttcttattttcctgtagatgcatctcacagcatcagtacaataccaaaaaagcacacaagaataagaatatgtggaatttctatacctattgacaaagcacataatttaaccataaacacaaagccataggtcaacaaagaaatgaagattccagttctgaaggtgagttttctgaagccaaagtggatacatgcaaaattaatatagttttactgtatatcagttgtcaccaatcagaaatggaaaacagatcctatttataattgcaaacaaaactgtaaaatagactttttaaagtctgggaatagacttctaaaataagctataacacttaaaaaggagagatatactatgttcctagataggacaattgaaaattctggagatgacagtttttcaaaaatctattgaggccaggtgcagtggcccatgcctgtagttccagtactttgggaggcctaggtgggtggatcacctgaggttgggagtttgagaccagcctgaccaacatggagaaaccccgtctctactaaaaatacaaaattagccaggcgtggtggtgcatgcctgtaatcccagctactcgggaggctgaggcgtgagaatcgcttgaacccggtaggcagatgttgcagtgagccgagatcgcaccattgcactccagcctaggcaacaagagcgaaactccatctcaaaaatagaaaaaacatttatcgaaatcccaacaagttgacaaatatatccacataaaaatataaaacttctgtattctgtgaaagctactataaataaagtttagagaaagttatttgccacctatgtcatgattgaaatagttaattgatcctgtgaatcagttagcaaaacataactcaatggaaagataggcaaatgatacaaataagaaattcacaaaagaagaaatactaagtctctagtgatgagagaaatgtaaattaaaatgaaacatgtttgttcatcaagttgtcacaagttagacaatcatatccaatatttttaaaggttgtaagactataaggaaatagccactgtcatatcatttttaaaggaatataaattatagggccttttgtttctttgggttttttttttttagagacaagatctctccgtgttgtctaggctggactcaaacttctggactcaagcaatcctcgcaacatcattaatagctgagagtagagacttgagccaccacacctgactatagggcctttttgaaaggaaaattgacatcatcaaaattttaaatatattcagtctatttctcaaaaactcaaagaatactaataaatgtgtactcaggtatatgtacagaaattgctgtaacattataattttaaacaatttaaaacagactgagtttccaaagttagggtacaatgaaagaaaaggtggcttatttatactctggaatattttccaagagttgaaaaggatgaggatacacacacacacacacacacacacacacacacacacacacacacacagtttgggtatccctaatccagaaattcaaatgctccaaagtccaaaactttctgacccaccaacatgactgatgctcaaaggaaatggccactggaagatttcagattttcagatttggagtgctcaaccagtaagtatataatgcaaataatccaaaatacaaaaaaaaaaaaaaagaaatctgaaacacttctgatcccaagcatttcagaaaacggatgttcatttgtgtgtgtgtgtgtgtgtaagcaggtgttgctagaaattcacttatatacaagaaaactttttgtgtacatatttgcatatatatgtacaaatgggtagaaacgatacatgattaatcttaatcgggaaggaaaagagatttagggaaggaagcagtaagtgagaacttttattctatttactcctgcacgtttaaatattgtttacagtgagtatatcaacatgtaagtgttaaaagacaataagctactagtgatttttaatataaaattaactataaaatattttaaatattagcaaataatatagcacactcatgaacctaattcccacatttgatagttgttacattttgccatgtttgtttaaaggtctaagtcataaaatcttataaagctaaaccccacccttctctttctcctctctctccaggataattactgttttatagtttgtggatatcattcccttacttgtgtttatacttttaccaagtgtgtatgtattcaaaaaacagttgttttgtgattttaaaatgtaaatgaatggcgttatgctccatgtattctgcaacttttcatcatacattaggttttggcgatttagccataatttggcatgaattcaggtcttttaagttttattccattgtaagaataaacaagtttgttcattcatgtctccattgatgagtgatagtattgtctccagtttttttatgttgcaaaccaatttgcaaaaaactctggcacatagatttttacacccaagaaaaagtttacctggacatacaccaaggagcagaactgttgagtcctagcgtatgtgcatattcagcttttccagaaatttctaaattgctctttaaaatagttgtaccagtttacattccaatcgacagtgtgtgaaaggtcccatttccccacatcctcactgttatgtatgatttttctcattgtcaaactaatggatataaaatggtatattgttttaatttgcatttcttaattactggggaggcagatcatcttgtcatatgtttattggccattatggtttcccattatgaatgtgtgtctctatcttttgtcctcttttctctgttgggttgtctggctttttctaaccaatcctttatatattctggatactagtcctttgttaattatctttttccaatatgtggcttgtcttttagtttatgataaacttgactgggctaagggatgcccatatagctggtaaatattatttctgtggtgtctgtgagggtgtttctagaagagattagcatttcacttggtagtctcagtaaagaatgtcactctcaccaatgtgggtgggcatcatccaagtttttgaagtccagactagaatcaaacggatgaggaaggtcaaatttgctctctctgcttgaactaagacatctatctactgatatcactgctcctggttctcaggctttcaggctaagaccaggacttacactgtcagctcccagttctcaggcctttggactcaagctaaattatgccaccagttttcctggttcttcaacttgcacatggaagactgttaaacttcttagcgtctataactgtgtgagccaatagctttaatggatttcctctatcagtcaatacataggtataaatatacatatatcctattgattctctttctctggagaccttgactaataactatgttgaaaacagagtaggtttgttaagacagaggagttctggacatgtcttgattgagatgtttatcagatatcgaagtggagatgttaaaaggacattggatataacatctggagttcagtacgtgatctgagctggagatataaatttcagatttattagcatagataaaatacttaaaatcatgacattgggtgatatcatcaacaatctattatagataagaagaaaggtcaaaaattaggtcctggggtgctctgatgttaacagattaagggaacaaggagcaacaaacacaagagacagaaaaggtaaggtaaggatgaatgaaagataggattaaaacgaggagaatatagagcaaaagttggcaaactatagctcacagagaccaaatctgacttgctgccttttatttgtttacatattgtctatggctgttttcacactgtagtcagtacaggcagagctgagtaattgcaaaagagattataaggtcctcaaagtttagagttgctatctggccctttacagaaaaagttggctaatctctggtatagagtcctggaaaccaagtttcattgaagaggaaatgataccctttgccaaatgctactgagaggccaagtaagatttagattaaaacttgcctgttggatttagcaacatggaggtaactgatgactttggcaagacagtttcagtgaaacaactggagagactctgaaggctcatgttgattttcccccaaattaatctctacattgactgtaattgcaattaaaattccagtaagatttaaggaactagtaaaactcaaaaatgtatgaggaataataaaggtccataaatagctaaatcag

SEQ ID NO: 96632 - DNA, 12898 bp, Homo sapiens
gttgtttctgccttttgaatgcctgattttgattcatttttgtagagtccttaggttttcctaagtataagatcatttcgtctgggaacaaggctaatttaatttcctctttttcaatttggatgccctttatttctttgtcttacctaaatgctttggctgattcattttgggcaaatacctgggaagagtgtttaattgctgggtcatatggtaattctatatttaactttttaaggaaatgccaaactgtctactacaacatctacaataagataaattttcaccagcaacttatgagggttccagtttgtgtacatcctcactaactcttgttattttattttccagttttaaatactattaatatctaactcagtgggtataaagttatatctcattgtatttatgatttgccttttcctaatgactaatgatattgtaaatgttttcatgtgcctgttgcccatgcatacatctttttgggagaaatgtatattcaacttactttcccgttttttatttgagttttatttttaaccaagaaataccttttaagtgatcagacctggaaccttgccaggtttaatgattatcaaagcagagccatattttgacttttgatgttatctattattatagtcttgttattcataattacttgaatattatcagcatctctagatcctttgtagttaaaacatagtaaagtattttaagtctttatactaaaatagtacgtcttgaaagttttaatatagaacactctgcttagcatttctttataacctaaaatgcaattaataaaagggtgtcatttcctctgccaattaagtagccttcattggttgatattgaacaaattgctgatacttatttctgtgatgtttactttttaaaaaaaatattttttgctttctttttaacacttccaaacaattgctaggttaatttgtcagttgcaaatctgaaataaaattgtttttagcagtctttcaaataaaattttcgttgagactaaagagatcctggattacaatcaacatttgtagatatgtcatacatagagaaccaaaaaaaaattataaatctgatataaatatcagtgtgccatacaggcatggtggctcatgcctgtaatctcagcattttgggaggctgaggcaggtggatcacttgagtctaggagttcgagattagcctgggcaacatggtgaaaccccatctctataaaaaatacaaaaattagccaagcatggtggtacacacctgtagtcccagctgtttgggaggctgaggtgggcggattgtttgagcttggtaggcagaggttacagtgagccaagattgtgcctctgcactccagcctaggtaacagagcgagaccctgtctcagaaagcaaaacaaaaacgcccaaatatcaatgtgctatgaaaccacacattgtatgtgttcattcccacaaattggagcattttaagaagcgctctaaattagtttatgtcttgcttttcttcttatgttctgtagattctttagtactccataagaaaaatttgctatagaaagcataaaaactgcaaatgcattatatcctccatgaaaccagctttaatttagttgctaaaccctgatcattgttgcactatacactcagaaaatgtatagcagtgactattttgtaaatatgaagagttcatattcagcacattcagcaatggtttatatctaaaatgatttttgaagaatgctttaaaaaacttctttgcctagagtctttaaagctggcactttaaaactatgtttcatggattgtcagttggaatggacttcaggaggtccataagtccatgaaattacagttttttaacatgaatttttctgaggatacatgatttttatcatactctcaaaagaatctaaaactcaaaaatggttaagagacacttaaataaaatgttgataaaggccatggtcattgattctcattcttcagaagctttgcatgtgtgagtttacctactcactaaaatgtacttgtaaatccaaaaccagtactcggtgcttttgcagtcatttgtaaacatatttggagaagcaaaaattttgagttaccttatgtgttcattcctctctgaggtcaaagaaggtgatggtttgccttgtttcagctgtcatactgtaaacaagtgtccttttcaatgcgtatttagtgccatattaatcacattttttgttgttgatttttctgtttaaaatggttcccaagcatagtgcagatatgctgtctagtgtttctaagcataagaaggctgtgatacacctgagagaataaaaatctgtaatagacaaacttggttcaggcatgagttacactgctgttgactgtgagtttattgttaataaatcaaatatgaagtatcaatatctgtataaatagttaaatataattatatatagatgtaaatataaattgttaaaatacggaatctttaaacagaaacatacattttagaaattatgtattggcattggttgaccaagatgatgtttggagaggttttcaggaaactaaccctgtctttttcccaggaacaataattctgcaggaggcagaacctgttgtctaggttggagtacagtggcatgaacatggctcactgcagttttgacctcctgtgcttcttctgccccagcttcccaagtagttcaggctacaggcacatgtcaccatgcctggtaatttttgtattttttgtagagacagggtttttcttgcccagactggtcttgaatttctgggctcaaacaatcctcccatcttggccccacaaagtactgagattagagatgtgagcctccatgcccagctatagttaaccttttgcagtgtttttttttttaacttaatgtttctaaatttcttctagggtaaacatttactacgtagaggctgtgtgtcatttacctcttcatggtatcacacatcagatacttctaacataatcatgataaatgttagtggtttcatggtcttatttacactccagctctaccagaattcactaatctacttcaagtttctgtctgaaatattctttttttttttttgatacagagtctcactttgttgcccaggctggagtgccgtggccccatttcagatcactgcaaactctgcctcctgtgttcaagtgattctcctgcctcagcttcccaagtagctgggacttacaggcacacgccaccacacccaactaattatatttttagtaaacatggagtttcaccatgttggccaggctggtctcaaactcctgacctcaagtgatctgcctgccttagcctcccaaagtgctaggattaacagacacgagccaccgcatcctgcctctgtctgaaatattcttattgttcatcatacagtatattgggctacagtactgtatttttctccagggtgttggtaaccatttatgctgagtttagccattttacttaagagtctactaattcactgtagataaagagttactactttggcatggtggagcatgcctgtaatcccagctctttgtgggaggccaaggcaggtggatcgctcgagtctaggagctcaagaccagccaagacaacatggcaaattttatttctacaaaaattacaaatattagccaggtgtggtggtgcatgcctgtagtcccagctactgaggaagctgaggtgggaggattatttgagaccgggaggtagaggctgcaatgagccatgattgtgccgctgtgctccagcctcagagacagagcagtaccacaaaaagagttagaagagttctttatctaacaaatatgagttgtatatttgcatagttgattgcattcatgaagtctaagtatttttttattcattaaatctaaaggaagttggggctctctgctttcgataagatgaagtaacaagtactgtacttatccttcacctaaaataatgattaaagaaaatttgtgtgtttatttcttaagacacagaacaagcatttgataaaatccaacatccattcctcataaaatcactcctgaaactggtgatagagaggaacttcctcaacctgataattagcatctataaggaaccaatggtaatattatatttactggtgaatgtctgaatgctttctcactaagatcaggaataagacaaggatgtctactttcactacttctgttcgatactgtactgcaggttctagccagtgcaattagttaagaaaaagaagtgcttctagattaaaaaacagaagtaaatcaatcattatacttcagtgatatgatcatctatgtatattattctatagaatctacaaaaaggtactagaatgaataattgagtttagcatgcttgcagaatataagatcagtatttaaaactcatgtagttttctgtactaggaacaaaaatttgaaattaaaatttaatagaagaaatattttctatcacataaataataggctatacttggggacaaatctgacaaaagatctggaagacctttactctgaaaactgtaaaaacattactgaatgaaaataagtgtgcagattctttacatatgatactaatagaatgatctgtttaaaattgattaattgtgcatcagctatatacataagccaaaacttaaacaattgtacaccttaaatatgtacagttaattttgttaattcaaatccctatactactgttaaaacaaattagaaaaacaaactaaaggaatttatgttcatatgacagtgaatgagttgtctgaactcacctcaatttttaatcctaagatgaatccatctctaaaaagtactgaacatctctgaaaagttatgaatatggtgtatgttttctcccataacctcatatatagcaattattgttattaggaaatcagaactagcttaaataatcataacattgaccatctgctttccttgttaaatacatttgactactaacttaatgttttcagttagccctctaaaatttgagaaagcaacatcttttttacctttttgccagatttctacaggctttctgatatatagttggccctctagatcattgctggcagtttgaaatatgtgtgattatgatagagtatttaaaatattttattataaatatttgatcaattttttattatataaattttcttcttttaaaaaaatacaatttagagatggggatcatactatgttgcccaggtcttgaactcctgggctcaagtgatccttctgccttggcctccaaaagtgctgggattatagatgtgagccactgcacccaggctagggtaaacttttgataaatatttttgattatgtagaataattttatggtgagttcaaagtagggttttgcaatttttattgtggagatgtatttatactgttagtttcaggatatctgtactgatcatctcctgtgtttttaatcatgatgtttccttttcaaacaacacattatgatgaaagatcaattttcaatgaaatcatttataagtatatactagctattgcaactttggggtttggaaaggaaaaattaaagtgtgttatgtttacatgttggaaacatgttagaaaaatcagtctaggattggaaggagatgggaagatttaggagtaactgctaatgggtacaaggtttcttcttagggtgagaaaatgttctacaatgatttgtggtaatggttacagaagtatgattatacctaaaatcattgaatcatatgctttaactggataaataaaaggcatttatattggaaaggaaatagtaaaactgtatctgtttgtagataacatgatcttatataccaaacaaaaatcttaagcagtcccctacagatctattagaagtaataaatggcttttcacactacccacatagacgtccatacggcgttctttctggattcccatcgtagcttaaagcgaaacttttcaccatgtctggagcccttgatgtcctgcaaatgaaggaggaggatgtccttaagttccttgcagcaggaacctgcttaggtggtaccaatcttgacttccagatggaacagtacatctctataaggaaaagtgatggcatccacatcgtaaatctgaagaggacctgggagaagcttctgctggcagcttgtgccattgttgccattgaaaaccctgctgatgtcagtgttatatcctccaggaatattggccaaagggctgtgctgaagtttgctgctgccactggagccactccaattgttggccacttcactcctggaaccttcactaaccacatccaggcagccttccaagagccacggcttcttgtggttactgaccccagggctgaccaccagcctctcacagaggcatcttacgttaacctatctaccgttgctttgtgtaacacagattctcctctgcactttgtggacattgccattctatgcaacaataagggagctcactcaatgggtttgatgtggtggatgccagcccgggaaggtttgcgcgcgtgtggcaccatttcccatgaacacccatgggaattcatgcctgatctctacagagatcctaaagagactgaaaaagcagagcagcctgctgctgaaaaggctgtgaccaaggaggaatttcagggtgaatggactgctccagctcctgagttaactgctactcagcctgaggttgcagactggtctgaaggtgtgcaggtgccctctgcgcctattcatcagttccctactgaagactggagtgctgagcctgccacggaaggctggtccacagctcccaatgctcaggccattgaatgggtaggagcaaacacygaaaggtcttaagctgttattgcacacgctcttaagcaacatggaaataaggttgacggaaaataaatgtcagtttaaaaaaaaaaaagtaatgcattcagcaaggttgacagataaaatatcaagatagaaaaatatattggatttttgagcaatattaatgggcaaattgaaaatgaagttatgaaacaatttcatttaaatatcttaaaaagaaataatgtacttaagtataaatataacaacagaagtgtggaacttatactctaaaaactacataacattgaaagacattaaaggaaactaaatggaaagacattaaatgttgatattttgaaaagatttaatatttttaggatggcagttctcccccaaattgatctaaaataaatttcctactaaaatcacagctaaattctttgcacaatttgacaagctgctcttaaaattaatatggaaattcaagggacccagtatagccaaaacaatcttgaaaaagaccaaaattgtgtttctcacttcccaattaaaaaacgtatgatgaagccataccaatatgtagttctggcataatgatagacatatctattaatggtatagaattgagaacagaaataagtcttcacatttatggtaacctgtctttctataagtgtgccatggcataaagaatagtcttttcaatgaagggtactagaacacctgcccatccatatgggaaaaaaaaaaagctggacccctatctcatatgcaaaaattaactcaaaatgaattaaagacttaaatgtaagaactaaaactgcaaccgttagaagacatagggatacatgtttatgactgggcatgggatatgagctggcaaatgattcttagataggtcaccaaaagcatgagcaataagagaaaagaataaataaattagatttcatcaagttttgaaagttttgtgctttaaaggacaccatcaagaaagtgaaaagacaacccacagaatgggagaaaattgcactcacatatctattttatcttgaatatataaagaattatttagactcaataatgatgaaaagacaaataactcactttaaaaaatgggcagaatatctgagtaggcagtttcccaaaagaagatatacaaatgactaaggagcacataaaaagatgctcaacataattagctatcaggtatattaaagtcaaaactacaatgagataccatttcactcctgctaggatgatgggtataatcagaaggacagagttttggcaaggatttggagaaccctaaggcattgctggtgggaatgttaaatagtgcagcctttttggaaaagagtcttgcaattccttaaatattttaacatagagttaccatatccagcaattctgctcctaggtatatacacaagacaaatgaaaatgtttgcacaaatgtttatagcagcattatgtataatagcctaaacatggaaacaacccaagtgtgttactgataaatgaataaacaaaatttggaatatccatgcaatagaatattatttgacaaaaaagaaatgaagtactgatacatgctacaacatgggcaaattttgaaaatatcgtgctaaatgaaggaagccagtcataaaagtacacatgttttatgattccatgtctgagaagtggcctgaacatgcatatttttagagacagaaaataaattagtgtttgcctgggacttgtgaagatgaggttttcggaagtgatgactcaagagtgaactggtttttttggggggtgttgaaaaatgttctaaaattgatgtggtgatgcctatacaactccaaatatactaaacaccattgaactgtacacttcaaagggatgaattgcatagtatgtgaattatatcttaaggagctgataaagaatatatatttattggtctgttttaccctttgaatggattttacccatatgtgatgtttttaccatgatacattaatcatttgccagagtttttgttccttaaattatgcatatcttacaaatgtaaaatgtcttatttgtcaatatcactactaaacaagaaaatagtctttaagcattgggaacctcactggtggatatgagttttacacgatcataattttcagagacccagggagaattatctcccattttttgattagttttctgtacactgttgcctaattatctttctgaaatacagattgatcaggtaactctctgatcccagcctgcttgtcattgtcatgcatggttagtccttcataaaatatgctattatggaccccatcttttactaaattcagagaaagcatgcccatgtctctctgtgttttttgtgtgtatgagtttctctatgtataattcactttagtttatttttcttcttttcgcctggtaaaatcttcaaacttcaagaaacagcatatctgttatttactctttgaccttttcattataccccatattccttggtgctttccaagttttttgttcgtacctttattataacactcctcgtatgttgttttcatgcttactcctccagtagagctatgaacttctcatgactttatttgtgcttctattccctcacagagtactttagatataataagagtctcttggattaatgagttcctaattttattgtgggtgctcagtaacatttttattttgatgatgttataattgaggtatgaatcagactccccttacactttctgcatataaatcttttttgtaaaagaattctatacattttaattatcctataaaaacttaattaccaatattgtttgtagatgtctgttgccagatttttaaaaaatgatgcattaccatccccataaatgataattgccttttgctttttttaatataaaaatgacaactttgcctgtcaaattataaaaaatgttttctcattattttcatttgccattctttggttactgtgctagagaatatatatgtctattgtttgttagtgtttatatcattgccctttaaaaaaattgtagttgtgcaagaatggatgtaggcaggctaaaatatggactctccagagatgtggatatgcctgggaaattgtcatttgatttacctgtcttcacaatcagcattttggaccgtgatacagttgttactacctatttacacttggctgataggcaggctcaaagctgtagcctcttattagagtcagtcaaggggggccagaatggcaagagccatttttttttttaaactgctggtcctacctcagcagcaccaggagagtggcaaagggggcttcttcaaagattttatggtatcttcactttatgtcaaagtctaagctatcagtatttttctttgtagtagttggtgtatgtgccaaagttagaaaatctttctctgtcttggttattaaaataagtggctgaattttctaatacctttatgggttctgttttgttttggtttgttttttcatttgtgtggggtttttgttgttgctgctgttgttgtttttacacttttggttaaagtgtgacaggaaaaacttttctttttttccctgaaaatggttctgtttttatgccagcttaatgtactaattccctcatttccgtctaaaaaaaaaatcacctttattttaatactatattgccataggtacttggatccgtgtttgaactctgtatttttctgttgatctgtatattagtaccaaattgtttctaaagcaattaacaaataatacattttaatacctggtagtaaactgctcccttaatcccatcattattactcatctatttcagaaggtactttcttattattcttccacatgaatttaaaaatcatattgatattttcaaaatatcacattggaatttgtaggttctttaggaagaaataacattttagggtacatttttgttttcttatcatatatcaagtttttcattttaattatttatttcatagctttttattatcgaaagtttcaaacatacacagagaaagaatagtaggtataatgagctccacgtttctattctctatctagcttcagtaattatttacatttgccaaacctgatttaagtacctctcctatgaagcaagtcccagatgtcttatcatttcatcctcaaatgctctagattgcctgagaatggtctcaaaaaacccaccatcatattattcacaatggtaatttcttactgctatttaatatccaatttagatttgcatttcataattgtttcaaaaatagccttttacagtaagtttatttgaatcagcatctaaagaattcaaacactatatttgtaccttgtgtcttttattattactgcttttctctctctcgtcttttttttttttttttaatactgtcattgacctttttttaaaagagaaactgtgttatttttccaggagaatatctcactttctgaatttggttagttgcttcatatttagtatttgctgagaatttgagctagagatttggttaaactcaggttttatttctttaggcaagaatcttcttaaagtgatgctccatcatttccattttatctcatctgtgagccatcatatctggtggttccacttttaatgatgctgagattaatcaatatgttcaggtgtaggttttttgtttgtctggttttctttctgctattgtatatagaacattttccttactgtttttctagtaggttattattggtatctgagaagatttttaaagcatgtgttttagtaactggacatctgaccaaactctcattactgtgtcaacttaaaaatcatgagatctgtaaatctggaaaagagaactttatttctgagaagggttacaacctgtaggctgggaagcacagcctctggattagatcaaaagtagccatttcaaagacgatgggtgagagaggagttttacactaaatgggttagctgaacatacatatttaacaggttataggaggagctatgagtattcatgaaaggggttacatgtatgtatgataagcaaacataacatgttacatatgtcccatgttcgctttggaatggagacttaacattaaaaatgtggtaaaatcagactctatacatcaaaggtgaaacttaggactcaaaggtgctttgtgcacattctctgtaaactgaccagtccatggtcaattgtcgtttatcaggaaggattgctttgtaagttggtcagcagtcatgtcaaaaccatgaaaagggaggggaatctggccacaacatcaggcagttggtcagtggaagaattttccattctttcttttccagggctggtgtttgtttaactcttaggaaaaatagtctaatgacaggtagtgaggaagagtgtatactgagacgtgaccaacctcctatctcatcaaggccgggaaacttcgtttttaaagtttttctggggcctccttagcccacagacatctgttcagtaggttggggcacttaggattttactttatctcacaaatatctaataaaatttttgggtgatcctcttcagtgactagtatagaattgtcacacttgagctttggagatgaggtgtctcaaattaaaccctaggatggttatttagtctttctgtgcctcagttttttttttttttaatctatgaaatggagatcatgtgtctacctcataggtttataatgaagattgaatcacttcccataataatcagaaactacatatttgggctgggagcagaggctcacacctgtaatcccagccccttgagcccaggagtttgaggttatagtgagttatgagcatgccaaagcactcagagtgagattctgtttcaaaaaaagaaagcagatgtttgttttttaatttttccatatcttttgcagattgtgatattgtgctttccctttttttcatattttaggcctttaattttaggatgtaattatataggccataacagttaaaaaatagcagtgataacatgcatcctacaataacatgaat

SEQ ID NO: 96633 - DNA, 159941 bp, Homo sapiens
  misc_feature (1)...(159941): n = A,T,C or G
tctttttgtagaatttgcaagtgcatatttagagcgctttgaagcctatggtagaaaaggaaatatcttcatataaaaactagacagaatcattctcagaaactactttgtgatgtgtgcattcaactcacagagtaaaacgtttcctttgatagagaaattctgaaccactctgtttgtaaagtctgcaagtggatatttggagcgttttgaggtcttctttggaaatgggagtatcttcacataaaaagtagacagaagtactctcagaaacttctttgtgatgtctgcactccactcacagagttgaaccttccttttgatagagcagttttgaaacactctttttgtagaatttcctactggatatttagagcgttttgaggcctatggtagaaaaggaaatatcttcatagaataactagacagaattattctcagaaactactttgtgatgtgtgcgttcaactcacagagtttaacctttcttttgatagagctgttttgaaacactcttgtaggatttgcaagtgaatatttagagtgctttgaagcctatggtagaaaaggaaatatcttcatataaaaactagacagaatctttctcagaaactactttatgatgtgtgcattgaagtcacagagtataacctttcttttgatagagcagttttgaaacactctgtttgtaaagtctgcaagtggatatttggggcgctttgaggcctacgtaaaaagtagacggaagtgttctcagaaacttctttttgatgtctgcactcaactcagagagttgaaccttccttttgattgagctgttttgaaacactctttttgtagaatttgcaagtggatatttagagtgctttgaggattatggtatcaaaggaaatatcttcatagaaaaactacacagaagtattctgagaaagtactttgtgatgtttgcattcaactcacagagttgaacattcctcttgataaagcagttttgaaacactctttttgtagaatctgcaagtggatatttggacctgtttgaggccttcgttggaaacgggatttcttcatgtaatactagacaggagaattctcagaaatgactttgtgatgtgtgcattcaactcacagagcttaaactttcttttgatagagcagttttgaaacactctttttgtagaatttgcaagtgtgtatttagagcgctttgaaacctatggtagaaaaggaattatcttcacatagaaactagacagaagcttcctgagagactactttgtgatgtttgccttccactcacagagttgaacattcctcttgatagagcagttttcaaacactctttttgtagaatctgtaagtggatatttggacctctttgaggccttcgttgtaaatggggttccttcatataaaactagacagaagacttctcagaaacttctttgtgaagtgtgctttcaactcacagatttgaaccttcttttcaatagaggagttttgaaacactctttttgtagtatttccaagtggatatttagaaagttttgaggtctatggaagaaaaggaaatatcctcatggaaaaaccagaaagaatgattctcagaaactagtttgtgacttgtgcattgaactcacagagtttaacctgtcttttgatagagcagttttgaaacactctgtttgtaaagtctgcaagtggatatttggtgcgctttgaggccttctttggaaatgcgaatatcttcacataaaaagtagaccgaagtattctcagaaacttatctgtgatgtttgtactcagctcagagagttgaacgttccttttgatagagcaatattgaaacactctctttgtagaattggcaattggatattttgagcgctttgaggcctatggtagaaaaggaaatatcttcatataaaaactagacagaatcatcctcttaaactacattatgatgtgtgcattcaactcatagagtttaacctttcttttgatagagcagttttgaaacactgtttctaaagtctgcaagtgggtattttgaacgcttggaggccttctttggaagcgggtgtatcttcacataaaaagtagacagaagtattctcagaaacttctttgtgatgtctgcacttaactcacagagtggaaccttccgtttgatagagcagttttgtaacactctttttgtagaatttgcaagtggatatttagcgagctttggggcctatggtagaaaaggaaatatcttcatagaaaaactgcacagaagcattctcagaaacgactttgagatgtgtgcattcaccttacagagtttaacttttcttttgatagagcagttttgaaacactctttttgtagaatctgcaactggatatttagagcgctttgaggtctgtggtagaaaaggaaatatcttcacataaaaattagacagaagcattctcggaaactactttgtgatgtttgcatttgactaacagggttgaacattcctcttgatagagcagtcttgaaacaccctttttgtagaatctgcaagtggacttttggatctctttgagaccttcgttggaaacgggatttcttcatataaaactagacagaagaattctcagaaacttctttgtgctatgtgcattcaactcacagagttgaactttctttttgataaagcagtttcaaaaaactatttttgtagaattcccaagtgtatatttagagcgctttgaggcctgtggtagaaaaggaaatatcttcctagaaaaactagacagaatcattctcagaatctactttgtgatgtgtgccttcaactcacagagtttaacctttcttttgattgatagagcacttttgaaacactctttatgtagaatctgcaagtgaatatttggacttttttgaggctttcgttggaaacgggatttcttcatataaaacttgcattatttttgtaaccagatagatgtcaaagggcaaaatttacccagtaatactaatttttaaaatgagatttatataagagttagtgatcggttatacttatctaaaaacagtggaaactgtattagttaattcagtgggctaatatagttttaataatgaaaggacatcttaactcacccctaacctttcaacaataatgagaaataagctataagttatgccaaattgtatgatggttttcatgaaatagcccaaacttagacaactcgtttaggctttgcagatgcaaactgtgatagatcttccctctctttcattcctggtgatttatgtgtttggtacattgttttgttttctataaaaagaaaaaaaattaaaacacagttggaagccaaagtcgatttaacctggatagatatagctttctagttgtagaggaaatgctaaaaatctcattgtgacagtgtattgctttcttggaaggcttgataattgttacttagtttagttttgatttatatttagttttgctcaaagcaggaatttgaaaagctttatgaaacatagacatatactttcatttttatcaattaatgaaattacacacttgctaaactaaacatctgttgtgttgcaagtgctagggatgcagttaccactcacagtccagtggatgtaagtggtaactacattagctcagagaaaaatttcagaagaaatggagccaacagttcctaaaatgaagtttgctttctgtcagcaaaaggttcgcagatgggtttgccactttaaagagctttggaatagatttattacttcatatacttaacatgaagagatgcatgctctttttgtaaacggtaattgttttaaaagttgaaaagaaaacctttggagaactcaaaaatcttccttgaaataattttactcagagcattggcctctccctggtttaggaatcattcttgccagagattcaatctcgaaagtaagttggaggtgggaaggggaggatgggagaactcaaatcatcgagcacatgtgttccagaaaactggagctatggaaaacttctacctaatgtgctgtcattgtgttttgtggaattggcagaagctgtgtagtcagtcaatcattctgtgcctattgtttcagtaatgctgcctaaaaggaaaattttaagaaaatgtctgatgaaagactgatgtaataactttaccctgggagccagagggaattactagatgattttaattaggggtgtggttgactttcattttgaacatttcactctgaccttggtataaattagggaaggggcaagaatggcagcagaaacaacagtggagatgtattaatagtttagggaaaaggaaatgaagactgaaattaagatgaaggggtagatgtgaaaatctttcctatatggacttaacagatgtctagaatattttgctgttactgaggtgatttctgtttgcctctattagaaagcatactatatagattgacagaagtgactgagaaagcccactctgtctgctctgttttcagagaactgacttttgaaatgtctagataaatcatttaaatcgttttagaacacagctttggttctgagacatgaaatctcttgaacaatgaaaatggcattttgtaacaggatttgacattaacagataaaggatgtattaaagtattaaagtgttttgtttatagaatttgataaccttgataacatcttatatgttacatatatgttacttagtatatttttaatacttagtacttagtattttgatacttagtatttttcagggatactgaaagtctattgattgtgctaaaattgcagcagatcgtctcactttattgtattttaaattagtaactgtcgaggtgttgactcttgtacaaaattgggaaagcttctccattattatcagaatatggcactttggccaacttttaaaaaaatatataaaagatatttttagatgatagcattatttgcataatataaaaattagatttgatgaactaatgttttccatttttaggaaattgtaattaatgtatgaaaaaaattagaaagacaggatacactacataaacccaaaagatatctttcagtttgttgcttgtcttaaggttcttttttgtgaattgttaaatgattgattagtaaaatatgagaaccattttgatcataattgaatcttgaggagatttatcttttatttttgttttgatgttaagtttacctcaagctatctgattactttgaatgaatgtctttaatttccttgtgtcaaattcttataaaaaggcattctcttaagaacagagaagaaaatagagatacatagatatataattaatattgttgtaataaaacagatcataaattcacattttgatgatatgctgtcaagttggtacacagtattggctctgacttcttatttcctagctcaatttgaggtcatatttcaatattaaatacttttgagttgtttctgtatacttaaaagatatccttggttccttatagtcatgtggctgacagaataaagtacatacacttctgtatgtaaccagtttcacagtggcttagctataaatcagaatttatcttcccaatttattcatcatcttaggactcggtgctacaagattggttgttatacaattttacatttagaagtttttccatttttatttacaaagataatagtctcataagtgaatgctttttcatgaactcaggacactcccttttactctctgttttgctcacctttttctttacttttaaacttagtgacataccctatgtccttagaaccatgtagctagctttgatcacgtaatgtgtcaggtttttatataatttcttgatttgaaaaaagagaaatagaaccttatatttttaagtattgcctccctatctgcccttcagctcgttttacatttagtattcaaatatgttcggtgttcggcctttgctgtttttactaattttcttccctgcttttagttaacagccaggtccttgcctgctgtgcagtctgatgaaagacttcagcctctgctcaatcacctcaggtaatataaaggcacagcctgttatgcttataaatccaagtgcagtaaagtgaataaagtatattaaagtggtgaaaccctttcaattactaaaaacttattttttttcttgctttcattccgttattcaaattgaagttcttaataccatggactcgttacccttgactttagggcactgtagaaagctcttttaattcaacaacagtgtgctgaactgcttgataagtttaagttaaatgagtagagataactaactttacagaaagatctcaaatgaatgagctatttatgtaaatacaaggttaaggcatacttttattgaggatagatgagttggatggagtttgtttctaaatacaaaaataatatagtctcattatttaaaaaataaagttagaaaatacaggaaaggaaaaggaaaaccctatcattactactcagaaataatatttatcctttctatgttttttaattttaattttaattttttattttttgagatggaatcttgctctgtcacccaggctagagtgcagtggtgtgatctccgctcactgcaacctccgcctccccgattcaagcaattcttgtgcctcagcttcccaagtagctaggattacaggtgtggggcacctcgcctgtttaatttttgtatttttagtagagacagggttttgccatattggccagactggtctcgaactcctgacctcaggtgatccacctgcttcagcctcccaaagtgctgggattacaggcataagccaccgcaccctgccctttctatgtttttgttgttgttgttgtcattgttgttttttactcagtgttgaaattatagtttatgtgactactttttccatttttataaatattgtaatattttttcctttagtattaaaatctttctaaaaacattattgttagtgactacattatattttcttgtatatctgtactatagcatatttatctccctttgggaagctttagaccatttccagttttttattcctactataaaataatgtgatatgttaacctttatttgtattttagatcattttcttagggtaggttttcagaattagaattactttgtcaaagggtgtgaaccatttcaaagatttaagtgtatatgtatatttctttttcaaaatcttattctacctatacactcatatttgtataatactgccatgtaactatactctgaacaagatagggcagtcaaaacagttgctaataggttagacatagagatactgttgtgatactgtgcattttgtcggtaataataattcattttccttatttttgaggtgggattaactacctgtattctttgctcacttattgatagcatctcctgatcttatttgcttttacatactttaaaggatagtgactctttgttgtatttgttacatacattttttctaaaattctaaaattgtattagtcaacatacctacattttcaggttttatgtagtcaagcaccaatagtgttttcctttatggttttgaaaaattatttttaaacttctctttcagaagtgtggatagatttttactttcaccagaaagttttagttttagttttctttttctttcttagtatttctttatttgtcctttctttcttcctcccctctccactttccttgcnnnnnnnnnnnnnnnnnnnnnnnnnnnnnnnnnnnnnnnnnnnnnnnnnnnnnnnnnnnnnnnnnnnnnnnnnnnnnnnnnnnnnnnnnnnnnnnnnnnnnnnnnnnnnnnnnnnnnnnnnnnnnnnnnnnnnnnnnnnnnnnnnnnnnnnnnnnnnnnnnnnnnnnnnnnnnnnnnnnnnnnnnnnnnnnnnnnnnnnnnnnnnnnnnnnnnnnnnnnnnnnnnnnnnnnnnnnnnnnnnnnnnnnnnnnnnnnnnnnnnnnnnnnnnnnnnnnnnnnnnnnnnnnnnnnnnnnnnnnnnnnnnnnnnnnnnnnnnnnnnnnnnnnnnnnnnnnnnnnnnnnnnnnnnnnnnnnnnnnnnnnnnnnnnnnnnnnnnnnnnnnnnnnnnnnnnnnnnnnnnnnnnnnnnnnnnnnnnnnnnnnnnnnnnnnnnnnnnnnnnnnnnnnnnnnnnnnnnnnnnnnnnnnnnnnnnnnnnnnnnnnnnnnnnnnnnnnnnnnnnnnnnnnnnnnnnnnnnnnnnnnnnnnnnnnnnnnnnnnnnnnnnnnnnnnnnnnnnnnnnnnnnnnnnnnnnnnnnnnnnnnnnnnnnnnnnnnnnnnnnnnnnnnnnnnnnnnnnnnnnnnnnnnnnnnnnnnnnnnnnnnnnnnnnnnnnnnnnnnnnnnnnnnnnnnnnnnnnnnnnnnnnnnnnnnnnnnnnnnnttttccctgaccattaattagttcacctccgtagtctgaattggaagtcttttatagatattttcataatatcccatgccttcctctgtattacagaatttgtgatattgttattgtttgtttactgtttgatttctccattatagtatgcttgaaggcttgtaaagtgatgttcatatttgtattttcaatagcggagacagtatctggtgtatgataggtattatatgttttgttgaatgaatgaatacaagttatattagtgaaattttgttgtttttttctgcataaagtttttataatttataaatcatcttgtcaaaatttttttcctagaaaaccactggttcaaaaggtaaaaacctaaagggtagaatctagcttctagttaatctcacagttgattctgagagataatgatggattctccttcctccatctgaatatggtaattgccagctagaatttagattaactactgacacatctctttgagtccttgaaagttgcacaaactgtaaattcatttaagggcttttattctctgtggatttcactcatgactggttgctaggcaaccaggactagatgctacatgtaatgtgcacccaccgctgttgctttattattattattattaaacaaaacagtttctcattttattaccatgtcagagacatgtatatgtcgggtggcagctgatgtgcatagtttgacacttcctgttctacaaagtaaccttgtgataacgcctttcaagaatattgaattgttgcttttgcttgtctaaatgtaatgttttcattttatcttccttttgcttagttctaaataggaaataatattatttggtttgagagattttaataataattttgttagaaaaaaattgatttgcatgaactgtgtaatttaaatgttacctagaggcggatggacattaggaggttgataccgagatcattattaggtctaattttgtttattgcctctaatgaggaaagaggaatgatgagtagcattttaattaaatttgtcaataaaactaatttgggagataatacaaatacctgtaaaaattgaagtagcaatacagagaaattctcaaatcattttacaggatttagagactcaaagagaattaaggtaacactgccaatcaaataatctagaatatcacttaacaatatatattattttgagactgcagaagtgatgtgtccaaactgttttagttgaatccaattctcaagtacagaaaaatatcgtgcttcaatatcttatggcagtacaactgtgtttttaattcattagtatcgtccattcactcattaattacttagtgcccgttatgtgcttagaatttaaagaaaacacacaatctctgttttcagagagttgggtttgatttcatttgagagacaggcacttgaacaagttataaaatttgtatcattttctatcagaattaaatacaatgtacataattttgttaattgaactgtctccctcgtggaattatctccttaagtaatcgggccataacttaattgttttggtttccatgcattctagcacagtggctcacagtgggagctcagattggactgaagtttattccttttttgttgttttattcttagtcagctttctcaggctgaatggactgaactgtaatctcacttgagggataatattgtcattaactaagaaggagaataaagaaaggaagacaaggcaattagggagtgaatatgatgcttagatggtaatttcagtagtttcagacattttaagcttgagatacctatggggacctatgtgggggatgtttagtaagcagttgaatacagacccacagttgaagagtgaggtttacatcagggagacatttgctaatcatcactgtgcaggtcttggttaaaatgaagggaatggttgagatcactgaggaagagagtatagagagacaagaaaagggtgaagggttctgaatcgaacccacagaatatcagcgtttaaataacttgtgatgggcagtgcgggagttgggatatgagaaaccggtaaaaataccagggaggagctttgaacaaaaaaggatagtggtatgacgggtgctaatggtatggatacaagtccaagtctcatgaggatttgaggaataaataagaaatgaggctgtggagatataggtagtaggctactcttggtagagcttaattctgaggacatgtcaggaaaaaggactgcatctgtgagcttcatggttgaaggaagtgttttattttttccttaagattggtaagatgagcatatttacaggttaaggcagaaatgagtagtatgggagtaagagggaataattgaaggggcaatgttttaggagggttagaaggggataggccaggaaatcaaactgactggagtttaaaaagtactttccaatctagctttttggtgcatactcagaacaatccagtgtggatggtagatggttatttatcataatccctattttacaggttgnnnnnnnnnnnnnnnnnnnnnnnnnnnnnnnnnnnnnnnnnnnnnnnnnnnnnnnnnnnnnnnnnnnnnnnnnnnnnnnnnnnnnnnnnnnnnnnnnnnnnnnnnnnnnnnnnnnnnnnnnnnnnnnnnnnnnnnnnnnnnnnnnnnnnnnnnnnnnnnnnnnnnnnnnnnnnnnnnnnnnnnnnnnnnnnnnnnnnnnnnnnnnnnnnnnnnnnnnnnnnnnnnnnnnnnnnnnnnnnnnnnnnnnnnnnnnnnnnnnnnnnnnnnnnnnnnnnnnnnnnnnnnnnnnnnnnnnnnnnnnnnnnnnnnnnnnnnnnnnnnnnnnnnnnnnnnnnnnnnnnnnnnnnnnnnnnnnnnnnnnnnnnnnnnnnnnnnnnnnnnnnnnnnnnnnnnnnnnnnnnnnnnnnnnnnnnnnnnnnnnnnnnnnnnnnnnnnnnnnnnnnnnnnnnnnnnnnnnnnnnnnnnnnnnnnnnnnnnnnnnnnnnnnnnnnnnnnnnnnnnnnnnnnnnnnnnnnnnnnnnnnnnnnnnnnnnnnnnnnnnnnnnnnnnnnnnnnnnnnnnnnnnnnnnnnnnnnnnnnnnnnnnnnnnnnnnnnnnnnnnnnnnnnnnnnnnnnnnnnnnnnnnnnnnnnnnnnnnnnnnnnnnnnnnnnnnnnnnnnnnnnnnnnnnnnnnnnnnnnnnggtaaattatatcgttcactgatttggtagtttggagatacataaaggtcttggaatatgttcccatgaatgtagaagtttattgtaaataagtatctttgctatcctaatgatgctaccatgggataatatttataaaaatggcattaggctagcaagtgtgcatgataaagatgtttatttttatttattatctcacttataaatatgaagtataaacaggtacaactagagaggaaaacttgcagcccatattatacatgtgataacttttagttgtatgattgagaatttttcccccttaaaaataacgcctacagtgtatgtatcttcctcctttatcccttgacttcaagatatgaagtgcattgggggacagcatattataagtcactgttataagtcacatattataagttgctattattggctggacgtggtggcttatgcctgtaatcccagcactttgggaggctggggcaggcagatcacttgaggccaggagttcaagaccagcctgtctctactaaaaatacaaaaattagcccactgtgatggtgcgcacctgtaatcccagctgctcaggaggctgaggcaggagaatcacttgaacctaggaggcagaggttgtagtgagccaggatcatgccactgcactccaggctgggcaacacagcaagactctgtctcaaaaaaaaaaattgctattatttaatgttttgtcattaaagaataactcatttttaaaatgtgtatttgtcacaccacaattttgtgagcatatttcagcccaagaatgaattagaaatcaaacaaagataaagcaagctaagacaagtattacttatagtaagtacttggactgcatcatatcgattaacttttagtgcatactgattttgcaagcagatgtttatacaaaccattattttaaaatcatttaaagtaataaaagcatcttccttcagttggtattattactacttttgtaacattccttttccgaaggcagtacattttgttaatatgcacacatgtctacttatttttctaaagaatatgctttcacaaattttttatcagacatgtaatctctgtaagaaagcttttcttactatccaaagtggtacagctatcattgttttctttttgaattagttctcattttgaaatcagaaaattgtgtgggcattcatgtgtctattgtggtaaatatgaaaataaaygccagaaaatggtttagtagataggggcttcatcagttgagggctgaaatgaaagcctcattagcctggtccacatgcttcagttgtttgttagctctttctcatcacctgtttccagtctctggccgtaccttgaacatttatttccttttctacatgcagcagcacaagcttttagttcactgattatagtgaaggttttccaggtgctgtgtaagatattaataaattagaatatattgttttccattgtcacctttgaattacaattttttcacatctgtatggaaaatgttaatgccttcttagaggtatacttgtgaatagtcagcattttgttagaatcagccggttgtgttaagggcactataattggtactgattatgtacaaaagaactaatagatgtggtcccttaactcaagatgcttatatttttaaggggaaagaggaccaaaatttataaatagtcccccgctccccacccacacacatacccaaagctgcaccggaatagttgctgcaagttaagtagatagtaaagagagtgataggaagtcttgtgagaagcagtatctgcatgtggattatgttacaaatttaatgtcatttaatgtttttggtaaaatgtatagtcacaatatataaaatcacctccctccctaatgcaaccaacactaagcttcttttgtgaacttgatgcatactttaattataaagtggttaacttttaaaawtttcacttaatgtgttataactaggtaataaagtagaaaattgattttcatgactccaattttaagtatctgcataatagtcaatcaagaatagatatatctacttttacttagccattcccattttatcagatatgtatagcttttgggattgaataaacctgtggcaaaaaattatagaatgtgaacagtttctgtgtgttcaggcaaagtaactgagaagaaatactgtagtaactttatgtagaaggaattgcatcatagatgttttccagcagatcagatggaggtaagaacaaagaacagcagcagcctaggtggtgtatagctttgaaaatacagggaagttcattagtctaaaaatgccatcttgcccaagtgagaaagtggcagatttcttaacaagtgaacgagtgacttgaaaaaggtggaattgaggaagccaaatgttaaagcttattagcgtgtgtagattagagcctttatagccattttttcaaacactcctttagaatatttaaaaatcactcatgtcatatgtctgtgtgcataagtacattgtatatatattccctgatatttagcaatgacactagcatttttatataaagaaaacaaaacaaagagtgaccagtgtattagttttctattccagccttaacaaatgccacacatttagtggattaaaacaatgcccatttattatctcacagtctgtaggttagaaattggacatgggtcttgccaggctaaaatcaaggtgtcagcaaggcttatattccttactggaggctctggggaagaatttacttccaagtttatttaagttgttggagatcctgtttttatgctggctgtcagttgaagcctggtctttcctcctagaggctgcccacattccttctcatgctttccaggatttcctagaggcctctgaagtccttgcctgtgggtcccatctcagagccttcccatgcttcagatctctctaatttatgctgctgtgtcacactgcttccaacctgagaaagttttctgcttttaaaggcccatgcgattagatcagactacagggatatccaggataatcttttcatctaagatccttaaccttaattacatctgcagagccccttttaccatgtaacctaacacattcagaggatccaggaattagagcatatgtggagggtcactgattcggcctcttatagtgaaggttttcttttgaggtgggagtatggagtgaaaacagctttttgtatcacttttaatcaattttacatgtaagtcaccattcttaattcatgtagaatactaacatttcctggagttttgtagctaatttactttactagtttaatatatcttaaagttgaaaaaaggtataagaaatgagttcttaacagaaatataaaaagttactgattttctttttaatgatattgaaggaagatagaaaaatctttcctgtcttatcaaccagctacctagaacaaggcaaataaacactgctgtaaatagtagactttgtaatgaggttacatatagtggctgagatgtactgaggtactttgtgtgagagctgttcagtaatacatgctcacacaccttttagcattctaagagtttgttttatttattgtttattgaacacatattaaaggaactcttactggttgcctcacatgatgttaggttctagggatacatttatttctgcctttgtaggactgaatagttatcagtaaaaagagaagtttaactaaagtaattataataaatcatgatgactcttggcatagtggaggtataatagttttaatatctgcagttgttaaatttcctattcttcactcattgggtttctttaaaacattgatcactctctggttaagttataaaggaaaattagtgattttacactgtgttagtcataaaacactaacagtacaaaataataatgatgttatgggaaataatattcttaaaaggcctgagaaagcattgtggcagtatttgtgatatattagcaacaaaaagcaacttgttgaatgttatgtaatagaactttctgtgatgatggaagtgttctatacctgtactgtttaatccagtagccaatagccacttacagctattgagcatttgaaacatggctagtgctactaaagaactgaatttcaaattttatttaattttatttaattaaaattttaatttcagcaatcaattttagttaatggtatctgtatttggtagtgtagttccatattgtatttgaaatttatttaaataattacatatttttaaaaaatcatagtagtggggcttagagtttcaaatctgaggtagccctggaaaagctatatgtatggagctgttataagcaattgtggccactgagggtcatgaggctcctaagtcagggcagctctcacatgtactggtggggattttgcctctgtacctgaatgaattgtccacctgtgcaggactgtggtaaggattccatggaagaggaatacttgaagctgcccagctagcaagctgtgattcctgtcctggatctttccaagtaaactgatgccacaaggggtctatggcatagtcttgtgagtctaaatgtttagttaacctaagagcaccccctggcattccagaaccaattaacctttatttactcagagtaaacacaaaacaaaattaataaattgagctgaggaaaggcagactaccaagactcaccaaaagtttaatgcactctcaattgtttctaattactatttggaaagtagtgctagaaaggataatacaagatgaattttaaatgcccacttttagtagcggtatcttggttcttgacttactgcatacatacaatctaccaggaacagtcatcaaatgtgtacagtggtggaaacaaacaaaaatgtgtatagcggtgcatcttctcaggtcttattgaggtgtgtccttaatcatccaatgtaaagtcaccctcacaagtgctttataatattttctcactatgttatgttttcttctcagcaacatcactagttggaatgatcgttttaatttgtttgcttgttcagtatttttttgcctagggtatgagctccattagatgaaggaatttggccatcttgtttaccactatctccccattacttataagaatggcataataggacctcagtaaacacttgaatgaatgaataaatgaatgaatggatgagtgaattatagaaactgtcaggttaaaaaattttacctttaattccgttttccaagctgctaaatattgagactgaatgagatggtaatttggacaaaaagctgatggattttctgttatttccaaaggataactatgataaagaaatgctttttatctttgtagaaatgtactgctgtttttatcttttgttttgggacatagaactcttctttatgcaatcaggaactaatcatggaggacagagagtacttactattcctctgtgtgatctcagaagtgctccctctttttcttaccaatgacttattattggggaacctgccccgatattcacataggttcttttctattttccttaagcgtcagccagcttgagaaataaagggacagagtacaaaagagagaaattttaaagctgggtgtccaggggagacatcacatgtcggtaggttccgtgatgccccacaagccgcaaaaaccagcaagtttttattagggattttcaaaaggggtgggagtgtgcgaataggtgtgggtcacagacattaagtactttacaaggtaatagaatatcacaaggcaagtggaggcagggcgagatcacaggaccacaggaccaaggcgaaattaaaattgctaatgaagttttgggcaccattgttattgatagcatcttatcaggagacagggtttttgagatcaacaggtctgaccaaaatttattaggcaggaatttcctcttcctaataagcctgggagcgctatgggagactggggtctatttcagccctgcagtctcgaccataagagatggctacgcccaggggggccgttcataggcctacccccaggcgggcattctctttctcagggatgttccttgctgagaaaaggaattcagcgatatttctcccatttgcttttgaaagaagagaaatatggctctgttctgcctggctcaccggcggtcagagtttaaggttctctctcttattcactgaacaattgctgttatcttgttcttttttcaaggtgcccagatttcatattgctcaaacacacatgctgtacaatttgtgcagttaatgcaattattacagggtcctgaggcgacattctcctcagctgacaggttcaagagatgaaagtaaagacaggcataggaaatcacaagggtattgactggggaagtgataagtgtccatgaaatcttaacaatttatgcttagagattgcagtaaagacaggcgtaagaaattataaaagtattaatttggggaactaataaatgtccatgaaatcttcacaatccacgttcttctgccatggcttcagccggtccctctgtttggggtccccgacttccggcaacaagttattcaaatgttgaccacttgtattcaaaaacaaaaccagaaacaaaactgttacataccttgctcttttgatctatgaaatgaaacccttaaacattatgaggcattgtcaatggctatgtgagactgaagtggtgtataaggaaaggatgtaatgtgactgttggactgtgacttttaataataatcctcattaactgttccagcacctcctaccaaagctcccaaaacattgtggcagttattggggaacaaatgtgaggggataatcctagaatgccataaatgtgtaatagctcatctcagtagcattccacattgtgtaaattatttgtgggggaatgggaagacgttgtccatcattttaacgtattaattttgctggatgttggaactttattccctcgacctttcactttttcatgactagcctattatgaatcctttctttattgtagtcatttgactatcctggacccaacccaaaaccaaaaccatctgtatttgggttcatcatattactagaatatatactaagaatatagagagtaaaggaacataaaatttttactcatgaaaatagatatgtttgttgggggtcttaaagttatatggtgaaaataccaatgtaaagctgtagtttgaatatatgttacaggggtgtatgtgtgtattttacttttaaaatcaattttattgaggtacaatttatacacaaaaaatccacccatttaaagggtatagttcaatgtcttttgacaaatgtacagatatttttatagaaaaatgagatgcaactttcacttatcttggagttcattggattttggttataacttgaaataaataggaaaatatgggccacatggggaagatgagggaaacataaaataaagtagcagttgtactatttatagttcctacctgatatggaaacccctatggtcctgatttttatggatattttagcctcttggaatcatacaatttctcccagttataaagaaaaatagatcttacactgcatgttgtctgatggtagttttctgtggagacatttttttaaataaagttgaataaaatttatgcttgtggaaaaataatctacattcaaccaatttaaaacagaattttattgattgtgttctcatttggaataactgcagggaaaatcacctgggctaatacaagctggatatcatttactacggatttagctggagaaaaaaaacccaaactcatttcaatttcagtggtgacagctgttgactgaattttcctgtgatatccttcaccacaggaaatgatatattgtagctttggttcctttgatttcctacccacccaacaaatccaaagtgcagggactgtgctttctaaatgtctgagtggcttagtttatgtggatagggttttttttttttaacaccctaagtgggtaaaattgtgattgcaaaaaatagatatatgggtaatgtacagaaacatttatttcctcttcctgaattgtttttccatttgtgctattattacacctggctttatgtgaaaaggctgtattggaacttggtatacttttatggaatgatgtaggagattacagttcattttgaaagatgtattagctaacwttttaatggtccaaataaatatgtttctttgatgcagagatcagttttgattatttgtgatgctttcttcactgcttttttattttatkctartttaaaaaatatgataaactataacctgycagatagaaaggagtaaatggtgttaacctctttaggcttaagaatactgggaaatgcttgacaaagaatggaaatatgttttatatgttattgtyttatgaaygtcagaaactctgtctgctggtggggagggagggcagagaaataccccctgaggatgagggaggaaytctttccactctggcttaggattttgctgtaagccacatttgcatcctgtctattatggcttcttacaaatgagagaatggacagttgcaattaggtattgaggttgaggttggccaagcagccccaaagcctcgcagataaacatgtcacagctttctttgtccccagagaaacaattcaggttaccgctaagctaatcagaattcaagattgcttccctaatactataaatggcaaactatgacttaaatataaaaacttgattcccaagtaaaatgttgtaaaaacaagcacatttacaataaacttgaagcacttcctttagttggcctaattgcagcctgtattttgtttatgactggcagagattaatcttagtgtagcaaatagaagtcagggcaagtcatctggctattctataggtataccaagtcctccagcgaactatttgattgttttatgtcattgtgtcctcactatacaataatgctatccagtagaatcataatgagagcaacaaatgtaagccacatatataattatatataattttaaattactcagtgaaattaattttgataacataccttatttaactcttattcaaaatagcttttatttatttttttaagagatggggtcttgctcttttgcccaggctcagctacttgaactcctaggctcaagtaatctttcttccttagcttcctgagtagctgkgactacagatatgtgccaccacacccagctcaaaatattttaatatgtaatcactatgaaaaattgtgaatgaaatattttacattttatgtactaagtctttgaaatccagtgtgtactttgtacttgttgaacatctcaatttagtttaagctacatttcaagtgctcaatggtcacatttggctaatggatactacataacagtaaagctttataaaaatggatttcatttaaatctctactgtttaagttgaatatttgtactttggacacttcctaaaaatgtaaatatagactataatgatagactcacaaaatcttccagatatcaggttattcaaggacatctaaattctcctattaatactttgaggttaaacattttatgtgatagtatgaagaaggttggaaggaaattatttttttctagtattcataggaagaaattggtgaacgttaagaacagagaaaaaaatccaaaatgtttaagaataataaatttnnnnnnnnnnnnnnnnnnnnnnnnnnnnnnnnnnnnnnnnnnnnnnnnnnnnnnnnnnnnnnnnnnnnnnnnnnnnnnnnnnnnnnnnnnnnnnnnnnnnnnnnnnnnnnnnnnnnnnnnnnnnnnnnnnnnnnnnnnnnnnnnnnnnnnnnnnnnnnnnnnnnnnnnnnnnnnnnnnnnnnnnnnnnnnnnnnnnnnnnnnnnnnnnnnnnnnnnnnnnnnnnnnnnnnnnnnnnnnnnnnnnnnnnnnnnnnnnnnnnnnnnnnnnnnnnnnnnnnnnnnnnnnnnnnnnnnnnnnnnnnnnnnnnnnnnnnnnnnnnnnnnnnnnnnnnnnnnnnnnnnnnnnnnnnnnnnnnnnnnnnnnnnnnnnnnnnnnnnnnnnnnnnnnnnnnnnnnnnnnnnnnnnnnnnnnnnnnnnnnnnnnnnnnnnnnnnnnnnnnnnnnnnnnnnnnnnnnnnnnnnnnnnnnnnnnnnnnnnnnnnnnnnnnnnnnnnnnnnnnnnnnnnnnnnnnnnnnnnnnnnnnnnnnnnnnnnnnnnnnnnnnnnnnnnnnnnnnnnnnnnnnnnnnnnnnnnnnnnnnnnnnnnnnnnnnnnnnnnnnnnncctttcactacaattcacagatcagatgtgtgcagatgtatctgtttcagatttatccttttatatatccatggtatttttgctctgtacattagacgtttgtgagacagtatttgggggaaactctagtttagtgtggatgtgattaattatgccttgctgtcttggtcattccccaacccctgcattctccaaaattagattgatttaattggatttaaaatgggatcatttaaatttggttgcgtaaatatgtgttttgtatgttttgaaagtcttaacctttctcttttcagcctawaaattattgaaattctgttagctttataattttctgtttactgtgattttaagctatattggaaaactagccatgctggcctcttatgtttaatgagtgagataatatgagagggaaaattcctcaggtgcgactgtgttttaattaagttttatgtaagtttattgaacaaatgcaaccattaaaagatgcttttggctgggcacggtggctcatgcctgtaatcccagcactttgggaggccgaggcgggctgatcacctgagatcaggagttcaagaccaacctgaccaacatggagaaatcccgtctctactgaaagtacgaaattagccaggcatggtggcacgtgcatgtaatcccagctactcgggaggctgaggcaggagaatcacttgaaccagggaggcagaggttgtggtgagccgagatcgtaccattgcactccagcctgggcagcaagagcaaaactccgtctcaaatttaaaaaaaaaaaaaaaaaaggatgcttttatatattttgtgtatcgtgaattctcttatagcagaatatataatttaagaccatcacctcaaaacaaaacaaaaacaccagattacttttgtgtaggcagagtttgttatacacaattgcaaaattctgttttcttagaaggcactattatatgtacacttaggtgtttagaaacctggagaaaacctcaaattttcatgaaaacagaaacttagcactatattattacaaaggaagtaggacttaaaggggtttttaaaattatattttaatggcctttgattaaagacctatctcaggacctacctaatttcctaccgaatttctcccccaccccctgcccacctgcctttgcttgtgttttttctctaacctaacctcttcatctataaactactttttagaattttcttggnnnnnnnnnnnnnnnnnnnnnnnnnnnnnnnnnnnnnnnnnnnnnnnnnnnnnnnnnnnnnnnnnnnnnnnnnnnnnnnnnnnnnnnnnnnnnnnnnnnnnnnnnnnnnnnnnnnnnnnnnnnnnnnnnnnnnnnnnnnnnnnnnnnnnnnnnnnnnnnnnnnnnnnnnnnnnnnnnnnnnnnnnnnnnnnnnnnnnnnnnnnnnnnnnnnnnnnnnnnnnnnnnnnnnnnnnnnnnnnnnnnnnnnnnnnnnnnnnnnnnnnnnnnnnnnnnnnnnnnnnnnnnnnnnnnnnnnnnnnnnnnnnnnnnnnnnnnnnnnnnnnnnnnnnnnnnnnnnnnnnnnnnnnnnnnnnnnnnnnnnnnnnnnnnnnnnnnnnnnnnnnnnnnnnnnnnnnnnnnnnnnnnnnnnnnnnnnnnnnnnnnnnnnnnnnnnnnnnnnnnnnnnnnnnnnnnnnnnnnnnnnnnnnnnnnnnnnnnnnnnnnnnnnnnnnnnnnnnnnnnnnnnnnnnnnnnnnnnnnnnnnnnnnnnnnnnnnnnnnnnnnnnnnnnnnnnnnnnttgcctaccttctcctctcacccttcatttagaagagacctcccctctgcgggcttgaggaacaattgttttgagcattgtggcactcatcacattatcctccctggactatgtctggatccttcactgcttggacccttccttggccacaaaggtgcttaataaatgtacgctgagaaataggggggtcgtacagggattcctgaaggtgtgtgcgtggtgtttttttgtttgtttgttttagtaattagaatcttttacatccagataaggacaacaacagggatgtggaaaaaaagtgtcttatagagagagaatctgacaatctagtgatattagaaaagtagtttgtcctgggttttatgcatttatatggttctgtttcggtagtgaaggtgtttattttgctgttacagtgcagtaattgttacattttagcaaaaatacactatatccttttacaatccagtgtcttcagttagatttctaatgtaattgaatattcactgaaccacatctttattgttttcactacttttctataacctgagaaaactgatatttcacccttaatgcctttcacctgatactttagcaaataaattatgcatagggagtgtaagtaaatcactgcaattccttatccattaccacacatatttatggatgaaaaaaattgatgcatagcttgcnnnnnnnnnnnnnnnnnnnnnnnnnnnnnnnnnnnnnnnnnnnnnnnnnnnnnnnnnnnnnnnnnnnnnnnnnnnnnnnnnnnnnnnnnnnnnnnnnnnnnnnnnnnnnnnnnnnnnnnnnnnnnnnnnnnnnnnnnnnnnnnnnnnnnnnnnnnnnnnnnnnnnnnnnnnnnnnnnnnnnnnnnnnnnnnnnnnnnnnnnnnnnnnnnnnnnnnnnnnnnnnnnnnnnnnnnnnnnnnnnnnnnnnnnnnnnnnnnnnnnnnnnnnnnnnnnnnnnnnnnnnnnnnnnnnnnnnnnnnnnnnnnnnnnnnnnnnnnnnnnnnnnnnnnnnnnnnnnnnnnnnnnnnnnnnnnnnnnnnnnnnnnnnnnnnnnnnnnnnnnnnnnnnnnnnnnnnnnnnnnnnnnnnnnnnnnnnnnnnnnnnnnnnnnnnnnnnnnnnnnnnnnnnnnnnnnnnnnnnnnnnnnnnnnnnnnnnnnnnnnnnnnnnnnnnnnnnnnnnnnnnnnnnnnnnnnnnnnnnnnnnnnnnnnnnnnnnnnnnnnnnnnnnnnnnnnnnnnnnnnnnnnnnnnnnnnnnnnnnnnnnnnnnnnnnnnnnnnnnnnnnnnnnnnnnnnnnnnnnnnnnnnnnnnnnnnnnnnnnnnnnnnnnnnnnnnnnnnnnnnnnnnnnnnnnnnnnnnnnnnnnnnnnnnnnnnnnnnnnnnnnnnnnnnnnnnnnnnnnnnnnnnnnnnnnnnnnnnnnnnnnnnnnnnnnnnnnnnnnnnnnnnnnnnnnnnnnnnnnnnnnnnnnnnnnnnnnnnnnnnnnnnnnnnnnnnnnnnnnnnnnnnnnnnnnnnnnnnnnnnnnnnnnnnnnnnnnnnnnnnnnnnnnnnnnnnnnnnnnnnnnnnnnnnnnnnnnnnnnnnnnnnnnnnnnnnnnnnnnnnnnnnnnnnnnnnnnnnnnnnnnnnnnnnnnnnnnnnnnnnnnnnnnnnnnnnnnnnnnnnnnnnnnnnnnnnnnnnnnnnnnnnnnnnnnnnnnnnnnnnnnnnnnnnnnnnnnnnnnnnnnnnnnnnnnnnnnnnnnnnnnnnnnnnnnnnnnnnnnnnnnnnnnnnnnnnnnnnnnnnnnnnnnnnnnnnnnnnnnnnnnnnnnnnnnnnnnnnnnnnnnnnnnnnnnnnnnnnnnnnnnnnnnnnnnnnnnnnnnnnnnnnnnnnnnnnnnnnnnnnnnnnnnnnnnnnnnnnnnnnnnnnnnnnnnnnnnnnnnnnnnnnnnnnnnnnnnnnnnnnnnnnnnnnnnnnnnnnnnnnnnnnnnnnnnnnnnnnnnnnnnnnnnnnnnnnnnnnnnnnnnnnnnnnnnnnnnnnnnnnnnnnnnnnnnnnnnnnnnnnnnnnnnnnnnnnnnnnnnnnnnnnnnnnnnnnnnnnnnnnnnnnnnnnnnnnnnnnnnnnnnnnnnnnnnnnnnnnnnnnnnnnnnnnnnnnnnnnnnnnnnnnnnnnnnnnnnnnnnnnnnnnnnnnnnnnnnnnnnnnnnnnnnnnnnnnnnnnnnnnnnnnnnnnnnnnnnnnnnnnnnnnnnnnnnnnnnnnnnnnnnnnnnnnnnnnnnnnnnnnnnnnnnnnnnnnnnnnnnnnnnnnnnnnnnnnnnnnnnnnnnnnnnnnnnnnnnnnnnnnnnnnnnnnnnnnnnnnnnnnnnnnnnnnnnnnnnnnnnnnnnnnnnnnnnnnnnnnnnnnnnnnnnnnnnnnnnnnnnnnnnnnnnnnnnnnnnnnnnnnnnnnnnnnnnnnnnnnnnnnnnnnnnnnnnnnnnnnnnnnnnnnnnnnnnnnnnnnnnnnnnnnnnnnnnnnnnnnnnnnnnnnnnnnnnnnnnnnnnnnnnnnnnnnnnnnnnnnnnnnnnnnnnnnnnnnnnnnnnnnnnnnnnnnnnnnnnnnnnnnnnnnnnnnnnnnnnnnnnnnnnnnnnnnnnnnnnnnnnnnnnnnnnnnnnnnnnnnnnnnnnnnnnnnnnnnnnnnnnnnnnnnnnnnnnnnnnnnnnnnnnnnnnnnnnnnnnnnnnnnnnnnnnnnnnnnnnnnnnnnnnnnnnnnnnnnnnnnnnnnnnnnnnnnnnnnnnnnnnnnnnnnnnnnnnnnnnnnnnnnnnnnnnnnnnnnnnnnnnnnnnnnnnnnnnnnnnnnnnnnnnnnnnnnnnnnnnnnnnnnnnnnnnnnnnnnnnnnnnnnnnnnnnnnnnnnnnnnnnnnnnnnnnnnnnnnnnnnnnnnnnnnnnnnnnnnnnnnnnnnnnnnnnnnnnnnnnnnnnnnnnnnnnnnnnnnnnnnnnnnnnnnnnnnnnnnnnnnnnnnnnnnnnnnnnnnnnnnnnnnnnnnnnnnnnnnnnnnnnnnnnnnnnnnnnnnnnnnnnnnnnnnnnnnnnnnnnnnnnnnnnnnnnnnnnnnnnnnnnnnnnnnnnnnnnnnnnnnnnnnnnnnnnnnnnnnnnnnnnnnnnnnnnnnnnnnnnnnnnnnnnnnnnnnnnnnnnnnnnnnnnnnnnnnnnnnnnnnnnnnnnnnnnnnnnnnnnnnnnnnnnnnnnnnnnnnnnnnnnnnnnnnnnnnnnnnnnnnnnnnnnnnnnnnnnnnnnnnnnnnnnnnnnnnnnnnnnnnnnnnnnnnnnnnnnnnnnnnnnnnnnnnnnnnnnnnnnnnnnnnnnnnnnnnnnnnnnnnnnnnnnnnnnnnnnnnnnnnnnnnnnnnnnnnnnnnnnnnnnnnnnnnnnnnnnnnnnnnnnnnnnnnnnnnnnnnnnnnnnnnnnnnnnnnnnnnnnnnnnnnnnnnnnnnnnnnnnnnnnnnnnnnnnnnnnnnnnnnnnnnnnnnnnnnnnnnnnnnnnnnnnnnnnnnnnnnnnnnnnnnnnnnnnnnnnnnnnnnnnnnnnnnnnnnnnnnnnnnnnnnnnnnnnnnnnnnnnnnnnnnnnnnnnnnnnnnnnnnnnnnnnnnnnnnnnnnnnnnnnnnnnnnnnnnnnnnnnnnnnnnnnnnnnnnnnnnnnnnnnnnnnnnnnnnnnnnnnnnnnnnnnnnnnnnnnnnnnnnnnnnnnnnnnnnnnnnnnnnnnnnnnnnnnnnnnnnnnnnnnnnnnnnnnnnnnnnnnnnnnnnnnnnnnnnnnnnnnnnnnnnnnnnnnnnnnnnnnnnnnnnnnnnnnnnnnnnnnnnnnnnnnnnnnnnnnnnnnnnnnnnnnnnnnnnnnnnnnnnnnnnnnnnnnnnnnnnnnnnnnnnnnnnnnnnnnnnnnnnnnnnnnnnnnnnnnnnnnnnnnnnnnnnnnnnnnnnnnnnnnnnnnnnnnnnnnnnnnnnnnnnnnnnnnnnnnnnnnnnnnnnnnnnnnnnnnnnnnnnnnnnnnnnnnnnnnnnnnnnnnnnnnnnnnnnnnnnnnnnnnnnnnnnnnnnnnnnnnnnnnnnnnnnnnnnnnnnnnnnnnnnnnnnnnnnnnnnnnnnnnnnnnnnnnnnnnnnnnnnnnnnnnnnnnnnnnnnnnnnnnnnnnnnnnnnnnnnnnnnnnnnnnnnnnnnnnnnnnnnnnnnnnnnnnnnnnnnnnnnnnnnnnnnnnnnnnnnnnnnnnnnnnnnnnnnnnnnnnnnnnnnnnnnnnnnnnnnnnnnnnnnnnnnnnnnnnnnnnnnnnnnnnnnnnnnnnnnnnnnnnnnnnnnnnnnnnnnnnnnnnnnnnnnnnnnnnnnnnnnnnnnnnnnnnnnnnnnnnnnnnnnnnnnnnnnnnnnnnnnnnnnnnnnnnnnnnnnnnnnnnnnnnnnnnnnnnnnnnnnnnnnnnnnnnnnnnnnnnnnnnnnnnnnnnnnnnnnnnnnnnnnnnnnnnnnnnnnnnnnnnnnnnnnnnnnnnnnnnnnnnnnnnnnnnnnnnnnnnnnnnnnnnnnnnnnnnnnnnnnnnnnnnnnnnnnnnnnnnnnnnnnnnnnnnnnnnnnnnnnnnnnnnnnnnnnnnnnnnnnnnnnnnnnnnnnnnnnnnnnnnnnnnnnnnnnnnnnnnnnnnnnnnnnnnnnnnnnnnnnnnnnnnnnnnnnnnnnnnnnnnnnnnnnnnnnnnnnnnnnnnnnnnnnnnnnnnnnnnnnnnnnnnnnnnnnnnnnnnnnnnnnnnnnnnnnnnnnnnnnnnnnnnnnnnnnnnnnnnnnnnnnnnnnnnnnnnnnnnnnnnnnnnnnnnnnnnnnnnnnnnnnnnnnnnnnnnnnnnnnnnnnnnnnnnnnnnnnnnnnnnnnnnnnnnnnnnnnnnnnnnnnnnnnnnnnnnnnnnnnnnnnnnnnnnnnnnnnnnnnnnnnnnnnnnnnnnnnnnnnnnnnnnnnnnnnnnnnnnnnnnnnnnnnnnnnnnnnnnnnnnnnnnnnnnnnnnnnnnnnnnnnnnnnnnnnnnnnnnnnnnnnnnnnnnnnnnnnnnnnnnnnnnnnnnnnnnnnnnnnnnnnnnnnnnnnnnnnnnnnnnnnnnnnnnnnnnnnnnnnnnnnnnnnnnnnnnnnnnnnnnnnnnnnnnnnnnnnnnnnnnnnnnnnnnnnnnnnnnnnnnnnnnnnnnnnnnnnnnnnnnnnnnnnnnnnnnnnnnnnnnnnnnnnnnnnnnnnnnnnnnnnnnnnnnnnnnnnnnnnnnnnnnnnnnnnnnnnnnnnnnnnnnnnnnnnnnnnnnnnnnnnnnnnnnnnnnnnnnnnnnnnnnnnnnnnnnnnnnnnnnnnnnnnnnnnnnnnnnnnnnnnnnnnnnnnnnnnnnnnnnnnnnnnnnnnnnnnnnnnnnnnnnnnnnnnnnnnnnnnnnnnnnnnnnnnnnnnnnnnnnnnnnnnnnnnnnnnnnnnnnnnnnnnnnnnnnnnnnnnnnnnnnnnnnnnnnnnnnnnnnnnnnnnnnnnnnnnnnnnnnnnnnnnnnnnnnnnnnnnnnnnnnnnnnnnnnnnnnnnnnnnnnnnnnnnnnnnnnnnnnnnnnnnnnnnnnnnnnnnnnnnnnnnnnnnnnnnnnnnnnnnnnnnnnnnnnnnnnnnnnnnnnnnnnnnnnnnnnnnnnnnnnnnnnnnnnnnnnnnnnnnnnnnnnnnnnnnnnnnnnnnnnnnnnnnnnnnnnnnnnnnnnnnnnnnnnnnnnnnnnnnnnnnnnnnnnnnnnnnnnnnnnnnnnnnnnnnnnnnnnnnnnnnnnnnnnnnnnnnnnnnnnnnnnnnnnnnnnnnnnnnnnnnnnnnnnnnnnnnnnnnnnnnnnnnnnnnnnnnnnnnnnnnnnnnnnnnnnnnnnnnnnnnnnnnnnnnnnnnnnnnnnnnnnnnnnnnnnnnnnnnnnnnnnnnnnnnnnnnnnnnnnnnnnnnnnnnnnnnnnnnnnnnnnnnnnnnnnnnnnnnnnnnnnnnnnnnnnnnnnnnnnnnnnnnnnnnnnnnnnnnnnnnnnnnnnnnnnnnnnnnnnnnnnnnnnnnnnnnnnnnnnnnnnnnnnnnnnnnnnnnnnnnnnnnnnnnnnnnnnnnnnnnnnnnnnnnnnnnnnnnnnnnnnnnnnnnnnnnnnnnnnnnnnnnnnnnnnnnnnnnnnnnnnnnnnnnnnnnnnnnnnnnnnnnnnnnnnnnnnnnnnnnnnnnnnnnnnnnnnnnnnnnnnnnnnnnnnnnnnnnnnnnnnnnnnnnnnnnnnnnnnnnnnnnnnnnnnnnnnnnnnnnnnnnnnnnnnnnnnnnnnnnnnnnnnnnnnnnnnnnnnnnnnnnnnnnnnnnnnnnnnnnnnnnnnnnnnnnnnnnnnnnnnnnnnnnnnnnnnnnnnnnnnnnnnnnnnnnnnnnnnnnnnnnnnnnnnnnnnnnnnnnnnnnnnnnnnnnnnnnnnnnnnnnnnnnnnnnnnnnnnnnnnnnnnnnnnnnnnnnnnnnnnnnnnnnnnnnnnnnnnnnnnnnnnnnnnnnnnnnnnnnnnnnnnnnnnnnnnnnnnnnnnnnnnnnnnnnnnnnnnnnnnnnnnnnnnnnnnnnnnnnnnnnnnnnnnnnnnnnnnnnnnnnnnnnnnnnnnnnnnnnnnnnnnnnnnnnnnnnnnnnnnnnnnnnnnnnnnnnnnnnnnnnnnnnnnnnnnnnnnnnnnnnnnnnnnnnnnnnnnnnnnnnnnnnnnnnnnnnnnnnnnnnnnnnnnnnnnnnnnnnnnnnnnnnnnnnnnnnnnnnnnnnnnnnnnnnnnnnnnnnnnnnnnnnnnnnnnnnnnnnnnnnnnnnnnnnnnnnnnnnnnnnnnnnnnnnnnnnnnnnnnnnnnnnnnnnnnnnnnnnnnnnnnnnnnnnnnnnnnnnnnnnnnnnnnnnnnnnnnnnnnnnnnnnnnnnnnnnnnnnnnnnnnnnnnnnnnnnnnnnnnnnnnnnnnnnnnnnnnnnnnnnnnnnnnnnnnnnnnnnnnnnnnnnnnnnnnnnnnnnnnnnnnnnnnnnnnnnnnnnnnnnnnnnnnnnnnnnnnnnnnnnnnnnnnnnnnnnnnnnnnnnnnnnnnnnnnnnnnnnnnnnnnnnnnnnnnnnnnnnnnnnnnnnnnnnnnnnnnnnnnnnnnnnnnnnnnnnnnnnnnnnnnnnnnnnnnnnnnnnnnnnnnnnnnnnnnnnnnnnnnnnnnnnnnnnnnnnnnnnnnnnnnnnnnnnnnnnnnnnnnnnnnnnnnnnnnnnnnnnnnnnnnnnnnnnnnnnnnnnnnnnnnnnnnnnnnnnnnnnnnnnnnnnnnnnnnnnnnnnnnnnnnnnnnnnnnnnnnnnnnnnnnnnnnnnnnnnnnnnnnnnnnnnnnnnnnnnnnnnnnnnnnnnnnnnnnnnnnnnnnnnnnnnnnnnnnnnnnnnnnnnnnnnnnnnnnnnnnnnnnnnnnnnnnnnnnnnnnnnnnnnnnnnnnnnnnnnnnnnnnnnnnnnnnnnnnnnnnnnnnnnnnnnnnnnnnnnnnnnnnnnnnnnnnnnnnnnnnnnnnnnnnnnnnnnnnnnnnnnnnnnnnnnnnnnnnnnnnnnnnnnnnnnnnnnnnnnnnnnnnnnnnnnnnnnnnnnnnnnnnnnnnnnnnnnnnnnnnnnnnnnnnnnnnnnnnnnnnnnnnnnnnnnnnnnnnnnnnnnnnnnnnnnnnnnnnnnnnnnnnnnnnnnnnnnnnnnnnnnnnnnnnnnnnnnnnnnnnnnnnnnnnnnnnnnnnnnnnnnnnnnnnnnnnnnnnnnnnnnnnnnnnnnnnnnnnnnnnnnnnnnnnnnnnnnnnnnnnnnnnnnnnnnnnnnnnnnnnnnnnnnnnnnnnnnnnnnnnnnnnnnnnnnnnnnnnnnnnnnnnnnnnnnnnnnnnnnnnnnnnnnnnnnnnnnnnnnnnnnnnnnnnnnnnnnnnnnnnnnnnnnnnnnnnnnnnnnnnnnnnnnnnnnnnnnnnnnnnnnnnnnnnnnnnnnnnnnnnnnnnnnnnnnnnnnnnnnnnnnnnnnnnnnnnnnnnnnnnnnnnnnnnnnnnnnnnnnnnnnnnnnnnnnnnnnnnnnnnnnnnnnnnnnnnnnnnnnnnnnnnnnnnnnnnnnnnnnnnnnnnnnnnnnnnnnnnnnnnnnnnnnnnnnnnnnnnnnnnnnnnnnnnnnnnnnnnnnnnnnnnnnnnnnnnnnnnnnnnnnnnnnnnnnnnnnnnnnnnnnnnnnnnnnnnnnnnnnnnnnnnnnnnnnnnnnnnnnnnnnnnnnnnnnnnnnnnnnnnnnnnnnnnnnnnnnnnnnnnnnnnnnnnnnnnnnnnnnnnnnnnnnnnnnnnnnnnnnnnnnnnnnnnnnnnnnnnnnnnnnnnnnnnnnnnnnnnnnnnnttgctattccaccccctccccccacacctgtattcgttgatgatttgaacacctagctaatggtcttgtgtactggcgctattcttattattgttcttggcctctgcaagatccaagttgataatttatcccctatcctggacttatgattcttttgtttgcttgttttccatgatcatttttctatctgtatatagccagacactatctttttaatttttattatttggactactgcccacacctcttaagtatccctcctgcttccgttcttactctcatacagtcttttcactacatmacagccagagttctctttgtttattgaatcacatcagtcttctggtcagaaccctctagtgggttttcatcatatgtagacttaaatccaaactcatgttgaggcctctgaagccatatgtgctcatcatttctattttatcttctgctccattccggctcactcacttgctctggtcacatggatcttatgttctcttttagcacaccacgtttattccttctcaggatcttcatttcactagcatccaacttactttgtcttacttgaaatgccatctcctcaaaaaggcttccctggccacccaaattgaagtacytctcccctaatcacacttgatttcatttctctatttcacttccagtgttttggcatcagatgttatctttttaatgtctgtattcattgtccgtctcctcctattaaaaataagctcttcgaggacagggtttttgacttctttgttcactactggttccccagggctgtacacatagtaagtgttaaataaatatttgttgattgaatgaataagaagtaatcaaggaatgtgccaaaagaaatagaaattgagttgggtcttgaatgatgayttggctttggctacatggcatgtgcatgagaagggtgcgccaggcagggctagcagagtgagaaaattgagaagctacagagcatgactgtgtggtcatgggatagtgaataatccagtggactggagccgaggactcattttggtgtagtgataatatactgggctttcccaggctccctgtcacagtgcttctgtggtgctcaagttttgcccttgttggagccctccttttatcatttatttcatgtgtttaacttacatagtagtgaatataataattgttgtgtctttttccttaactgaattaaaggggacaattaggtcccagcttattttccagaacacttaataaataattgttctgttatgtataattgaaaagtagttatggccaggcacagtnnnnnnnnnnnnnnnnnnnnttatttcatttgatttcccagtatttctgttaatttaggcagggctggcattattagtgccattttacaaataaggatgatgcaaatcagaatggttaagtgacttgtcccagtttgcagaactggtatttaaagaacaaaaaccagccgggtgcagtggctcacgcctgtaatcccagcactttgggaggccgaggcgggtggattacgaggtcaggaggtcgacaccatcctggctaacacggtgaaaccccgtcactgctcaaaaatacaaaaattagccgggcgtggtgatgggcgcctgtattcccagctactcgggaggctgaggcaggagaatggcgtgaacccgggaggcggagcttgcagtgagccgagatcgccccactgcactccagcctgggcgacagacagagcgagactccatctcaaaaaaaaawaaaataaaataaaaaacccaagaacgtgtcttcatactcctagcctactgccattcccaatgccccatgctgtaagacatgttggaaaaagaaataacatttttattcctgagatttcactgaaacaattatctggttatgctgtgtactaaagtctaaaacattaaagttaaatggcagctatcaatttaactttgcatgagttttatatgccattgtgctactgcaattaatggaatgcatagaatccaataacacattgtcagaaaggtgttactcaagggaaagataattcaaggcaagggaaaataatacaagaggagatgtgttttaggatatggtctcataggggaagaagaagaattttttcttcaagtcctataggttggaaaggacccatgtaacaaaagacagattaataggagaaaaacaaacaagtttattaacattttgtatcagttttctgtgcttataacagaatatctgaaattgggtaatttataaaggaaacaaatttatttcttacagttatggaggatgggaagtccaaggtccagagggtgcacctggtgagagctttccttgctggtagggactctctgaagagtcttgaggtggtgtagggtatcacatggcgagggggctgagtctgttaacatgccagctnnnnnnnnnnnnnnnnnnnntaacatgccagctcaagtctctcttcctcattttgtaaagccacaagtttccttcccatggcaactcattaatctattaatcctctatccattaatcccacctctcaatactgccacattagggattaaatttaaacatgagttttggaagggacagatattcaaaccatagcacatgtgtgtgctatggaagacatatgcatggaaaacatccagaaagtaagtagttctcaaaaaaggtgctttcaattcaagtttacgtagcaaattcaactaagagcaatacatttctagagaagtgacatggcaaaggaaaaggactttgagtctctggtggcagcaacttgtgagaaggcaaataaatggcagataaagaccagttggtaaagcttgttcatatagtttcctctggtatcatctccacataataagaatctgaagttatcttcactgatcaacctttkttctcactggtaaaaggtrggcaggatgacttttgtctttgtaaatctgtgttttgcttttaggcagatagagggagggcagagagctttcctgaatctgcttcttcttaaattgccttcgctcagtaatccttcatattttgggggtggcatcttctggtttccctcagtattagtctacccattctgctctcagagtaattctcaggtccttcttagcctgtagaaggaggacttgtagggaggggaaatctgtaccttttttttyycttttttttgatacaaggtcttactctgtcacccagggtggagcatgatctcagctcactgcatcctacacctcctgggctcaagccatcctactgcttcagcctcctgagtagctgggactacaggcacacactaccacgcctggccaatttttgtattttttgtagagacaaggttttgtcatgttgttgcttaggctagtcttgaacttctgggctcaagccatctgcctgcctcagcctccaaaagtgctgggatgacaggtgtgagccagctatattgtggttttgcttcataatccatacccattgtttaatcagtaaaattgattgattatggaaacaacagcctgtctacagagcatcttgagcgtatatgtggttcagcaggaakaatctgtaactgagcagatagaaagtagtatctggattttttgtttgtttgtttgtttgtttttttgagacagagtctcgctctatagcctaggctcgaatgctcaggcatgatcatggctcactacagccttgatctccctggctcaagcaatcctcttacctcagcctccagagtagctaggactacaggcatgccaccatgcccaggtttttgtttttgtttttgttttttttttaatttttattatttgtagagacagagtcttactctgttgccccggtggaattctttatgatcataatgactcttcactccagggtttccctttagttgtggtatttgtataatctttggtttgattgtgaatttctatgtaatctagcagctgttttttgctatgtcacacctgcatgcacctgagtctgtgttcatggagttggacatgagtagtgtgttgtgtgaaggaggtgaaacattactgaggtgggtggcttaannnnnnnnnnnnnnnnnnnngctctttaacaaaaattcttacaattcagacctcctatcaacactgcaaagcaggcattattatcgccattagtcaataaggcacctggcatacagagagtaactaagtaacttgctcacctactacttttaagtgatgattcccaatttaagttccagctgcttttttgctatgttgtcgtgctgttaataaaggataaatggtagaggtttgaactttaacaacttggattatgcttctaaaaaaatggaagtggtgctctagactaggagtcaggaggttcagactgttactatatttttcaattattttggggtaagttacttaaattaatttcattaaatacgtttaaaacacttggctatgtttctgctaaggtttacatgtaaaatgctttcttattttaatcatattcataattttaaaaatttccttcaaagggatcaaaagtattttgtgaatctgttttaatatatttttttctttttttaaagtcattcctacactggccaagattacagtacccagggaaatgttgggaaaatttctttagatcagattgatttggtaagtagaacattcttttaaacttagaactttatcagtggagagaacatagattttcttaaatcaaagacttttgggtgaggagatagaatactatttcactgcttgctgattaattttaaagaaaatcccatgtcctacttatatgattttaaaaaaatcataggaaaatcatttaatcagaaaattatctgtacttttatgaaaaccgaatttaatcaactattccaaacaggaattcttttaaatagctaaatggagtttgtgtttacatttaaatactgcatacatttaataaaggggaaatggaaaacactaagtgtattagtttgttggggctgtcatgacaacagaaatttattttctcacagtctagaggctcgaaatccaagatcaaagagatagtaggttttgatttcttccagggcctttcttgtctcacagatggctgccttctccttgtgttctcctgtggttttcccactgcttgcatacatccctggtgtctcttctttttgtaaggacactgagtatgtgagaccagagccccacccccatggcctcctttaatcttaatgagttctttaaaggccccatctctaaatatagtcacatttggagctactagaggtcaggacttgatatatgaatttcagggggagaggacaattcatcaactagtgtaggctatgagattaataggtagcttattttagcatcatttgactttgtggttccatagggtagtgtactttgccatacttgtagaatttctctttaatacataacagcatttgcactccatatacaaagggaaaataagccagccataaataatcttgggttggacgactaccaaattattcacaataaattaaaaatacacagggattttaatgcttggaaacaagaactgtaataagactaatagagaaagamcgtgaggttggatcagaatgaataggtcrtcttccatttgaaaaattacaaaaaagtacttgcagttaatatgtctagaaataacaatagggttgcctactttacacagttgatttgttgatttgaaatttgttctcaaagatgtcccatcttttaatttttttattaaacacttatctctaacagtcccctttctcacttccactcatgtgatttgtgcttatataatgtgaatggttggaggttaattctgttcttagttctagctagatgtttccccattcacaagcaaatgtgaatttggttggatactgttggagttcatagaaatattaattcatttaatggatatgtattgagcccatcagttatgtagcagccattgtgctgtggatacagaagtgaggaaaacagaaaatgtccctgccttcatggaccttacatgagggagagggacaacataataaataatgagcaatataatgtaagtgnnnnnnnnnnnnnnnnnnnnnnnnnnnnnnnnnnnnnnnnnnnnnnnnnnnnnnnnnnnnnnnnnnnnnnnnnnnnnnnnnnnnnnnnnnnnnnnnnnnnnnnnnnnnnnnnnnnnnnnnnnnnnnnnnnnnnnnnnnnnnnnnnnnnnnnnnnnnnnnnnnnnnnnnnnnnnnnnnnnnnnnnnnnnnnnnnnnnnnnnnnnnnnnnnnnnnnnnnnnnnnnnnnnnnnnnnnnnnnnnnnnnnnnnnnnnnnnnnnnnnnnnnnnnnnnnnnnnnnnnnnnnnnnnnnnnnnnnnnnnnnnnnnnnnnnnnnnnnnnnnnnnnnnnnnnnnnnnnnnnnnnnnnnnnnnnnnnnnnnnnnnnnnnnnnnnnnnnnnnnnnnnnnnnnnnnnnnnnnnnnnnnnnnnnnnnnnnnnnnnnnnnnnnnnnnnnnnnnnnnnnnnnnnnnnnnnnnnnnnnnnnnnnnnnnnnnnnnnnnnnnnnnnnnnnnnnnnnnnnnnnnnnnnnnnnnnnnnnnnnnnnnnnnnnnnnnnnnnnnnnnnnnnnnnnnnnnnnnnnnnnnnnnnnnnnnnnnnnnnnnnnnnnnnnnnnnnnnnnnnnnnnnnnnnnnnnnnnnnnnnnnnnnnnnnnnnnnnnnnnnnnnnnnnnnnnnnnnnnnnnnnnnnnnnnnnnnnnnnnnnnnnnnnnnnnnnnnnnnnnnnnnnnnnnnnnnnnnnnnnnnnnnnnnnnnnnnnnnnnnnnnnnnnnnnnnnnnnnnnnnnnnnnnnnnnnnnnnnnnnnnnnnnnnnnnnnnnnnnnnnnnnnnnnnnnnnnnnnnnnnnnnnnnnnnnnnnnnnnnnnnnnnnnnnnnnnnnnnnnnnnnnnnnnnnnnnnnnnnnnnnnnnnnnnnnnnnnnnnnnnnnnnnnnnnnnnnnnnnnnnnnnnnnnnnnnnnnnnnnnnnnnnnnnnnnnnnnnnnnnnnnnnnnnnnnnnnnnnnnnnnnnnnnnnnnnnnnnnnnnnnnnnnnnnnnnnnnnnnnnnnnnnnnnnnnnnnnnnnnnnnnnnnnnnnnnnnnnnnnnnnnnnnnnnnnnnnnnnnnnnnnnnnnnnnnnnnnnnnnnnnnnnnnnnnnnnnnnnnnnnnnnnnnnnnnnnnnnnnnnnnnnnnnnnnnnnnnnnnnnnnnnnnnnnnnnnnnnnnnnnnnnnnnnnnnnnnnnnnnnnnnnnnnnnnnnnnnnnnnnnnnnnnnnnnnnnnnnnnnnnnnnnnnnnnnnnnnnnnnnnnnnnnnnnnnnnnnnnnnnnnnnnnnnnnnnnnnnnnnnnnnnnnnnnnnnnnnnnnnnnnnnnnnnnnnnnnnnnnnnnnnnnnnnnnnnnnnnnnnnnnnnnnnnnnnnnnnnnnnnnnnnnnnnnnnnnnnnnnnnnnnnnnnnnnnnnnnnnnnnnnnnnnnnnnnnnnnnnnnnnnnnnnnnnnnnnnnnnnnnnnnnnnnnnnnnnnnnnnnnnnnnnnnnnnnnnnnnnnnnnnnnnnnnnnnnnnnnnnnnnnnnnnnnnnnnnnnnnnnnnnnnnnnnnnnnnnnnnnnnnnnnnnnnnnnnnnnnnnnnnnnnnnnnnnnnnnnnnnnnnnnnnnnnnnnnnnnnnnnnnnnnnnnnnnnnnnnnnnnnnnnnnnnnnnnnnnnnnnnnnnnnnnnnnnnnnnnnnnnnnnnnnnnnnnnnnnnnnnnnnnnnnnnnnnnnnnnnnnnnnnnnnnnnnnnnnnnnnnnnnnnnnnnnnnnnnnnnnnnnnnnnnnnnnnnnnnnnnnnnnnnnnnnnnnnnnnnnnnnnnnnnnnnnnnnnnnnnnnnnnnnnnnnnnnnnnnnnnnnnnnnnnnnnnnnnnnnnnnnnnnnnnnnnnnnnnnnnnnnnnnnnnnnnnnnnnnnnnnnnnnnnnnnnnnnnnnnnnnnnnnnnnnnnnnnnnnnnnnnnnnnnnnnnnnnnnnnnnnnnnnnnnnnnnnnnnnnnnnnnnnnnnnnnnnnnnnnnnnnnnnnnnnnnnnnnnnnnnnnnnnnnnnnnnnnnnnnnnnnnnnnnnnnnnnnnnnnnnnnnnnnnnnnnnnnnnnnnnnnnnnnnnnnnnnnnnnnnnnnnnnnnnnnnnnnnnnnnnnnnnnnnnnnnnnnnnnnnnnnnnnnnnnnnnnnnnnnnnnnnnnnnnnnnnnnnnnnnnnnnnnnnnnnnnnnnnnnnnnnnnnnnnnnnnnnnnnnnnnnnnnnnnnnnnnnnnnnnnnnnnnnnnnnnnnnnnnnnnnnnnnnnnnnnnnnnnnnnnnnnnnnnnnnnnnnnnnnnnnnnnnnnnnnnnnnnnnnnnnnnnnnnnnnnnnnnnnnnnnnnnnnnnnnnnnnnnnnnnnnnnnnnnnnnnnnnnnnnnnnnnnnnnnnnnnnnnnnnnnnnnnnnnnnnnnnnnnnnnnnnnnnnnnnnnnnnnnnnnnnnnnnnnnnnnnnnnnnnnnnnnnnnnnnnnnnnnnnnnnnnnnnnnnnnnnnnnnnnnnnnnnnnnnnnnnnnnnnnnnnnnnnnnnnnnnnnnnnnnnnnnnnnnnnnnnnnnnnnnnnnnnnnnnnnnnnnnnnnnnnnnnnnnnnnnnnnnnnnnnnnnnnnnnnnnnnnnnnnnnnnnnnnnnnnnnnnnnnnnnnnnnnnnnnnnnnnnnnnnnnnnnnnnnnnnnnnnnnnnnnnnnnnnnnnnnnnnnnnnnnnnnnnnnnnnnnnnnnnnnnnnnnnnnnnnnnnnnnnnnnnnnnnnnnnnnnnnnnnnnnnnnnnnnnnnnnnnnnnnnnnnnnnnnnnnnnnnnnnnnnnnnnnnnnnnnnnnnnnnnnnnnnnnnnnnnnnnnnnnnnnnnnnnnnnnnnnnnnnnnnnnnnnnnnnnnnnnnnnnnnnnnnnnnnnnnnnnnnnnnnnnnnnnnnnnnnnnnnnnnnnnnnnnnnnnnnnnnnnnnnnnnnnnnnnnnnnnnnnnnnnnnnnnnnnnnnnnnnnnnnnnnnnnnnnnnnnnnnnnnnnnnnnnnnnnnnnnnnnnnnnnnnnnnnnnnnnnnnnnnnnnnnnnnnnnnnnnnnnnnnnnnnnnnnnnnnnnnnnnnnnnnnnnnnnnnnnnnnnnnnnnnnnnnnnnnnnnnnnnnnnnnnnnnnnnnnnnnnnnnnnnnnnnnnnnnnnnnnnnnnnnnnnnnnnnnnnnnnnnnnnnnnnnnnnnnnnnnnnnnnnnnnnnnnnnnnnnnnnnnnnnnnnnnnnnnnnnnnnnnnnnnnnnnnnnnnnnnnnnnnnnnnnnnnnnnnnnnnnnnnnnnnnnnnnnnnnnnnnnnnnnnnnnnnnnnnnnnnnnnnnnnnnnnnnnnnnnnnnnnnnnnnnnnnnnnnnnnnnnnnnnnnnnnnnnnnnnnnnnnnnnnnnnnnnnnnnnnnnnnnnnnnnnnnnnnnnnnnnnnnnnnnnnnnnnnnnnnnnnnnnnnnnnnnnnnnnnnnnnnnnnnnnnnnnnnnnnnnnnnnnnnnnnnnnnnnnnnnnnnnnnnnnnnnnnnnnnnnnnnnnnnnnnnnnnnnnnnnnnnnnnnnnnnnnnnnnnnnnnnnnnnnnnnnnnnnnnnnnnnnnnnnnnnnnnnnnnnnnnnnnnnnnnnnnnnnnnnnnnnnnnnnnnnnnnnnnnnnnnnnnnnnnnnnnnnnnnnnnnnnnnnnnnnnnnnnnnnnnnnnnnnnnnnnnnnnnnnnnnnnnnnnnnnnnnnnnnnnnnnnnnnnnnnnnnnnnnnnnnnnnnnnnnnnnnnnnnnnnnnnnnnnnnnnnnnnnnnnnnnnnnnnnnnnnnnnnnnnnnnnnnnnnnnnnnnnnnnnnnnnnnnnnnnnnnnnnnnnnnnnnnnnnnnnnnnnnnnnnnnnnnnnnnnnnnnnnnnnnnnnnnnnnnnnnnnnnnnnnnnnnnnnnnnnnnnnnnnnnnnnnnnnnnnnnnnnnnnnnnnnnnnnnnnnnnnnnnnnnnnnnnnnnnnnnnnnnnnnnnnnnnnnnnnnnnnnnnnnnnnnnnnnnnnnnnnnnnnnnnnnnnnnnnnnnnnnnnnnnnnnnnnnnnnnnnnnnnnnnnnnnnnnnnnnnnnnnnnnnnnnnnnnnnnnnnnnnnnnnnnnnnnnnnnnnnnnnnnnnnnnnnnnnnnnnnnnnnnnnnnnnnnnnnnnnnnnnnnnnnnnnnnnnnnnnnnnnnnnnnnnnnnnnnnnnnnnnnnnnnnnnnnnnnnnnnnnnnnnnnnnnnnnnnnnnnnnnnnnnnnnnnnnnnnnnnnnnnnnnnnnnnnnnnnnnnnnnnnnnnnnnnnnnnnnnnnnnnnnnnnnnnnnnnnnnnnnnnnnnnnnnnnnnnnnnnnnnnnnnnnnnnnnnnnnnnnnnnnnnnnnnnnnnnnnnnnnnnnnnnnnnnnnnnnnnnnnnnnnnnnnnnnnnnnnnnnnnnnnnnnnnnnnnnnnnnnnnnnnnnnnnnnnnnnnnnnnnnnnnnnnnnnnnnnnnnnnnnnnnnnnnnnnnnnnnnnnnnnnnnnnnnnnnnnnnnnnnnnnnnnnnnnnnnnnnnnnnnnnnnnnnnnnnnnnnnnnnnnnnnnnnnnnnnnnnnnnnnnnnnnnnnnnnnnnnnnnnnnnnnnnnnnnnnnnnnnnnnnnnnnnnnnnnnnnnnnnnnnnnnnnnnnnnnnnnnnnnnnnnnnnnnnnnnnnnnnnnnnnnnnnnnnnnnnnnnnnnnnnnnnnnnnnnnnnnnnnnnnnnnnnnnnnnnnnnnnnnnnnnnnnnnnnnnnnnnnnnnnnnnnnnnnnnnnnnnnnnnnnnnnnnnnnnnnnnnnnnnnnnnnnnnnnnnnnnnnnnnnnnnnnnnnnnnnnnnnnnnnnnnnnnnnnnnnnnnnnnnnnnnnnnnnnnnnnnnnnnnnnnnnnnnnnnnnnnnnnnnnnnnnnnnnnnnnnnnnnnnnnnnnnnnnnnnnnnnnnnnnnnnnnnnnnnnnnnnnnnnnnnnnnnnnnnnnnnnnnnnnnnnnnnnnnnnnnnnnnnnnnnnnnnnnnnnnnnnnnnnnnnnnnnnnnnnnnnnnnnnnnnnnnnnnnnnnnnnnnnnnnnnnnnnnnnnnnnnnnnnnnnnnnnnnnnnnnnnnnnnnnnnnnnnnnnnnnnnnnnnnnnnnnnnnnnnnnnnnnnnnnnnnnnnnnnnnnnnnnnnnnnnnnnnnnnnnnnnnnnnnnnnnnnnnnnnnnnnnnnnnnnnnnnnnnnnnnnnnnnnnnnnnnnnnnnnnnnnnnnnnnnnnnnnnnnnnnnnnnnnnnnnnnnnnnnnnnnnnnnnnnnnnnnnnnnnnnnnnnnnnnnnnnnnnnnnnnnnnnnnnnnnnnnnnnnnnnnnnnnnnnnnnnnnnnnnnnnnnnnnnnnnnnnnnnnnnnnnnnnnnnnnnnnnnnnnnnnnnnnnnnnnnnnnnnnnnnnnnnnnnnnnnnnnnnnnnnnnnnnnnnnnnnnnnnnnnnnnnnnnnnnnnnnnnnnnnnnnnnnnnnnnnnnnnnnnnnnnnnnnnnnnnnnnnnnnnnnnnnnnnnnnnnnnnnnnnnnnnnnnnnnnnnnnnnnnnnnnnnnnnnnnnnnnnnnnnnnnnnnnnnnnnnnnnnnnnnnnnnnnnnnnnnnnnnnnnnnnnnnnnnnnnnnnnnnnnnnnnnnnnnnnnnnnnnnnnnnnnnnnnnnnnnnnnnnnnnnnnnnnnnnnnnnnnnnnnnnnnnnnnnnnnnnnnnnnnnnnnnnnnnnnnnnnnnnnnnnnnnnnnnnnnnnnnnnnnnnnnnnnnnnnnnnnnnnnnnnnnnnnnnnnnnnnnnnnnnnnnnnnnnnnnnnnnnnnnnnnnnnnnnnnnnnnnnnnnnnnnnnnnnnnnnnnnnnnnnnnnnnnnnnnnnnnnnnnnnnnnnnnnnnnnnnnnnnnnnnnnnnnnnnnnnnnnnnnnnnnnnnnnnnnnnnnnnnnnnnnnnnnnnnnnnnnnnnnnnnnnnnnnnnnnnnnnnnnnnnnnnnnnnnnnnnnnnnnnnnnnnnnnnnnnnnnnnnnnnnnnnnnnnnnnnnnnnnnnnnnnnnnnnnnnnnnnnnnnnnnnnnnnnnnnnnnnnnnnnnnnnnnnnnnnnnnnnnnnnnnnnnnnnnnnnnnnnnnnnnnnnnnnnnnnnnnnnnnnnnnnnnnnnnnnnnnnnnnnnnnnnnnnnnnnnnnnnnnnnnnnnnnnnnnnnnnnnnnnnnnnnnnnnnnnnnnnnnnnnnnnnnnnnnnnnnnnnnnnnnnnnnnnnnnnnnnnnnnnnnnnnnnnnnnnnnnnnnnnnnnnnnnnnnnnnnnnnnnnnnnnnnnnnnnnnnnnnnnnnnnnnnnnnnnnnnnnnnnnnnnnnnnnnnnnnnnnnnnnnnnnnnnnnnnnnnnnnnnnnnnnnnnnnnnnnnnnnnnnnnnnnnnnnnnnnnnnnnnnnnnnnnnnnnnnnnnnnnnnnnnnnnnnnnnnnnnnnnnnnnnnnnnnnnnnnnnnnnnnnnnnnnnnnnnnnnnnnnnnnnnnnnnnnnnnnnnnnnnnnnnnnnnnnnnnnnnnnnnnnnnnnnnnnnnnnnnnnnnnnnnnnnnnnnnnnnnnnnnnnnnnnnnnnnnnnnnnnnnnnnnnnnnnnnnnnnnnnnnnnnnnnnnnnnnnnnnnnnnnnnnnnnnnnnnnnnnnnnnnnnnnnnnnnnnnnnnnnnnnnnnnnnnnnnnnnnnnnnnnnnnnnnnnnnnnnnnnnnnnnnnnnnnnnnnnnnnnnnnnnnnnnnnnnnnnnnnnnnnnnnnnnnnnnnnnnnnnnnnnnnnnnnnnnnnnnnnnnnnnnnnnnnnnnnnnnnnnnnnnnnnnnnnnnnnnnnnnnnnnnnnnnnnnnnnnnnnnnnnnnnnnnnnnnnnnnnnnnnnnnnnnnnnnnnnnnnnnnnnnnnnnnnnnnnnnnnnnnnnnnnnnnnnnnnnnnnnnnnnnnnnnnnnnnnnnnnnnnnnnnnnnnnnnnnnnnnnnnnnnnnnnnnnnnnnnnnnnnnnnnnnnnnnnnnnnnnnnnnnnnnnnnnnnnnnnnnnnnnnnnnnnnnnnnnnnnnnnnnnnnnnnnnnnnnnnnnnnnnnnnnnnnnnnnnnnnnnnnnnnnnnnnnnnnnnnnnnnnnnnnnnnnnnnnnnnnnnnnnnnnnnnnnnnnnnnnnnnnnnnnnnnnnnnnnnnnnnnnnnnnnnnnnnnnnnnnnnnnnnnnnnnnnnnnnnnnnnnnnnnnnnnnnnnnnnnnnnnnnnnnnnnnnnnnnnnnnnnnnnnnnnnnnnnnnnnnnnnnnnnnnnnnnnnnnnnnnnnnnnnnnnnnnnnnnnnnnnnnnnnnnnnnnnnnnnnnnnnnnnnnnnnnnnnnnnnnnnnnnnnnnnnnnnnnnnnnnnnnnnnnnnnnnnnnnnnnnnnnnnnnnnnnnnnnnnnnnnnnnnnnnnnnnnnnnnnnnnnnnnnnnnnnnnnnnnnnnnnnnnnnnnnnnnnnnnnnnnnnnnnnnnnnnnnnnnnnnnnnnnnnnnnnnnnnnnnnnnnnnnnnnnnnnnnnnnnnnnnnnnnnnnnnnnnnnnnnnnnnnnnnnnnnnnnnnnnnnnnnnnnnnnnnnnnnnnnnnnnnnnnnnnnnnnnnnnnnnnnnnnnnnnnnnnnnnnnnnnnnnnnnnnnnnnnnnnnnnnnnnnnnnnnnnnnnnnnnnnnnnnnnnnnnnnnnnnnnnnnnnnnnnnnnnnnnnnnnnnnnnnnnnnnnnnnnnnnnnnnnnnnnnnnnnnnnnnnnnnnnnnnnnnnnnnnnnnnnnnnnnnnnnnnnnnnnnnnnnnnnnnnnnnnnnnnnnnnnnnnnnnnnnnnnnnnnnnnnnnnnnnnnnnnnnnnnnnnnnnnnnnnnnnnnnnnnnnnnnnnnnnnnnnnnnnnnnnnnnnnnnnnnnnnnnnnnnnnnnnnnnnnnnnnnnnnnnnnnnnnnnnnnnnnnnnnnnnnnnnnnnnnnnnnnnnnnnnnnnnnnnnnnnnnnnnnnnnnnnnnnnnnnnnnnnnnnnnnnnnnnnnnnnnnnnnnnnnnnnnnnnnnnnnnnnnnnnnnnnnnnnnnnnnnnnnnnnnnnnnnnnnnnnnnnnnnnnnnnnnnnnnnnnnnnnnnnnnnnnnnnnnnnnnnnnnnnnnnnnnnnnnnnnnnnnnnnnnnnnnnnnnnnnnnnnnnnnnnnnnnnnnnnnnnnnnnnnnnnnnnnnnnnnnnnnnnnnnnnnnnnnnnnnnnnnnnnnnnnnnnnnnnnnnnnnnnnnnnnnnnnnnnnnnnnnnnnnnnnnnnnnnnnnnnnnnnnnnnnnnnnnnnnnnnnnnnnnnnnnnnnnnnnnnnnnnnnnnnnnnnnnnnnnnnnnnnnnnnnnnnnnnnnnnnnnnnnnnnnnnnnnnnnnnnnnnnnnnnnnnnnnnnnnnnnnnnnnnnnnnnnnnnnnnnnnnnnnnnnnnnnnnnnnnnnnnnnnnnnnnnnnnnnnnnnnnnnnnnnnnnnnnnnnnnnnnnnnnnnnnnnnnnnnnnnnnnnnnnnnnnnnnnnnnnnnnnnnnnnnnnnnnnnnnnnnnnnnnnnnnnnnnnnnnnnnnnnnnnnnnnnnnnnnnnnnnnnnnnnnnnnnnnnnnnnnnnnnnnnnnnnnnnnnnnnnnnnnnnnnnnnnnnnnnnnnnnnnnnnnnnnnnnnnnnnnnnnnnnnnnnnnnnnnnnnnnnnnnnnnnnnnnnnnnnnnnnnnnnnnnnnnnnnnnnnnnnnnnnnnnnnnnnnnnnnnnnnnnnnnnnnnnnnnnnnnnnnnnnnnnnnnnnnnnnnnnnnnnnnnnnnnnnnnnnnnnnnnnnnnnnnnnnnnnnnnnnnnnnnnnnnnnnnnnnnnnnnnnnnnnnnnnnnnnnnnnnnnnnnnnnnnnnnnnnnnnnnnnnnnnnnnnnnnnnnnnnnnnnnnnnnnnnnnnnnnnnnnnnnnnnnnnnnnnnnnnnnnnnnnnnnnnnnnnnnnnnnnnnnnnnnnnnnnnnnnnnnnnnnnnnnnnnnnnnnnnnnnnnnnnnnnnnnnnnnnnnnnnnnnnnnnnnnnnnnnnnnnnnnnnnnnnnnnnnnnnnnnnnnnnnnnnnnnnnnnnnnnnnnnnnnnnnnnnnnnnnnnnnnnnnnnnnnnnnnnnnnnnnnnnnnnnnnnnnnnnnnnnnnnnnnnnnnnnnnnnnnnnnnnnnnnnnnnnnnnnnnnnnnnnnnnnnnnnnnnnnnnnnnnnnnnnnnnnnnnnnnnnnnnnnnnnnnnnnnnnnnnnnnnnnnnnnnnnnnnnnnnnnnnnnnnnnnnnnnnnnnnnnnnnnnnnnnnnnnnnnnnnnnnnnnnnnnnnnnnnnnnnnnnnnnnnnnnnnnnnnnnnnnnnnnnnnnnnnnnnnnnnnnnnnnnnnnnnnnnnnnnnnnnnnnnnnnnnnnnnnnnnnnnnnnnnnnnnnnnnnnnnnnnnnnnnnnnnnnnnnnnnnnnnnnnnnnnnnnnnnnnnnnnnnnnnnnnnnnnnnnnnnnnnnnnnnnnnnnnnnnnnnnnnnnnnnnnnnnnnnnnnnnnnnnnnnnnnnnnnnnnnnnnnnnnnnnnnnnnnnnnnnnnnnnnnnnnnnnnnnnnnnnnnnnnnnnnnnnnnnnnnnnnnnnnnnnnnnnnnnnnnnnnnnnnnnnnnnnnnnnnnnnnnnnnnnnnnnnnnnnnnnnnnnnnnnnnnnnnnnnnnnnnnnnnnnnnnnnnnnnnnnnnnnnnnnnnnnnnnnnnnnnnnnnnnnnnnnnnnnnnnnnnnnnnnnnnnnnnnnnnnnnnnnnnnnnnnnnnnnnnnnnnnnnnnnnnnnnnnnnnnnnnnnnnnnnnnnnnnnnnnnnnnnnnnnnnnnnnnnnnnnnnnnnnnnnnnnnnnnnnnnnnnnnnnnnnnnnnnnnnnnnnnnnnnnnnnnnnnnnnnnnnnnnnnnnnnnnnnnnnnnnnnnnnnnnnnnnnnnnnnnnnnnnnnnnnnnnnnnnnnnnnnnnnnnnnnnnnnnnnnnnnnnnnnnnnnnnnnnnnnnnnnnnnnnnnnnnnnnnnnnnnnnnnnnnnnnnnnnnnnnnnnnnnnnnnnnnnnnnnnnnnnnnnnnnnnnnnnnnnnnnnnnnnnnnnnnnnnnnnnnnnnnnnnnnnnnnnnnnnnnnnnnnnnnnnnnnnnnnnnnnnnnnnnnnnnnnnnnnnnnnnnnnnnnnnnnnnnnnnnnnnnnnnnnnnnnnnnnnnnnnnnnnnnnnnnnnnnnnnnnnnnnnnnnnnnnnnnnnnnnnnnnnnnnnnnnnnnnnnnnnnnnnnnnnnnnnnnnnnnnnnnnnnnnnnnnnnnnnnnnnnnnnnnnnnnnnnnnnnnnnnnnnnnnnnnnnnnnnnnnnnnnnnnnnnnnnnnnnnnnnnnnnnnnnnnnnnnnnnnnnnnnnnnnnnnnnnnnnnnnnnnnnnnnnnnnnnnnnnnnnnnnnnnnnnnnnnnnnnnnnnnnnnnnnnnnnnnnnnnnnnnnnnnnnnnnnnnnnnnnnnnnnnnnnnnnnnnnnnnnnnnnnnnnnnnnnnnnnnnnnnnnnnnnnnnnnnnnnnnnnnnnnnnnnnnnnnnnnnnnnnnnnnnnnnnnnnnnnnnnnnnnnnnnnnnnnnnnnnnnnnnnnnnnnnnnnnnnnnnnnnnnnnnnnnnnnnnnnnnnnnnnnnnnnnnnnnnnnnnnnnnnnnnnnnnnnnnnnnnnnnnnnnnnnnnnnnnnnnnnnnnnnnnnnnnnnnnnnnnnnnnnnnnnnnnnnnnnnnnnnnnnnnnnnnnnnnnnnnnnnnnnnnnnnnnnnnnnnnnnnnnnnnnnnnnnnnnnnnnnnnnnnnnnnnnnnnnnnnnnnnnnnnnnnnnnnnnnnnnnnnnnnnnnnnnnnnnnnnnnnnnnnnnnnnnnnnnnnnnnnnnnnnnnnnnnnnnnnnnnnnnnnnnnnnnnnnnnnnnnnnnnnnnnnnnnnnnnnnnnnnnnnnnnnnnnnnnnnnnnnnnnnnnnnnnnnnnnnnnnnnnnnnnnnnnnnnnnnnnnnnnnnnnnnnnnnnnnnnnnnnnnnnnnnnnnnnnnnnnnnnnnnnnnnnnnnnnnnnnnnnnnnnnnnnnnnnnnnnnnnnnnnnnnnnnnnnnnnnnnnnnnnnnnnnnnnnnnnnnnnnnnnnnnnnnnnnnnnnnnnnnnnnnnnnnnnnnnnnnnnnnnnnnnnnnnnnnnnnnnnnnnnnnnnnnnnnnnnnnnnnnnnnnnnnnnnnnnnnnnnnnnnnnnnnnnnnnnnnnnnnnnnnnnnnnnnnnnnnnnnnnnnnnnnnnnnnnnnnnnnnnnnnnnnnnnnnnnnnnnnnnnnnnnnnnnnnnnnnnnnnnnnnnnnnnnnnnnnnnnnnnnnnnnnnnnnnnnnnnnnnnnnnnnnnnnnnnnnnnnnnnnnnnnnnnnnnnnnnnnnnnnnnnnnnnnnnnnnnnnnnnnnnnnnnnnnnnnnnnnnnnnnnnnnnnnnnnnnnnnnnnnnnnnnnnnnnnnnnnnnnnnnnnnnnnnnnnnnnnnnnnnnnnnnnnnnnnnnnnnnnnnnnnnnnnnnnnnnnnnnnnnnnnnnnnnnnnnnnnnnnnnnnnnnnnnnnnnnnnnnnnnnnnnnnnnnnnnnnnnnnnnnnnnnnnnnnnnnnnnnnnnnnnnnnnnnnnnnnnnnnnnnnnnnnnnnnnnnnnnnnnnnnnnnnnnnnnnnnnnnnnnnnnnnnnnnnnnnnnnnnnnnnnnnnnnnnnnnnnnnnnnnnnnnnnnnnnnnnnnnnnnnnnnnnnnnnnnnnnnnnnnnnnnnnnnnnnnnnnnnnnnnnnnnnnnnnnnnnnnnnnnnnnnnnnnnnnnnnnnnnnnnnnnnnnnnnnnnnnnnnnnnnnnnnnnnnnnnnnnnnnnnnnnnnnnnnnnnnnnnnnnnnnnnnnnnnnnnnnnnnnnnnnnnnnnnnnnnnnnnnnnnnnnnnnnnnnnnnnnnnnnnnnnnnnnnnnnnnnnnnnnnnnnnnnnnnnnnnnnnnnnnnnnnnnnnnnnnnnnnnnnnnnnnnnnnnnnnnnnnnnnnnnnnnnnnnnnnnnnnnnnnnnnnnnnnnnnnnnnnnnnnnnnnnnnnnnnnnnnnnnnnnnnnnnnnnnnnnnnnnnnnnnnnnnnnnnnnnnnnnnnnnnnnnnnnnnnnnnnnnnnnnnnnnnnnnnnnnnnnnnnnnnnnnnnnnnnnnnnnnnnnnnnnnnnnnnnnnnnnnnnnnnnnnnnnnnnnnnnnnnnnnnnnnnnnnnnnnnnnnnnnnnnnnnnnnnnnnnnnnnnnnnnnnnnnnnnnnnnnnnnnnnnnnnnnnnnnnnnnnnnnnnnnnnnnnnnnnnnnnnnnnnnnnnnnnnnnnnnnnnnnnnnnnnnnnnnnnnnnnnnnnnnnnnnnnnnnnnnnnnnnnnnnnnnnnnnnnnnnnnnnnnnnnnnnnnnnnnnnnnnnnnnnnnnnnnnnnnnnnnnnnnnnnnnnnnnnnnnnnnnnnnnnnnnnnnnnnnnnnnnnnnnnnnnnnnnnnnnnnnnnnnnnnnnnnnnnnnnnnnnnnnnnnnnnnnnnnnnnnnnnnnnnnnnnnnnnnnnnnnnnnnnnnnnnnnnnnnnnnnnnnnnnnnnnnnnnnnnnnnnnnnnnnnnnnnnnnnnnnnnnnnnnnnnnnnnnnnnnnnnnnnnnnnnnnnnnnnnnnnnnnnnnnnnnnnnnnnnnnnnnnnnnnnnnnnnnnnnnnnnnnnnnnnnnnnnnnnnnnnnnnnnnnnnnnnnnnnnnnnnnnnnnnnnnnnnnnnnnnnnnnnnnnnnnnnnnnnnnnnnnnnnnnnnnnnnnnnnnnnnnnnnnnnnnnnnnnnnnnnnnnnnnnnnnnnnnnnnnnnnnnnnnnnnnnnnnnnnnnnnnnnnnnnnnnnnnnnnnnnnnnnnnnnnnnnnnnnnnnnnnnnnnnnnnnnnnnnnnnnnnnnnnnnnnnnnnnnnnnnnnnnnnnnnnnnnnnnnnnnnnnnnnnnnnnnnnnnnnnnnnnnnnnnnnnnnnnnnnnnnnnnnnnnnnnnnnnnnnnnnnnnnnnnnnnnnnnnnnnnnnnnnnnnnnnnnnnnnnnnnnnnnnnnnnnnnnnnnnnnnnnnnnnnnnnnnnnnnnnnnnnnnnnnnnnnnnnnnnnnnnnnnnnnnnnnnnnnnnnnnnnnnnnnnnnnnnnnnnnnnnnnnnnnnnnnnnnnnnnnnnnnnnnnnnnnnnnnnnnnnnnnnnnnnnnnnnnnnnnnnnnnnnnnnnnnnnnnnnnnnnnnnnnnnnnnnnnnnnnnnnnnnnnnnnnnnnnnnnnnnnnnnnnnnnnnnnnnnnnnnnnnnnnnnnnnnnnnnnnnnnnnnnnnnnnnnnnnnnnnnnnnnnnnnnnnnnnnnnnnnnnnnnnnnnnnnnnnnnnnnnnnnnnnnnnnnnnnnnnnnnnnnnnnnnnnnnnnnnnnnnnnnnnnnnnnnnnnnnnnnnnnnnnnnnnnnnnnnnnnnnnnnnnnnnnnnnnnnnnnnnnnnnnnnnnnnnnnnnnnnnnnnnnnnnnnnnnnnnnnnnnnnnnnnnnnnnnnnnnnnnnnnnnnnnnnnnnnnnnnnnnnnnnnnnnnnnnnnnnnnnnnnnnnnnnnnnnnnnnnnnnnnnnnnnnnnnnnnnnnnnnnnnnnnnnnnnnnnnnnnnnnnnnnnnnnnnnnnnnnnnnnnnnnnnnnnnnnnnnnnnnnnnnnnnnnnnnnnnnnnnnnnnnnnnnnnnnnnnnnnnnnnnnnnnnnnnnnnnnnnnnnnnnnnnnnnnnnnnnnnnnnnnnnnnnnnnnnnnnnnnnnnnnnnnnnnnnnnnnnnnnnnnnnnnnnnnnnnnnnnnnnnnnnnnnnnnnnnnnnnnnnnnnnnnnnnnnnnnnnnnnnnnnnnnnnnnnnnnnnnnnnnnnnnnnnnnnnnnnnnnnnnnnnnnnnnnnnnnnnnnnnnnnnnnnnnnnnnnnnnnnnnnnnnnnnnnnnnnnnnnnnnnnnnnnnnnnnnnnnnnnnnnnnnnnnnnnnnnnnnnnnnnnnnnnnnnnnnnnnnnnnnnnnnnnnnnnnnnnnnnnnnnnnnnnnnnnnnnnnnnnnnnnnnnnnnnnnnnnnnnnnnnnnnnnnnnnnnnnnnnnnnnnnnnnnnnnnnnnnnnnnnnnnnnnnnnnnnnnnnnnnnnnnnnnnnnnnnnnnnnnnnnnnnnnnnnnnnnnnnnnnnnnnnnnnnnnnnnnnnnnnnnnnnnnnnnnnnnnnnnnnnnnnnnnnnnnnnnnnnnnnnnnnnnnnnnnnnnnnnnnnnnnnnnnnnnnnnnnnnnnnnnnnnnnnnnnnnnnnnnnnnnnnnnnnnnnnnnnnnnnnnnnnnnnnnnnnnnnnnnnnnnnnnnnnnnnnnnnnnnnnnnnnnnnnnnnnnnnnnnnnnnnnnnnnnnnnnnnnnnnnnnnnnnnnnnnnnnnnnnnnnnnnnnnnnnnnnnnnnnnnnnnnnnnnnnnnnnnnnnnnnnnnnnnnnnnnnnnnnnnnnnnnnnnnnnnnnnnnnnnnnnnnnnnnnnnnnnnnnnnnnnnnnnnnnnnnnnnnnnnnnnnnnnnnnnnnnnnnnnnnnnnnnnnnnnnnnnnnnnnnnnnnnnnnnnnnnnnnnnnnnnnnnnnnnnnnnnnnnnnnnnnnnnnnnnnnnnnnnnnnnnnnnnnnnnnnnnnnnnnnnnnnnnnnnnnnnnnnnnnnnnnnnnnnnnnnnnnnnnnnnnnnnnnnnnnnnnnnnnnnnnnnnnnnnnnnnnnnnnnnnnnnnnnnnnnnnnnnnnnnnnnnnnnnnnnnnnnnnnnnnnnnnnnnnnnnnnnnnnnnnnnnnnnnnnnnnnnnnnnnnnnnnnnnnnnnnnnnnnnnnnnnnnnnnnnnnnnnnnnnnnnnnnnnnnnnnnnnnnnnnnnnnnnnnnnnnnnnnnnnnnnnnnnnnnnnnnnnnnnnnnnnnnnnnnnnnnnnnnnnnnnnnnnnnnnnnnnnnnnnnnnnnnnnnnnnnnnnnnnnnnnnnnnnnnnnnnnnnnnnnnnnnnnnnnnnnnnnnnnnnnnnnnnnnnnnnnnnnnnnnnnnnnnnnnnnnnnnnnnnnnnnnnnnnnnnnnnnnnnnnnnnnnnnnnnnnnnnnnnnnnnnnnnnnnnnnnnnnnnnnnnnnnnnnnnnnnnnnnnnnnnnnnnnnnnnnnnnnnnnnnnnnnnnnnnnnnnnnnnnnnnnnnnnnnnnnnnnnnnnnnnnnnnnnnnnnnnnnnnnnnnnnnnnnnnnnnnnnnnnnnnnnnnnnnnnnnnnnnnnnnnnnnnnnnnnnnnnnnnnnnnnnnnnnnnnnnnnnnnnnnnnnnnnnnnnnnnnnnnnnnnnnnnnnnnnnnnnnnnnnnnnnnnnnnnnnnnnnnnnnnnnnnnnnnnnnnnnnnnnnnnnnnnnnnnnnnnnnnnnnnnnnnnnnnnnnnnnnnnnnnnnnnnnnnnnnnnnnnnnnnnnnnnnnnnnnnnnnnnnnnnnnnnnnnnnnnnnnnnnnnnnnnnnnnnnnnnnnnnnnnnnnnnnnnnnnnnnnnnnnnnnnnnnnnnnnnnnnnnnnnnnnnnnnnnnnnnnnnnnnnnnnnnnnnnnnnnnnnnnnnnnnnnnnnnnnnnnnnnnnnnnnnnnnnnnnnnnnnnnnnnnnnnnnnnnnnnnnnnnnnnnnnnnnnnnnnnnnnnnnnnnnnnnnnnnnnnnnnnnnnnnnnnnnnnnnnnnnnnnnnnnnnnnnnnnnnnnnnnnnnnnnnnnnnnnnnnnnnnnnnnnnnnnnnnnnnnnnnnnnnnnnnnnnnnnnnnnnnnnnnnnnnnnnnnnnnnnnnnnnnnnnnnnnnnnnnnnnnnnnnnnnnnnnnnnnnnnnnnnnnnnnnnnnnnnnnnnnnnnnnnnnnnnnnnnnnnnnnnnnnnnnnnnnnnnnnnnnnnnnnnnnnnnnnnnnnnnnnnnnnnnnnnnnnnnnnnnnnnnnnnnnnnnnnnnnnnnnnnnnnnnnnnnnnnnnnnnnnnnnnnnnnnnnnnnnnnnnnnnnnnnnnnnnnnnnnnnnnnnnnnnnnnnnnnnnnnnnnnnnnnnnnnnnnnnnnnnnnnnnnnnnnnnnnnnnnnnnnnnnnnnnnnnnnnnnnnnnnnnnnnnnnnnnnnnnnnnnnnnnnnnnnnnnnnnnnnnnnnnnnnnnnnnnnnnnnnnnnnnnnnnnnnnnnnnnnnnnnnnnnnnnnnnnnnnnnnnnnnnnnnnnnnnnnnnnnnnnnnnnnnnnnnnnnnnnnnnnnnnnnnnnnnnnnnnnnnnnnnnnnnnnnnnnnnnnnnnnnnnnnnnnnnnnnnnnnnnnnnnnnnnnnnnnnnnnnnnnnnnnnnnnnnnnnnnnnnnnnnnnnnnnnnnnnnnnnnnnnnnnnnnnnnnnnnnnnnnnnnnnnnnnnnnnnnnnnnnnnnnnnnnnnnnnnnnnnnnnnnnnnnnnnnnnnnnnnnnnnnnnnnnnnnnnnnnnnnnnnnnnnnnnnnnnnnnnnnnnnnnnnnnnnnnnnnnnnnnnnnnnnnnnnnnnnnnnnnnnnnnnnnnnnnnnnnnnnnnnnnnnnnnnnnnnnnnnnnnnnnnnnnnnnnnnnnnnnnnnnnnnnnnnnnnnnnnnnnnnnnnnnnnnnnnnnnnnnnnnnnnnnnnnnnnnnnnnnnnnnnnnnnnnnnnnnnnnnnnnnnnnnnnnnnnnnnnnnnnnnnnnnnnnnnnnnnnnnnnnnnnnnnnnnnnnnnnnnnnnnnnnnnnnnnnnnnnnnnnnnnnnnnnnnnnnnnnnnnnnnnnnnnnnnnnnnnnnnnnnnnnnnnnnnnnnnnnnnnnnnnnnnnnnnnnnnnnnnnnnnnnnnnnnnnnnnnnnnnnnnnnnnnnnnnnnnnnnnnnnnnnnnnnnnnnnnnnnnnnnnnnnnnnnnnnnnnnnnnnnnnnnnnnnnnnnnnnnnnnnnnnnnnnnnnnnnnnnnnnnnnnnnnnnnnnnnnnnnnnnnnnnnnnnnnnnnnnnnnnnnnnnnnnnnnnnnnnnnnnnnnnnnnnnnnnnnnnnnnnnnnnnnnnnnnnnnnnnnnnnnnnnnnnnnnnnnnnnnnnnnnnnnnnnnnnnnnnnnnnnnnnnnnnnnnnnnnnnnnnnnnnnnnnnnnnnnnnnnnnnnnnnnnnnnnnnnnnnnnnnnnnnnnnnnnnnnnnnnnnnnnnnnnnnnnnnnnnnnnnnnnnnnnnnnnnnnnnnnnnnnnnnnnnnnnnnnnnnnnnnnnnnnnnnnnnnnnnnnnnnnnnnnnnnnnnnnnnnnnnnnnnnnnnnnnnnnnnnnnnnnnnnnnnnnnnnnnnnnnnnnnnnnnnnnnnnnnnnnnnnnnnnnnnnnnnnnnnnnnnnnnnnnnnnnnnnnnnnnnnnnnnnnnnnnnnnnnnnnnnnnnnnnnnnnnnnnnnnnnnnnnnnnnnnnnnnnnnnnnnnnnnnnnnnnnnnnnnnnnnnnnnnnnnnnnnnnnnnnnnnnnnnnnnnnnnnnnnnnnnnnnnnnnnnnnnnnnnnnnnnnnnnnnnnnnnnnnnnnnnnnnnnnnnnnnnnnnnnnnnnnnnnnnnnnnnnnnnnnnnnnnnnnnnnnnnnnnnnnnnnnnnnnnnnnnnnnnnnnnnnnnnnnnnnnnnnnnnnnnnnnnnnnnnnnnnnnnnnnnnnnnnnnnnnnnnnnnnnnnnnnnnnnnnnnnnnnnnnnnnnnnnnnnnnnnnnnnnnnnnnnnnnnnnnnnnnnnnnnnnnnnnnnnnnnnnnnnnnnnnnnnnnnnnnnnnnnnnnnnnnnnnnnnnnnnnnnnnnnnnnnnnnnnnnnnnnnnnnnnnnnnnnnnnnnnnnnnnnnnnnnnnnnnnnnnnnnnnnnnnnnnnnnnnnnnnnnnnnnnnnnnnnnnnnnnnnnnnnnnnnnnnnnnnnnnnnnnnnnnnnnnnnnnnnnnnnnnnnnnnnnnnnnnnnnnnnnnnnnnnnnnnnnnnnnnnnnnnnnnnnnnnnnnnnnnnnnnnnnnnnnnnnnnnnnnnnnnnnnnnnnnnnnnnnnnnnnnnnnnnnnnnnnnnnnnnnnnnnnnnnnnnnnnnnnnnnnnnnnnnnnnnnnnnnnnnnnnnnnnnnnnnnnnnnnnnnnnnnnnnnnnnnnnnnnnnnnnnnnnnnnnnnnnnnnnnnnnnnnnnnnnnnnnnnnnnnnnnnnnnnnnnnnnnnnnnnnnnnnnnnnnnnnnnnnnnnnnnnnnnnnnnnnnnnnnnnnnnnnnnnnnnnnnnnnnnnnnnnnnnnnnnnnnnnnnnnnnnnnnnnnnnnnnnnnnnnnnnnnnnnnnnnnnnnnnnnnnnnnnnnnnnnnnnnnnnnnnnnnnnnnnnnnnnnnnnnnnnnnnnnnnnnnnnnnnnnnnnnnnnnnnnnnnnnnnnnnnnnnnnnnnnnnnnnnnnnnnnnnnnnnnnnnnnnnnnnnnnnnnnnnnnnnnnnnnnnnnnnnnnnnnnnnnnnnnnnnnnnnnnnnnnnnnnnnnnnnnnnnnnnnnnnnnnnnnnnnnnnnnnnnnnnnnnnnnnnnnnnnnnnnnnnnnnnnnnnnnnnnnnnnnnnnnnnnnnnnnnnnnnnnnnnnnnnnnnnnnnnnnnnnnnnnnnnnnnnnnnnnnnnnnnnnnnnnnnnnnnnnnnnnnnnnnnnnnnnnnnnnnnnnnnnnnnnnnnnnnnnnnnnnnnnnnnnnnnnnnnnnnnnnnnnnnnnnnnnnnnnnnnnnnnnnnnnnnnnnnnnnnnnnnnnnnnnnnnnnnnnnnnnnnnnnnnnnnnnnnnnnnnnnnnnnnnnnnnnnnnnnnnnnnnnnnnnnnnnnnnnnnnnnnnnnnnnnnnnnnnnnnnnnnnnnnnnnnnnnnnnnnnnnnnnnnnnnnnnnnnnnnnnnnnnnnnnnnnnnnnnnnnnnnnnnnnnnnnnnnnnnnnnnnnnnnnnnnnnnnnnnnnnnnnnnnnnnnnnnnnnnnnnnnnnnnnnnnnnnnnnnnnnnnnnnnnnnnnnnnnnnnnnnnnnnnnnnnnnnnnnnnnnnnnnnnnnnnnnnnnnnnnnnnnnnnnnnnnnnnnnnnnnnnnnnnnnnnnnnnnnnnnnnnnnnnnnnnnnnnnnnnnnnnnnnnnnnnnnnnnnnnnnnnnnnnnnnnnnnnnnnnnnnnnnnnnnnnnnnnnnnnnnnnnnnnnnnnnnnnnnnnnnnnnnnnnnnnnnnnnnnnnnnnnnnnnnnnnnnnnnnnnnnnnnnnnnnnnnnnnnnnnnnnnnnnnnnnnnnnnnnnnnnnnnnnnnnnnnnnnnnnnnnnnnnnnnnnnnnnnnnnnnnnnnnnnnnnnnnnnnnnnnnnnnnnnnnnnnnnnnnnnnnnnnnnnnnnnnnnnnnnnnnnnnnnnnnnnnnnnnnnnnnnnnnnnnnnnnnnnnnnnnnnnnnnnnnnnnnnnnnnnnnnnnnnnnnnnnnnnnnnnnnnnnnnnnnnnnnnnnnnnnnnnnnnnnnnnnnnnnnnnnnnnnnnnnnnnnnnnnnnnnnnnnnnnnnnnnnnnnnnnnnnnnnnnnnnnnnnnnnnnnnnnnnnnnnnnnnnnnnnnnnnnnnnnnnnnnnnnnnnnnnnnnnnnnnnnnnnnnnnnnnnnnnnnnnnnnnnnnnnnnnnnnnnnnnnnnnnnnnnnnnnnnnnnnnnnnnnnnnnnnnnnnnnnnnnnnnnnnnnnnnnnnnnnnnnnnnnnnnnnnnnnnnnnnnnnnnnnnnnnnnnnnnnnnnnnnnnnnnnnnnnnnnnnnnnnnnnnnnnnnnnnnnnnnnnnnnnnnnnnnnnnnnnnnnnnnnnnnnnnnnnnnnnnnnnnnnnnnnnnnnnnnnnnnnnnnnnnnnnnnnnnnnnnnnnnnnnnnnnnnnnnnnnnnnnnnnnnnnnnnnnnnnnnnnnnnnnnnnnnnnnnnnnnnnnnnnnnnnnnnnnnnnnnnnnnnnnnnnnnnnnnnnnnnnnnnnnnnnnnnnnnnnnnnnnnnnnnnnnnnnnnnnnnnnnnnnnnnnnnnnnnnnnnnnnnnnnnnnnnnnnnnnnnnnnnnnnnnnnnnnnnnnnnnnnnnnnnnnnnnnnnnnnnnnnnnnnnnnnnnnnnnnnnnnnnnnnnnnnnnnnnnnnnnnnnnnnnnnnnnnnnnnnnnnnnnnnnnnnnnnnnnnnnnnnnnnnnnnnnnnnnnnnnnnnnnnnnnnnnnnnnnnnnnnnnnnnnnnnnnnnnnnnnnnnnnnnnnnnnnnnnnnnnnnnnnnnnnnnnnnnnnnnnnnnnnnnnnnnnnnnnnnnnnnnnnnnnnnnnnnnnnnnnnnnnnnnnnnnnnnnnnnnnnnnnnnnnnnnnnnnnnnnnnnnnnnnnnnnnnnnnnnnnnnnnnnnnnnnnnnnnnnnnnnnnnnnnnnnnnnnnnnnnnnnnnnnnnnnnnnnnnnnnnnnnnnnnnnnnnnnnnnnnnnnnnnnnnnnnnnnnnnnnnnnnnnnnnnnnnnnnnnnnnnnnnnnnnnnnnnnnnnnnnnnnnnnnnnnnnnnnnnnnnnnnnnnnnnnnnnnnnnnnnnnnnnnnnnnnnnnnnnnnnnnnnnnnnnnnnnnnnnnnnnnnnnnnnnnnnnnnnnnnnnnnnnnnnnnnnnnnnnnnnnnnnnnnnnnnnnnnnnnnnnnnnnnnnnnnnnnnnnnnnnnnnnnnnnnnnnnnnnnnnnnnnnnnnnnnnnnnnnnnnnnnnnnnnnnnnnnnnnnnnnnnnnnnnnnnnnnnnnnnnnnnnnnnnnnnnnnnnnnnnnnnnnnnnnnnnnnnnnnnnnnnnnnnnnnnnnnnnnnnnnnnnnnnnnnnnnnnnnnnnnnnnnnnnnnnnnnnnnnnnnnnnnnnnnnnnnnnnnnnnnnnnnnnnnnnnnnnnnnnnnnnnnnnnnnnnnnnnnnnnnnnnnnnnnnnnnnnnnnnnnnnnnnnnnnnnnnnnnnnnnnnnnnnnnnnnnnnnnnnnnnnnnnnnnnnnnnnnnnnnnnnnnnnnnnnnnnnnnnnnnnnnnnnnnnnnnnnnnnnnnnnnnnnnnnnnnnnnnnnnnnnnnnnnnnnnnnnnnnnnnnnnnnnnnnnnnnnnnnnnnnnnnnnnnnnnnnnnnnnnnnnnnnnnnnnnnnnnnnnnnnnnnnnnnnnnnnnnnnnnnnnnnnnnnnnnnnnnnnnnnnnnnnnnnnnnnnnnnnnnnnnnnnnnnnnnnnnnnnnnnnnnnnnnnnnnnnnnnnnnnnnnnnnnnnnnnnnnnnnnnnnnnnnnnnnnnnnnnnnnnnnnnnnnnnnnnnnnnnnnnnnnnnnnnnnnnnnnnnnnnnnnnnnnnnnnnnnnnnnnnnnnnnnnnnnnnnnnnnnnnnnnnnnnnnnnnnnnnnnnnnnnnnnnnnnnnnnnnnnnnnnnnnnnnnnnnnnnnnnnnnnnnnnnnnnnnnnnnnnnnnnnnnnnnnnnnnnnnnnnnnnnnnnnnnnnnnnnnnnnnnnnnnnnnnnnnnnnnnnnnnnnnnnnnnnnnnnnnnnnnnnnnnnnnnnnnnnnnnnnnnnnnnnnnnnnnnnnnnnnnnnnnnnnnnnnnnnnnnnnnnnnnnnnnnnnnnnnnnnnnnnnnnnnnnnnnnnnnnnnnnnnnnnnnnnnnnnnnnnnnnnnnnnnnnnnnnnnnnnnnnnnnnnnnnnnnnnnnnnnnnnnnnnnnnnnnnnnnnnnnnnnnnnnnnnnnnnnnnnnnnnnnnnnnnnnnnnnnnnnnnnnnnnnnnnnnnnnnnnnnnnnnnnnnnnnnnnnnnnnnnnnnnnnnnnnnnnnnnnnnnnnnnnnnnnnnnnnnnnnnnnnnnnnnnnnnnnnnnnnnnnnnnnnnnnnnnnnnnnnnnnnnnnnnnnnnnnnnnnnnnnnnnnnnnnnnnnnnnnnnnnnnnnnnnnnnnnnnnnnnnnnnnnnnnnnnnnnnnnnnnnnnnnnnnnnnnnnnnnnnnnnnnnnnnnnnnnnnnnnnnnnnnnnnnnnnnnnnnnnnnnnnnnnnnnnnnnnnnnnnnnnnnnnnnnnnnnnnnnnnnnnnnnnnnnnnnnnnnnnnnnnnnnnnnnnnnnnnnnnnnnnnnnnnnnnnnnnnnnnnnnnnnnnnnnnnnnnnnnnnnnnnnnnnnnnnnnnnnnnnnnnnnnnnnnnnnnnnnnnnnnnnnnnnnnnnnnnnnnnnnnnnnnnnnnnnnnnnnnnnnnnnnnnnnnnnnnnnnnnnnnnnnnnnnnnnnnnnnnnnnnnnnnnnnnnnnnnnnnnnnnnnnnnnnnnnnnnnnnnnnnnnnnnnnnnnnnnnnnnnnnnnnnnnnnnnnnnnnnnnnnnnnnnnnnnnnnnnnnnnnnnnnnnnnnnnnnnnnnnnnnnnnnnnnnnnnnnnnnnnnnnnnnnnnnnnnnnnnnnnnnnnnnnnnnnnnnnnnnnnnnnnnnnnnnnnnnnnnnnnnnnnnnnnnnnnnnnnnnnnnnnnnnnnnnnnnnnnnnnnnnnnnnnnnnnnnnnnnnnnnnnnnnnnnnnnnnnnnnnnnnnnnnnnnnnnnnnnnnnnnnnnnnnnnnnnnnnnnnnnnnnnnnnnnnnnnnnnnnnnnnnnnnnnnnnnnnnnnnnnnnnnnnnnnnnnnnnnnnnnnnnnnnnnnnnnnnnnnnnnnnnnnnnnnnnnnnnnnnnnnnnnnnnnnnnnnnnnnnnnnnnnnnnnnnnnnnnnnnnnnnnnnnnnnnnnnnnnnnnnnnnnnnnnnnnnnnnnnnnnnnnnnnnnnnnnnnnnnnnnnnnnnnnnnnnnnnnnnnnnnnnnnnnnnnnnnnnnnnnnnnnnnnnnnnnnnnnnnnnnnnnnnnnnnnnnnnnnnnnnnnnnnnnnnnnnnnnnnnnnnnnnnnnnnnnnnnnnnnnnnnnnnnnnnnnnnnnnnnnnnnnnnnnnnnnnnnnnnnnnnnnnnnnnnnnnnnnnnnnnnnnnnnnnnnnnnnnnnnnnnnnnnnnnnnnnnnnnnnnnnnnnnnnnnnnnnnnnnnnnnnnnnnnnnnnnnnnnnnnnnnnnnnnnnnnnnnnnnnnnnnnnnnnnnnnnnnnnnnnnnnnnnnnnnnnnnnnnnnnnnnnnnnnnnnnnnnnnnnnnnnnnnnnnnnnnnnnnnnnnnnnnnnnnnnnnnnnnnnnnnnnnnnnnnnnnnnnnnnnnnnnnnnnnnnnnnnnnnnnnnnnnnnnnnnnnnnnnnnnnnnnnnnnnnnnnnnnnnnnnnnnnnnnnnnnnnnnnnnnnnnnnnnnnnnnnnnnnnnnnnnnnnnnnnnnnnnnnnnnnnnnnnnnnnnnnnnnnnnnnnnnnnnnnnnnnnnnnnnnnnnnnnnnnnnnnnnnnnnnnnnnnnnnnnnnnnnnnnnnnnnnnnnnnnnnnnnnnnnnnnnnnnnnnnnnnnnnnnnnnnnnnnnnnnnnnnnnnnnnnnnnnnnnnnnnnnnnnnnnnnnnnnnnnnnnnnnnnnnnnnnnnnnnnnnnnnnnnnnnnnnnnnnnnnnnnnnnnnnnnnnnnnnnnnnnnnnnnnnnnnnnnnnnnnnnnnnnnnnnnnnnnnnnnnnnnnnnnnnnnnnnnnnnnnnnnnnnnnnnnnnnnnnnnnnnnnnnnnnnnnnnnnnnnnnnnnnnnnnnnnnnnnnnnnnnnnnnnnnnnnnnnnnnnnnnnnnnnnnnnnnnnnnnnnnnnnnnnnnnnnnnnnnnnnnnnnnnnnnnnnnnnnnnnnnnnnnnnnnnnnnnnnnnnnnnnnnnnnnnnnnnnnnnnnnnnnnnnnnnnnnnnnnnnnnnnnnnnnnnnnnnnnnnnnnnnnnnnnnnnnnnnnnnnnnnnnnnnnnnnnnnnnnnnnnnnnnnnnnnnnnnnnnnnnnnnnnnnnnnnnnnnnnnnnnnnnnnnnnnnnnnnnnnnnnnnnnnnnnnnnnnnnnnnnnnnnnnnnnnnnnnnnnnnnnnnnnnnnnnnnnnnnnnnnnnnnnnnnnnnnnnnnnnnnnnnnnnnnnnnnnnnnnnnnnnnnnnnnnnnnnnnnnnnnnnnnnnnnnnnnnnnnnnnnnnnnnnnnnnnnnnnnnnnnnnnnnnnnnnnnnnnnnnnnnnnnnnnnnnnnnnnnnnnnnnnnnnnnnnnnnnnnnnnnnnnnnnnnnnnnnnnnnnnnnnnnnnnnnnnnnnnnnnnnnnnnnnnnnnnnnnnnnnnnnnnnnnnnnnnnnnnnnnnnnnnnnnnnnnnnnnnnnnnnnnnnnnnnnnnnnnnnnnnnnnnnnnnnnnnnnnnnnnnnnnnnnnnnnnnnnnnnnnnnnnnnnnnnnnnnnnnnnnnnnnnnnnnnnnnnnnnnnnnnnnnnnnnnnnnnnnnnnnnnnnnnnnnnnnnnnnnnnnnnnnnnnnnnnnnnnnnnnnnnnnnnnnnnnnnnnnnnnnnnnnnnnnnnnnnnnnnnnnnnnnnnnnnnnnnnnnnnnnnnnnnnnnnnnnnnnnnnnnnnnnnnnnnnnnnnnnnnnnnnnnnnnnnnnnnnnnnnnnnnnnnnnnnnnnnnnnnnnnnnnnnnnnnnnnnnnnnnnnnnnnnnnnnnnnnnnnnnnnnnnnnnnnnnnnnnnnnnnnnnnnnnnnnnnnnnnnnnnnnnnnnnnnnnnnnnnnnnnnnnnnnnnnnnnnnnnnnnnnnnnnnnnnnnnnnnnnnnnnnnnnnnnnnnnnnnnnnnnnnnnnnnnnnnnnnnnnnnnnnnnnnnnnnnnnnnnnnnnnnnnnnnnnnnnnnnnnnnnnnnnnnnnnnnnnnnnnnnnnnnnnnnnnnnnnnnnnnnnnnnnnnnnnnnnnnnnnnnnnnnnnnnnnnnnnnnnnnnnnnnnnnnnnnnnnnnnnnnnnnnnnnnnnnnnnnnnnnnnnnnnnnnnnnnnnnnnnnnnnnnnnnnnnnnnnnnnnnnnnnnnnnnnnnnnnnnnnnnnnnnnnnnnnnnnnnnnnnnnnnnnnnnnnnnnnnnnnnnnnnnnnnnnnnnnnnnnnnnnnnnnnnnnnnnnnnnnnnnnnnnnnnnnnnnnnnnnnnnnnnnnnnnnnnnnnnnnnnnnnnnnnnnnnnnnnnnnnnnnnnnnnnnnnnnnnnnnnnnnnnnnnnnnnnnnnnnnnnnnnnnnnnnnnnnnnnnnnnnnnnnnnnnnnnnnnnnnnnnnnnnnnnnnnnnnnnnnnnnnnnnnnnnnnnnnnnnnnnnnnnnnnnnnnnnnnnnnnnnnnnnnnnnnnnnnnnnnnnnnnnnnnnnnnnnnnnnnnnnnnnnnnnnnnnnnnnnnnnnnnnnnnnnnnnnnnnnnnnnnnnnnnnnnnnnnnnnnnnnnnnnnnnnnnnnnnnnnnnnnnnnnnnnnnnnnnnnnnnnnnnnnnnnnnnnnnnnnnnnnnnnnnnnnnnnnnnnnnnnnnnnnnnnnnnnnnnnnnnnnnnnnnnnnnnnnnnnnnnnnnnnnnnnnnnnnnnnnnnnnnnnnnnnnnnnnnnnnnnnnnnnnnnnnnnnnnnnnnnnnnnnnnnnnnnnnnnnnnnnnnnnnnnnnnnnnnnnnnnnnnnnnnnnnnnnnnnnnnnnnnnnnnnnnnnnnnnnnnnnnnnnnnnnnnnnnnnnnnnnnnnnnnnnnnnnnnnnnnnnnnnnnnnnnnnnnnnnnnnnnnnnnnnnnnnnnnnnnnnnnnnnnnnnnnnnnnnnnnnnnnnnnnnnnnnnnnnnnnnnnnnnnnnnnnnnnnnnnnnnnnnnnnnnnnnnnnnnnnnnnnnnnnnnnnnnnnnnnnnnnnnnnnnnnnnnnnnnnnnnnnnnnnnnnnnnnnnnnnnnnnnnnnnnnnnnnnnnnnnnnnnnnnnnnnnnnnnnnnnnnnnnnnnnnnnnnnnnnnnnnnnnnnnnnnnnnnnnnnnnnnnnnnnnnnnnnnnnnnnnnnnnnnnnnnnnnnnnnnnnnnnnnnnnnnnnnnnnnnnnnnnnnnnnnnnnnnnnnnnnnnnnnnnnnnnnnnnnnnnnnnnnnnnnnnnnnnnnnnnnnnnnnnnnnnnnnnnnnnnnnnnnnnnnnnnnnnnnnnnnnnnnnnnnnnnnnnnnnnnnnnnnnnnnnnnnnnnnnnnnnnnnnnnnnnnnnnnnnnnnnnnnnnnnnnnnnnnnnnnnnnnnnnnnnnnnnnnnnnnnnnnnnnnnnnnnnnnnnnnnnnnnnnnnnnnnnnnnnnnnnnnnnnnnnnnnnnnnnnnnnnnnnnnnnnnnnnnnnnnnnnnnnnnnnnnnnnnnnnnnnnnnnnnnnnnnnnnnnnnnnnnnnnnnnnnnnnnnnnnnnnnnnnnnnnnnnnnnnnnnnnnnnnnnnnnnnnnnnnnnnnnnnnnnnnnnnnnnnnnnnnnnnnnnnnnnnnnnnnnnnnnnnnnnnnnnnnnnnnnnnnnnnnnnnnnnnnnnnnnnnnnnnnnnnnnnnnnnnnnnnnnnnnnnnnnnnnnnnnnnnnnnnnnnnnnnnnnnnnnnnnnnnnnnnnnnnnnnnnnnnnnnnnnnnnnnnnnnnnnnnnnnnnnnnnnnnnnnnnnnnnnnnnnnnnnnnnnnnnnnnnnnnnnnnnnnnnnnnnnnnnnnnnnnnnnnnnnnnnnnnnnnnnnnnnnnnnnnnnnnnnnnnnnnnnnnnnnnnnnnnnnnnnnnnnnnnnnnnnnnnnnnnnnnnnnnnnnnnnnnnnnnnnnnnnnnnnnnnnnnnnnnnnnnnnnnnnnnnnnnnnnnnnnnnnnnnnnnnnnnnnnnnnnnnnnnnnnnnnnnnnnnnnnnnnnnnnnnnnnnnnnnnnnnnnnnnnnnnnnnnnnnnnnnnnnnnnnnnnnnnnnnnnnnnnnnnnnnnnnnnnnnnnnnnnnnnnnnnnnnnnnnnnnnnnnnnnnnnnnnnnnnnnnnnnnnnnnnnnnnnnnnnnnnnnnnnnnnnnnnnnnnnnnnnnnnnnnnnnnnnnnnnnnnnnnnnnnnnnnnnnnnnnnnnnnnnnnnnnnnnnnnnnnnnnnnnnnnnnnnnnnnnnnnnnnnnnnnnnnnnnnnnnnnnnnnnnnnnnnnnnnnnnnnnnnnnnnnnnnnnnnnnnnnnnnnnnnnnnnnnnnnnnnnnnnnnnnnnnnnnnnnnnnnnnnnnnnnnnnnnnnnnnnnnnnnnnnnnnnnnnnnnnnnnnnnnnnnnnnnnnnnnnnnnnnnnnnnnnnnnnnnnnnnnnnnnnnnnnnnnnnnnnnnnnnnnnnnnnnnnnnnnnnnnnnnnnnnnnnnnnnnnnnnnnnnnnnnnnnnnnnnnnnnnnnnnnnnnnnnnnnnnnnnnnnnnnnnnnnnnnnnnnnnnnnnnnnnnnnnnnnnnnnnnnnnnnnnnnnnnnnnnnnnnnnnnnnnnnnnnnnnnnnnnnnnnnnnnnnnnnnnnnnnnnnnnnnnnnnnnnnnnnnnnnnnnnnnnnnnnnnnnnnnnnnnnnnnnnnnnnnnnnnnnnnnnnnnnnnnnnnnnnnnnnnnnnnnnnnnnnnnnnnnnnnnnnnnnnnnnnnnnnnnnnnnnnnnnnnnnnnnnnnnnnnnnnnnnnnnnnnnnnnnnnnnnnnnnnnnnnnnnnnnnnnnnnnnnnnnnnnnnnnnnnnnnnnnnnnnnnnnnnnnnnnnnnnnnnnnnnnnnnnnnnnnnnnnnnnnnnnnnnnnnnnnnnnnnnnnnnnnnnnnnnnnnnnnnnnnnnnnnnnnnnnnnnnnnnnnnnnnnnnnnnnnnnnnnnnnnnnnnnnnnnnnnnnnnnnnnnnnnnnnnnnnnnnnnnnnnnnnnnnnnnnnnnnnnnnnnnnnnnnnnnnnnnnnnnnnnnnnnnnnnnnnnnnnnnnnnnnnnnnnnnnnnnnnnnnnnnnnnnnnnnnnnnnnnnnnnnnnnnnnnnnnnnnnnnnnnnnnnnnnnnnnnnnnnnnnnnnnnnnnnnnnnnnnnnnnnnnnnnnnnnnnnnnnnnnnnnnnnnnnnnnnnnnnnnnnnnnnnnnnnnnnnnnnnnnnnnnnnnnnnnnnnnnnnnnnnnnnnnnnnnnnnnnnnnnnnnnnnnnnnnnnnnnnnnnnnnnnnnnnnnnnnnnnnnnnnnnnnnnnnnnnnnnnnnnnnnnnnnnnnnnnnnnnnnnnnnnnnnnnnnnnnnnnnnnnnnnnnnnnnnnnnnnnnnnnnnnnnnnnnnnnnnnnnnnnnnnnnnnnnnnnnnnnnnnnnnnnnnnnnnnnnnnnnnnnnnnnnnnnnnnnnnnnnnnnnnnnnnnnnnnnnnnnnnnnnnnnnnnnnnnnnnnnnnnnnnnnnnnnnnnnnnnnnnnnnnnnnnnnnnnnnnnnnnnnnnnnnnnnnnnnnnnnnnnnnnnnnnnnnnnnnnnnnnnnnnnnnnnnnnnnnnnnnnnnnnnnnnnnnnnnnnnnnnnnnnnnnnnnnnnnnnnnnnnnnnnnnnnnnnnnnnnnnnnnnnnnnnnnnnnnnnnnnnnnnnnnnnnnnnnnnnnnnnnnnnnnnnnnnnnnnnnnnnnnnnnnnnnnnnnnnnnnnnnnnnnnnnnnnnnnnnnnnnnnnnnnnnnnnnnnnnnnnnnnnnnnnnnnnnnnnnnnnnnnnnnnnnnnnnnnnnnnnnnnnnnnnnnnnnnnnnnnnnnnnnnnnnnnnnnnnnnnnnnnnnnnnnnnnnnnnnnnnnnnnnnnnnnnnnnnnnnnnnnnnnnnnnnnnnnnnnnnnnnnnnnnnnnnnnnnnnnnnnnnnnnnnnnnnnnnnnnnnnnnnnnnnnnnnnnnnnnnnnnnnnnnnnnnnnnnnnnnnnnnnnnnnnnnnnnnnnnnnnnnnnnnnnnnnnnnnnnnnnnnnnnnnnnnnnnnnnnnnnnnnnnnnnnnnnnnnnnnnnnnnnnnnnnnnnnnnnnnnnnnnnnnnnnnnnnnnnnnnnnnnnnnnnnnnnnnnnnnnnnnnnnnnnnnnnnnnnnnnnnnnnnnnnnnnnnnnnnnnnnnnnnnnnnnnnnnnnnnnnnnnnnnnnnnnnnnnnnnnnnnnnnnnnnnnnnnnnnnnnnnnnnnnnnnnnnnnnnnnnnnnnnnnnnnnnnnnnnnnnnnnnnnnnnnnnnnnnnnnnnnnnnnnnnnnnnnnnnnnnnnnnnnnnnnnnnnnnnnnnnnnnnnnnnnnnnnnnnnnnnnnnnnnnnnnnnnnnnnnnnnnnnnnnnnnnnnnnnnnnnnnnnnnnnnnnnnnnnnnnnnnnnnnnnnnnnnnnnnnnnnnnnnnnnnnnnnnnnnnnnnnnnnnnnnnnnnnnnnnnnnnnnnnnnnnnnnnnnnnnnnnnnnnnnnnnnnnnnnnnnnnnnnnnnnnnnnnnnnnnnnnnnnnnnnnnnnnnnnnnnnnnnnnnnnnnnnnnnnnnnnnnnnnnnnnnnnnnnnnnnnnnnnnnnnnnnnnnnnnnnnnnnnnnnnnnnnnnnnnnnnnnnnnnnnnnnnnnnnnnnnnnnnnnnnnnnnnnnnnnnnnnnnnnnnnnnnnnnnnnnnnnnnnnnnnnnnnnnnnnnnnnnnnnnnnnnnnnnnnnnnnnnnnnnnnnnnnnnnnnnnnnnnnnnnnnnnnnnnnnnnnnnnnnnnnnnnnnnnnnnnnnnnnnnnnnnnnnnnnnnnnnnnnnnnnnnnnnnnnnnnnnnnnnnnnnnnnnnnnnnnnnnnnnnnnnnnnnnnnnnnnnnnnnnnnnnnnnnnnnnnnnnnnnnnnnnnnnnnnnnnnnnnnnnnnnnnnnnnnnnnnnnnnnnnnnnnnnnnnnnnnnnnnnnnnnnnnnnnnnnnnnnnnnnnnnnnnnnnnnnnnnnnnnnnnnnnnnnnnnnnnnnnnnnnnnnnnnnnnnnnnnnnnnnnnnnnnnnnnnnnnnnnnnnnnnnnnnnnnnnnnnnnnnnnnnnnnnnnnnnnnnnnnnnnnnnnnnnnnnnnnnnnnnnnnnnnnnnnnnnnnnnnnnnnnnnnnnnnnnnnnnnnnnnnnnnnnnnnnnnnnnnnnnnnnnnnnnnnnnnnnnnnnnnnnnnnnnnnnnnnnnnnnnnnnnnnnnnnnnnnnnnnnnnnnnnnnnnnnnnnnnnnnnnnnnnnnnnnnnnnnnnnnnnnnnnnnnnnnnnnnnnnnnnnnnnnnnnnnnnnnnnnnnnnnnnnnnnnnnnnnnnnnnnnnnnnnnnnnnnnnnnnnnnnnnnnnnnnnnnnnnnnnnnnnnnnnnnnnnnnnnnnnnnnnnnnnnnnnnnnnnnnnnnnnnnnnnnnnnnnnnnnnnnnnnnnnnnnnnnnnnnnnnnnnnnnnnnnnnnnnnnnnnnnnnnnnnnnnnnnnnnnnnnnnnnnnnnnnnnnnnnnnnnnnnnnnnnnnnnnnnnnnnnnnnnnnnnnnnnnnnnnnnnnnnnnnnnnnnnnnnnnnnnnnnnnnnnnnnnnnnnnnnnnnnnnnnnnnnnnnnnnnnnnnnnnnnnnnnnnnnnnnnnnnnnnnnnnnnnnnnnnnnnnnnnnnnnnnnnnnnnnnnnnnnnnnnnnnnnnnnnnnnnnnnnnnnnnnnnnnnnnnnnnnnnnnnnnnnnnnnnnnnnnnnnnnnnnnnnnnnnnnnnnnnnnnnnnnnnnnnnnnnnnnnnnnnnnnnnnnnnnnnnnnnnnnnnnnnnnnnnnnnnnnnnnnnnnnnnnnnnnnnnnnnnnnnnnnnnnnnnnnnnnnnnnnnnnnnnnnnnnnnnnnnnnnnnnnnnnnnnnnnnnnnnnnnnnnnnnnnnnnnnnnnnnnnnnnnnnnnnnnnnnnnnnnnnnnnnnnnnnnnnnnnnnnnnnnnnnnnnnnnnnnnnnnnnnnnnnnnnnnnnnnnnnnnnnnnnnnnnnnnnnnnnnnnnnnnnnnnnnnnnnnnnnnnnnnnnnnnnnnnnnnnnnnnnnnnnnnnnnnnnnnnnnnnnnnnnnnnnnnnnnnnnnnnnnnnnnnnnnnnnnnnnnnnnnnnnnnnnnnnnnnnnnnnnnnnnnnnnnnnnnnnnnnnnnnnnnnnnnnnnnnnnnnnnnnnnnnnnnnnnnnnnnnnnnnnnnnnnnnnnnnnnnnnnnnnnnnnnnnnnnnnnnnnnnnnnnnnnnnnnnnnnnnnnnnnnnnnnnnnnnnnnnnnnnnnnnnnnnnnnnnnnnnnnnnnnnnnnnnnnnnnnnnnnnnnnnnnnnnnnnnnnnnnnnnnnnnnnnnnnnnnnnnnnnnnnnnnnnnnnnnnnnnnnnnnnnnnnnnnnnnnnnnnnnnnnnnnnnnnnnnnnnnnnnnnnnnnnnnnnnnnnnnnnnnnnnnnnnnnnnnnnnnnnnnnnnnnnnnnnnnnnnnnnnnnnnnnnnnnnnnnnnnnnnnnnnnnnnnnnnnnnnnnnnnnnnnnnnnnnnnnnnnnnnnnnnnnnnnnnnnnnnnnnnnnnnnnnnnnnnnnnnnnnnnnnnnnnnnnnnnnnnnnnnnnnnnnnnnnnnnnnnnnnnnnnnnnnnnnnnnnnnnnnnnnnnnnnnnnnnnnnnnnnnnnnnnnnnnnnnnnnnnnnnnnnnnnnnnnnnnnnnnnnnnnnnnnnnnnnnnnnnnnnnnnnnnnnnnnnnnnnnnnnnnnnnnnnnnnnnnnnnnnnnnnnnnnnnnnnnnnnnnnnnnnnnnnnnnnnnnnnnnnnnnnnnnnnnnnnnnnnnnnnnnnnnnnnnnnnnnnnnnnnnnnnnnnnnnnnnnnnnnnnnnnnnnnnnnnnnnnnnnnnnnnnnnnnnnnnnnnnnnnnnnnnnnnnnnnnnnnnnnnnnnnnnnnnnnnnnnnnnnnnnnnnnnnnnnnnnnnnnnnnnnnnnnnnnnnnnnnnnnnnnnnnnnnnnnnnnnnnnnnnnnnnnnnnnnnnnnnnnnnnnnnnnnnnnnnnnnnnnnnnnnnnnnnnnnnnnnnnnnnnnnnnnnnnnnnnnnnnnnnnnnnnnnnnnnnnnnnnnnnnnnnnnnnnnnnnnnnnnnnnnnnnnnnnnnnnnnnnnnnnnnnnnnnnnnnnnnnnnnnnnnnnnnnnnnnnnnnnnnnnnnnnnnnnnnnnnnnnnnnnnnnnnnnnnnnnnnnnnnnnnnnnnnnnnnnnnnnnnnnnnnnnnnnnnnnnnnnnnnnnnnnnnnnnnnnnnnnnnnnnnnnnnnnnnnnnnnnnnnnnnnnnnnnnnnnnnnnnnnnnnnnnnnnnnnnnnnnnnnnnnnnnnnnnnnnnnnnnnnnnnnnnnnnnnnnnnnnnnnnnnnnnnnnnnnnnnnnnnnnnnnnnnnnnnnnnnnnnnnnnnnnnnnnnnnnnnnnnnnnnnnnnnnnnnnnnnnnnnnnnnnnnnnnnnnnnnnnnnnnnnnnnnnnnnnnnnnnnnnnnnnnnnnnnnnnnnnnnnnnnnnnnnnnnnnnnnnnnnnnnnnnnnnnnnnnnnnnnnnnnnnnnnnnnnnnnnnnnnnnnnnnnnnnnnnnnnnnnnnnnnnnnnnnnnnnnnnnnnnnnnnnnnnnnnnnnnnnnnnnnnnnnnnnnnnnnnnnnnnnnnnnnnnnnnnnnnnnnnnnnnnnnnnnnnnnnnnnnnnnnnnnnnnnnnnnnnnnnnnnnnnnnnnnnnnnnnnnnnnnnnnnnnnnnnnnnnnnnnnnnnnnnnnnnnnnnnnnnnnnnnnnnnnnnnnnnnnnnnnnnnnnnnnnnnnnnnnnnnnnnnnnnnnnnnnnnnnnnnnnnnnnnnnnnnnnnnnnnnnnnnnnnnnnnnnnnnnnnnnnnnnnnnnnnnnnnnnnnnnnnnnnnnnnnnnnnnnnnnnnnnnnnnnnnnnnnnnnnnnnnnnnnnnnnnnnnnnnnnnnnnnnnnnnnnnnnnnnnnnnnnnnnnnnnnnnnnnnnnnnnnnnnnnnnnnnnnnnnnnnnnnnnnnnnnnnnnnnnnnnnnnnnnnnnnnnnnnnnnnnnnnnnnnnnnnnnnnnnnnnnnnnnnnnnnnnnnnnnnnnnnnnnnnnnnnnnnnnnnnnnnnnnnnnnnnnnnnnnnnnnnnnnnnnnnnnnnnnnnnnnnnnnnnnnnnnnnnnnnnnnnnnnnnnnnnnnnnnnnnnnnnnnnnnnnnnnnnnnnnnnnnnnnnnnnnnnnnnnnnnnnnnnnnnnnnnnnnnnnnnnnnnnnnnnnnnnnnnnnnnnnnnnnnnnnnnnnnnnnnnnnnnnnnnnnnnnnnnnnnnnnnnnnnnnnnnnnnnnnnnnnnnnnnnnnnnnnnnnnnnnnnnnnnnnnnnnnnnnnnnnnnnnnnnnnnnnnnnnnnnnnnnnnnnnnnnnnnnnnnnnnnnnnnnnnnnnnnnnnnnnnnnnnnnnnnnnnnnnnnnnnnnnnnnnnnnnnnnnnnnnnnnnnnnnnnnnnnnnnnnnnnnnnnnnnnnnnnnnnnnnnnnnnnnnnnnnnnnnnnnnnnnnnnnnnnnnnnnnnnnnnnnnnnnnnnnnnnnnnnnnnnnnnnnnnnnnnnnnnnnnnnnnnnnnnnnnnnnnnnnnnnnnnnnnnnnnnnnnnnnnnnnnnnnnnnnnnnnnnnnnnnnnnnnnnnnnnnnnnnnnnnnnnnnnnnnnnnnnnnnnnnnnnnnnnnnnnnnnnnnnnnnnnnnnnnnnnnnnnnnnnnnnnnnnnnnnnnnnnnnnnnnnnnnnnnnnnnnnnnnnnnnnnnnnnnnnnnnnnnnnnnnnnnnnnnnnnnnnnnnnnnnnnnnnnnnnnnnnnnnnnnnnnnnnnnnnnnnnnnnnnnnnnnnnnnnnnnnnnnnnnnnnnnnnnnnnnnnnnnnnnnnnnnnnnnnnnnnnnnnnnnnnnnnnnnnnnnnnnnnnnnnnnnnnnnnnnnnnnnnnnnnnnnnnnnnnnnnnnnnnnnnnnnnnnnnnnnnnnnnnnnnnnnnnnnnnnnnnnnnnnnnnnnnnnnnnnnnnnnnnnnnnnnnnnnnnnnnnnnnnnnnnnnnnnnnnnnnnnnnnnnnnnnnnnnnnnnnnnnnnnnnnnnnnnnnnnnnnnnnnnnnnnnnnnnnnnnnnnnnnnnnnnnnnnnnnnnnnnnnnnnnnnnnnnnnnnnnnnnnnnnnnnnnnnnnnnnnnnnnnnnnnnnnnnnnnnnnnnnnnnnnnnnnnnnnnnnnnnnnnnnnnnnnnnnnnnnnnnnnnnnnnnnnnnnnnnnnnnnnnnnnnnnnnnnnnnnnnnnnnnnnnnnnnnnnnnnnnnnnnnnnnnnnnnnnnnnnnnnnnnnnnnnnnnnnnnnnnnnnnnnnnnnnnnnnnnnnnnnnnnnnnnnnnnnnnnnnnnnnnnnnnnnnnnnnnnnnnnnnnnnnnnnnnnnnnnnnnnnnnnnnnnnnnnnnnnnnnnnnnnnnnnnnnnnnnnnnnnnnnnnnnnnnnnnnnnnnnnnnnnnnnnnnnnnnnnnnnnnnnnnnnnnnnnnnnnnnnnnnnnnnnnnnnnnnnnnnnnnnnnnnnnnnnnnnnnnnnnnnnnnnnnnnnnnnnnnnnnnnnnnnnnnnnnnnnnnnnnnnnnnnnnnnnnnnnnnnnnnnnnnnnnnnnnnnnnnnnnnnnnnnnnnnnnnnnnnnnnnnnnnnnnnnnnnnnnnnnnnnnnnnnnnnnnnnnnnnnnnnnnnnnnnnnnnnnnnnnnnnnnnnnnnnnnnnnnnnnnnnnnnnnnnnnnnnnnnnnnnnnnnnnnnnnnnnnnnnnnnnnnnnnnnnnnnnnnnnnnnnnnnnnnnnnnnnnnnnnnnnnnnnnnnnnnnnnnnnnnnnnnnnnnnnnnnnnnnnnnnnnnnnnnnnnnnnnnnnnnnnnnnnnnnnnnnnnnnnnnnnnnnnnnnnnnnnnnnnnnnnnnnnnnnnnnnnnnnnnnnnnnnnnnnnnnnnnnnnnnnnnnnnnnnnnnnnnnnnnnnnnnnnnnnnnnnnnnnnnnnnnnnnnnnnnnnnnnnnnnnnnnnnnnnnnnnnnnnnnnnnnnnnnnnnnnnnnnnnnnnnnnnnnnnnnnnnnnnnnnnnnnnnnnnnnnnnnnnnnnnnnnnnnnnnnnnnnnnnnnnnnnnnnnnnnnnnnnnnnnnnnnnnnnnnnnnnnnnnnnnnnnnnnnnnnnnnnnnnnnnnnnnnnnnnnnnnnnnnnnnnnnnnnnnnnnnnnnnnnnnnnnnnnnnnnnnnnnnnnnnnnnnnnnnnnnnnnnnnnnnnnnnnnnnnnnnnnnnnnnnnnnnnnnnnnnnnnnnnnnnnnnnnnnnnnnnnnnnnnnnnnnnnnnnnnnnnnnnnnnnnnnnnnnnnnnnnnnnnnnnnnnnnnnnnnnnnnnnnnnnnnnnnnnnnnnnnnnnnnnnnnnnnnnnnnnnnnnnnnnnnnnnnnnnnnnnnnnnnnnnnnnnnnnnnnnnnnnnnnnnnnnnnnnnnnnnnnnnnnnnnnnnnnnnnnnnnnnnnnnnnnnnnnnnnnnnnnnnnnnnnnnnnnnnnnnnnnnnnnnnnnnnnnnnnnnnnnnnnnnnnnnnnnnnnnnnnnnnnnnnnnnnnnnnnnnnnnnnnnnnnnnnnnnnnnnnnnnnnnnnnnnnnnnnnnnnnnnnnnnnnnnnnnnnnnnnnnnnnnnnnnnnnnnnnnnnnnnnnnnnnnnnnnnnnnnnnnnnnnnnnnnnnnnnnnnnnnnnnnnnnnnnnnnnnnnnnnnnnnnnnnnnnnnnnnnnnnnnnnnnnnnnnnnnnnnnnnnnnnnnnnnnnnnnnnnnnnnnnnnnnnnnnnnnnnnnnnnnnnnnnnnnnnnnnnnnnnnnnnnnnnnnnnnnnnnnnnnnnnnnnnnnnnnnnnnnnnnnnnnnnnnnnnnnnnnnnnnnnnnnnnnnnnnnnnnnnnnnnnnnnnnnnnnnnnnnnnnnnnnnnnnnnnnnnnnnnnnnnnnnnnnnnnnnnnnnnnnnnnnnnnnnnnnnnnnnnnnnnnnnnnnnnnnnnnnnnnnnnnnnnnnnnnnnnnnnnnnnnnnnnnnnnnnnnnnnnnnnnnnnnnnnnnnnnnnnnnnnnnnnnnnnnnnnnnnnnnnnnnnnnnnnnnnnnnnnnnnnnnnnnnnnnnnnnnnnnnnnnnnnnnnnnnnnnnnnnnnnnnnnnnnnnnnnnnnnnnnnnnnnnnnnnnnnnnnnnnnnnnnnnnnnnnnnnnnnnnnnnnnnnnnnnnnnnnnnnnnnnnnnnnnnnnnnnnnnnnnnnnnnnnnnnnnnnnnnnnnnnnnnnnnnnnnnnnnnnnnnnnnnnnnnnnnnnnnnnnnnnnnnnnnnnnnnnnnnnnnnnnnnnnnnnnnnnnnnnnnnnnnnnnnnnnnnnnnnnnnnnnnnnnnnnnnnnnnnnnnnnnnnnnnnnnnnnnnnnnnnnnnnnnnnnnnnnnnnnnnnnnnnnnnnnnnnnnnnnnnnnnnnnnnnnnnnnnnnnnnnnnnnnnnnnnnnnnnnnnnnnnnnnnnnnnnnnnnnnnnnnnnnnnnnnnnnnnnnnnnnnnnnnnnnnnnnnnnnnnnnnnnnnnnnnnnnnnnnnnnnnnnnnnnnnnnnnnnnnnnnnnnnnnnnnnnnnnnnnnnnnnnnnnnnnnnnnnnnnnnnnnnnnnnnnnnnnnnnnnnnnnnnnnnnnnnnnnnnnnnnnnnnnnnnnnnnnnnnnnnnnnnnnnnnnnnnnnnnnnnnnnnnnnnnnnnnnnnnnnnnnnnnnnnnnnnnnnnnnnnnnnnnnnnnnnnnnnnnnnnnnnnnnnnnnnnnnnnnnnnnnnnnnnnnnnnnnnnnnnnnnnnnnnnnnnnnnnnnnnnnnnnnnnnnnnnnnnnnnnnnnnnnnnnnnnnnnnnnnnnnnnnnnnnnnnnnnnnnnnnnnnnnnnnnnnnnnnnnnnnnnnnnnnnnnnnnnnnnnnnnnnnnnnnnnnnnnnnnnnnnnnnnnnnnnnnnnnnnnnnnnnnnnnnnnnnnnnnnnnnnnnnnnnnnnnnnnnnnnnnnnnnnnnnnnnnnnnnnnnnnnnnnnnnnnnnnnnnnnnnnnnnnnnnnnnnnnnnnnnnnnnnnnnnnnnnnnnnnnnnnnnnnnnnnnnnnnnnnnnnnnnnnnnnnnnnnnnnnnnnnnnnnnnnnnnnnnnnnnnnnnnnnnnnnnnnnnnnnnnnnnnnnnnnnnnnnnnnnnnnnnnnnnnnnnnnnnnnnnnnnnnnnnnnnnnnnnnnnnnnnnnnnnnnnnnnnnnnnnnnnnnnnnnnnnnnnnnnnnnnnnnnnnnnnnnnnnnnnnnnnnnnnnnnnnnnnnnnnnnnnnnnnnnnnnnnnnnnnnnnnnnnnnnnnnnnnnnnnnnnnnnnnnnnnnnnnnnnnnnnnnnnnnnnnnnnnnnnnnnnnnnnnnnnnnnnnnnnnnnnnnnnnnnnnnnnnnnnnnnnnnnnnnnnnnnnnnnnnnnnnnnnnnnnnnnnnnnnnnnnnnnnnnnnnnnnnnnnnnnnnnnnnnnnnnnnnnnnnnnnnnnnnnnnnnnnnnnnnnnnnnnnnnnnnnnnnnnnnnnnnnnnnnnnnnnnnnnnnnnnnnnnnnnnnnnnnnnnnnnnnnnnnnnnnnnnnnnnnnnnnnnnnnnnnnnnnnnnnnnnnnnnnnnnnnnnnnnnnnnnnnnnnnnnnnnnnnnnnnnnnnnnnnnnnnnnnnnnnnnnnnnnnnnnnnnnnnnnnnnnnnnnnnnnnnnnnnnnnnnnnnnnnnnnnnnnnnnnnnnnnnnnnnnnnnnnnnnnnnnnnnnnnnnnnnnnnnnnnnnnnnnnnnnnnnnnnnnnnnnnnnnnnnnnnnnnnnnnnnnnnnnnnnnnnnnnnnnnnnnnnnnnnnnnnnnnnnnnnnnnnnnnnnnnnnnnnnnnnnnnnnnnnnnnnnnnnnnnnnnnnnnnnnnnnnnnnnnnnnnnnnnnnnnnnnnnnnnnnnnnnnnnnnnnnnnnnnnnnnnnnnnnnnnnnnnnnnnnnnnnnnnnnnnnnnnnnnnnnnnnnnnnnnnnnnnnnnnnnnnnnnnnnnnnnnnnnnnnnnnnnnnnnnnnnnnnnnnnnnnnnnnnnnnnnnnnnnnnnnnnnnnnnnnnnnnnnnnnnnnnnnnnnnnnnnnnnnnnnnnnnnnnnnnnnnnnnnnnnnnnnnnnnnnnnnnnnnnnnnnnnnnnnnnnnnnnnnnnnnnnnnnnnnnnnnnnnnnnnnnnnnnnnnnnnnnnnnnnnnnnnnnnnnnnnnnnnnnnnnnnnnnnnnnnnnnnnnnnnnnnnnnnnnnnnnnnnnnnnnnnnnnnnnnnnnnnnnnnnnnnnnnnnnnnnnnnnnnnnnnnnnnnnnnnnnnnnnnnnnnnnnnnnnnnnnnnnnnnnnnnnnnnnnnnnnnnnnnnnnnnnnnnnnnnnnnnnnnnnnnnnnnnnnnnnnnnnnnnnnnnnnnnnnnnnnnnnnnnnnnnnnnnnnnnnnnnnnnnnnnnnnnnnnnnnnnnnnnnnnnnnnnnnnnnnnnnnnnnnnnnnnnnnnnnnnnnnnnnnnnnnnnnnnnnnnnnnnnnnnnnnnnnnnnnnnnnnnnnnnnnnnnnnnnnnnnnnnnnnnnnnnnnnnnnnnnnnnnnnnnnnnnnnnnnnnnnnnnnnnnnnnnnnnnnnnnnnnnnnnnnnnnnnnnnnnnnnnnnnnnnnnnnnnnnnnnnnnnnnnnnnnnnnnnnnnnnnnnnnnnnnnnnnnnnnnnnnnnnnnnnnnnnnnnnnnnnnnnnnnnnnnnnnnnnnnnnnnnnnnnnnnnnnnnnnnnnnnnnnnnnnnnnnnnnnnnnnnnnnnnnnnnnnnnnnnnnnnnnnnnnnnnnnnnnnnnnnnnnnnnnnnnnnnnnnnnnnnnnnnnnnnnnnnnnnnnnnnnnnnnnnnnnnnnnnnnnnnnnnnnnnnnnnnnnnnnnnnnnnnnnnnnnnnnnnnnnnnnnnnnnnnnnnnnnnnnnnnnnnnnnnnnnnnnnnnnnnnnnnnnnnnnnnnnnnnnnnnnnnnnnnnnnnnnnnnnnnnnnnnnnnnnnnnnnnnnnnnnnnnnnnnnnnnnnnnnnnnnnnnnnnnnnnnnnnnnnnnnnnnnnnnnnnnnnnnnnnnnnnnnnnnnnnnnnnnnnnnnnnnnnnnnnnnnnnnnnnnnnnnnnnnnnnnnnnnnnnnnnnnnnnnnnnnnnnnnnnnnnnnnnnnnnnnnnnnnnnnnnnnnnnnnnnnnnnnnnnnnnnnnnnnnnnnnnnnnnnnnnnnnnnnnnnnnnnnnnnnnnnnnnnnnnnnnnnnnnnnnnnnnnnnnnnnnnnnnnnnnnnnnnnnnnnnnnnnnnnnnnnnnnnnnnnnnnnnnnnnnnnnnnnnnnnnnnnnnnnnnnnnnnnnnnnnnnnnnnnnnnnnnnnnnnnnnnnnnnnnnnnnnnnnnnnnnnnnnnnnnnnnnnnnnnnnnnnnnnnnnnnnnnnnnnnnnnnnnnnnnnnnnnnnnnnnnnnnnnnnnnnnnnnnnnnnnnnnnnnnnnnnnnnnnnnnnnnnnnnnnnnnnnnnnnnnnnnnnnnnnnnnnnnnnnnnnnnnnnnnnnnnnnnnnnnnnnnnnnnnnnnnnnnnnnnnnnnnnnnnnnnnnnnnnnnnnnnnnnnnnnnnnnnnnnnnnnnnnnnnnnnnnnnnnnnnnnnnnnnnnnnnnnnnnnnnnnnnnnnnnnnnnnnnnnnnnnnnnnnnnnnnnnnnnnnnnnnnnnnnnnnnnnnnnnnnnnnnnnnnnnnnnnnnnnnnnnnnnnnnnnnnnnnnnnnnnnnnnnnnnnnnnnnnnnnnnnnnnnnnnnnnnnnnnnnnnnnnnnnnnnnnnnnnnnnnnnnnnnnnnnnnnnnnnnnnnnnnnnnnnnnnnnnnnnnnnnnnnnnnnnnnnnnnnnnnnnnnnnnnnnnnnnnnnnnnnnnnnnnnnnnnnnnnnnnnnnnnnnnnnnnnnnnnnnnnnnnnnnnnnnnnnnnnnnnnnnnnnnnnnnnnnnnnnnnnnnnnnnnnnnnnnnnnnnnnnnnnnnnnnnnnnnnnnnnnnnnnnnnnnnnnnnnnnnnnnnnnnnnnnnnnnnnnnnnnnnnnnnnnnnnnnnnnnnnnnnnnnnnnnnnnnnnnnnnnnnnnnnnnnnnnnnnnnnnnnnnnnnnnnnnnnnnnnnnnnnnnnnnnnnnnnnnnnnnnnnnnnnnnnnnnnnnnnnnnnnnnnnnnnnnnnnnnnnnnnnnnnnnnnnnnnnnnnnnnnnnnnnnnnnnnnnnnnnnnnnnnnnnnnnnnnnnnnnnnnnnnnnnnnnnnnnnnnnnnnnnnnnnnnnnnnnnnnnnnnnnnnnnnnnnnnnnnnnnnnnnnnnnnnnnnnnnnnnnnnnnnnnnnnnnnnnnnnnnnnnnnnnnnnnnnnnnnnnnnnnnnnnnnnnnnnnnnnnnnnnnnnnnnnnnnnnnnnnnnnnnnnnnnnnnnnnnnnnnnnnnnnnnnnnnnnnnnnnnnnnnnnnnnnnnnnnnnnnnnnnnnnnnnnnnnnnnnnnnnnnnnnnnnnnnnnnnnnnnnnnnnnnnnnnnnnnnnnnnnnnnnnnnnnnnnnnnnnnnnnnnnnnnnnnnnnnnnnnnnnnnnnnnnnnnnnnnnnnnnnnnnnnnnnnnnnnnnnnnnnnnnnnnnnnnnnnnnnnnnnnnnnnnnnnnnnnnnnnnnnnnnnnnnnnnnnnnnnnnnnnnnnnnnnnnnnnnnnnnnnnnnnnnnnnnnnnnnnnnnnnnnnnnnnnnnnnnnnnnnnnnnnnnnnnnnnnnnnnnnnnnnnnnnnnnnnnnnnnnnnnnnnnnnnnnnnnnnnnnnnnnnnnnnnnnnnnnnnnnnnnnnnnnnnnnnnnnnnnnnnnnnnnnnnnnnnnnnnnnnnnnnnnnnnnnnnnnnnnnnnnnnnnnnnnnnnnnnnnnnnnnnnnnnnnnnnnnnnnnnnnnnnnnnnnnnnnnnnnnnnnnnnnnnnnnnnnnnnnnnnnnnnnnnnnnnnnnnnnnnnnnnnnnnnnnnnnnnnnnnnnnnnnnnnnnnnnnnnnnnnnnnnnnnnnnnnnnnnnnnnnnnnnnnnnnnnnnnnnnnnnnnnnnnnnnnnnnnnnnnnnnnnnnnnnnnnnnnnnnnnnnnnnnnnnnnnnnnnnnnnnnnnnnnnnnnnnnnnnnnnnnnnnnnnnnnnnnnnnnnnnnnnnnnnnnnnnnnnnnnnnnnnnnnnnnnnnnnnnnnnnnnnnnnnnnnnnnnnnnnnnnnnnnnnnnnnnnnnnnnnnnnnnnnnnnnnnnnnnnnnnnnnnnnnnnnnnnnnnnnnnnnnnnnnnnnnnnnnnnnnnnnnnnnnnnnnnnnnnnnnnnnnnnnnnnnnnnnnnnnnnnnnnnnnnnnnnnnnnnnnnnnnnnnnnnnnnnnnnnnnnnnnnnnnnnnnnnnnnnnnnnnnnnnnnnnnnnnnnnnnnnnnnnnnnnnnnnnnnnnnnnnnnnnnnnnnnnnnnnnnnnnnnnnnnnnnnnnnnnnnnnnnnnnnnnnnnnnnnnnnnnnnnnnnnnnnnnnnnnnnnnnnnnnnnnnnnnnnnnnnnnnnnnnnnnnnnnnnnnnnnnnnnnnnnnnnnnnnnnnnnnnnnnnnnnnnnnnnnnnnnnnnnnnnnnnnnnnnnnnnnnnnnnnnnnnnnnnnnnnnnnnnnnnnnnnnnnnnnnnnnnnnnnnnnnnnnnnnnnnnnnnnnnnnnnnnnnnnnnnnnnnnnnnnnnnnnnnnnnnnnnnnnnnnnnnnnnnnnnnnnnnnnnnnnnnnnnnnnnnnnnnnnnnnnnnnnnnnnnnnnnnnnnnnnnnnnnnnnnnnnnnnnnnnnnnnnnnnnnnnnnnnnnnnnnnnnnnnnnnnnnnnnnnnnnnnnnnnnnnnnnnnnnnnnnnnnnnnnnnnnnnnnnnnnnnnnnnnnnnnnnnnnnnnnnnnnnnnnnnnnnnnnnnnnnnnnnnnnnnnnnnnnnnnnnnnnnnnnnnnnnnnnnnnnnnnnnnnnnnnnnnnnnnnnnnnnnnnnnnnnnnnnnnnnnnnnnnnnnnnnnnnnnnnnnnnnnnnnnnnnnnnnnnnnnnnnnnnnnnnnnnnnnnnnnnnnnnnnnnnnnnnnnnnnnnnnnnnnnnnnnnnnnnnnnnnnnnnnnnnnnnnnnnnnnnnnnnnnnnnnnnnnnnnnnnnnnnnnnnnnnnnnnnnnnnnnnnnnnnnnnnnnnnnnnnnnnnnnnnnnnnnnnnnnnnnnnnnnnnnnnnnnnnnnnnnnnnnnnnnnnnnnnnnnnnnnnnnnnnnnnnnnnnnnnnnnnnnnnnnnnnnnnnnnnnnnnnnnnnnnnnnnnnnnnnnnnnnnnnnnnnnnnnnnnnnnnnnnnnnnnnnnnnnnnnnnnnnnnnnnnnnnnnnnnnnnnnnnnnnnnnnnnnnnnnnnnnnnnnnnnnnnnnnnnnnnnnnnnnnnnnnnnnnnnnnnnnnnnnnnnnnnnnnnnnnnnnnnnnnnnnnnnnnnnnnnnnnnnnnnnnnnnnnnnnnnnnnnnnnnnnnnnnnnnnnnnnnnnnnnnnnnnnnnnnnnnnnnnnnnnnnnnnnnnnnnnnnnnnnnnnnnnnnnnnnnnnnnnnnnnnnnnnnnnnnnnnnnnnnnnnnnnnnnnnnnnnnnnnnnnnnnnnnnnnnnnnnnnnnnnnnnnnnnnnnnnnnnnnnnnnnnnnnnnnnnnnnnnnnnnnnnnnnnnnnnnnnnnnnnnnnnnnnnnnnnnnnnnnnnnnnnnnnnnnnnnnnnnnnnnnnnnnnnnnnnnnnnnnnnnnnnnnnnnnnnnnnnnnnnnnnnnnnnnnnnnnnnnnnnnnnnnnnnnnnnnnnnnnnnnnnnnnnnnnnnnnnnnnnnnnnnnnnnnnnnnnnnnnnnnnnnnnnnnnnnnnnnnnnnnnnnnnnnnnnnnnnnnnnnnnnnnnnnnnnnnnnnnnnnnnnnnnnnnnnnnnnnnnnnnnnnnnnnnnnnnnnnnnnnnnnnnnnnnnnnnnnnnnnnnnnnnnnnnnnnnnnnnnnnnnnnnnnnnnnnnnnnnnnnnnnnnnnnnnnnnnnnnnnnnnnnnnnnnnnnnnnnnnnnnnnnnnnnnnnnnnnnnnnnnnnnnnnnnnnnnnnnnnnnnnnnnnnnnnnnnnnnnnnnnnnnnnnnnnnnnnnnnnnnnnnnnnnnnnnnnnnnnnnnnnnnnnnnnnnnnnnnnnnnnnnnnnnnnnnnnnnnnnnnnnnnnnnnnnnnnnnnnnnnnnnnnnnnnnnnnnnnnnnnnnnnnnnnnnnnnnnnnnnnnnnnnnnnnnnnnnnnnnnnnnnnnnnnnnnnnnnnnnnnnnnnnnnnnnnnnnnnnnnnnnnnnnnnnnnnnnnnnnnnnnnnnnnnnnnnnnnnnnnnnnnnnnnnnnnnnnnnnnnnnnnnnnnnnnnnnnnnnnnnnnnnnnnnnnnnnnnnnnnnnnnnnnnnnnnnnnnnnnnnnnnnnnnnnnnnnnnnnnnnnnnnnnnnnnnnnnnnnnnnnnnnnnnnnnnnnnnnnnnnnnnnnnnnnnnnnnnnnnnnnnnnnnnnnnnnnnnnnnnnnnnnnnnnnnnnnnnnnnnnnnnnnnnnnnnnnnnnnnnnnnnnnnnnnnnnnnnnnnnnnnnnnnnnnnnnnnnnnnnnnnnnnnnnnnnnnnnnnnnnnnnnnnnnnnnnnnnnnnnnnnnnnnnnnnnnnnnnnnnnnnnnnnnnnnnnnnnnnnnnnnnnnnnnnnnnnnnnnnnnnnnnnnnnnnnnnnnnnnnnnnnnnnnnnnnnnnnnnnnnnnnnnnnnnnnnnnnnnnnnnnnnnnnnnnnnnnnnnnnnnnnnnnnnnnnnnnnnnnnnnnnnnnnnnnnnnnnnnnnnnnnnnnnnnnnnnnnnnnnnnnnnnnnnnnnnnnnnnnnnnnnnnnnnnnnnnnnnnnnnnnnnnnnnnnnnnnnnnnnnnnnnnnnnnnnnnnnnnnnnnnnnnnnnnnnnnnnnnnnnnnnnnnnnnnnnnnnnnnnnnnnnnnnnnnnnnnnnnnnnnnnnnnnnnnnnnnnnnnnnnnnnnnnnnnnnnnnnnnnnnnnnnnnnnnnnnnnnnnnnnnnnnnnnnnnnnnnnnnnnnnnnnnnnnnnnnnnnnnnnnnnnnnnnnnnnnnnnnnnnnnnnnnnnnnnnnnnnnnnnnnnnnnnnnnnnnnnnnnnnnnnnnnnnnnnnnnnnnnnnnnnnnnnnnnnnnnnnnnnnnnnnnnnnnnnnnnnnnnnnnnnnnnnnnnnnnnnnnnnnnnnnnnnnnnnnnnnnnnnnnnnnnnnnnnnnnnnnnnnnnnnnnnnnnnnnnnnnnnnnnnnnnnnnnnnnnnnnnnnnnnnnnnnnnnnnnnnnnnnnnnnnnnnnnnnnnnnnnnnnnnnnnnnnnnnnnnnnnnnnnnnnnnnnnnnnnnnnnnnnnnnnnnnnnnnnnnnnnnnnnnnnnnnnnnnnnnnnnnnnnnnnnnnnnnnnnnnnnnnnnnnnnnnnnnnnnnnnnnnnnnnnnnnnnnnnnnnnnnnnnnnnnnnnnnnnnnnnnnnnnnnnnnnnnnnnnnnnnnnnnnnnnnnnnnnnnnnnnnnnnnnnnnnnnnnnnnnnnnnnnnnnnnnnnnnnnnnnnnnnnnnnnnnnnnnnnnnnnnnnnnnnnnnnnnnnnnnnnnnnnnnnnnnnnnnnnnnnnnnnnnnnnnnnnnnnnnnnnnnnnnnnnnnnnnnnnnnnnnnnnnnnnnnnnnnnnnnnnnnnnnnnnnnnnnnnnnnnnnnnnnnnnnnnnnnnnnnnnnnnnnnnnnnnnnnnnnnnnnnnnnnnnnnnnnnnnnnnnnnnnnnnnnnnnnnnnnnnnnnnnnnnnnnnnnnnnnnnnnnnnnnnnnnnnnnnnnnnnnnnnnnnnnnnnnnnnnnnnnnnnnnnnnnnnnnnnnnnnnnnnnnnnnnnnnnnnnnnnnnnnnnnnnnnnnnnnnnnnnnnnnnnnnnnnnnnnnnnnnnnnnnnnnnnnnnnnnnnnnnnnnnnnnnnnnnnnnnnnnnnnnnnnnnnnnnnnnnnnnnnnnnnnnnnnnnnnnnnnnnnnnnnnnnnnnnnnnnnnnnnnnnnnnnnnnnnnnnnnnnnnnnnnnnnnnnnnnnnnnnnnnnnnnnnnnnnnnnnnnnnnnnnnnnnnnnnnnnnnnnnnnnnnnnnnnnnnnnnnnnnnnnnnnnnnnnnnnnnnnnnnnnnnnnnnnnnnnnnnnnnnnnnnnnnnnnnnnnnnnnnnnnnnnnnnnnnnnnnnnnnnnnnnnnnnnnnnnnnnnnnnnnnnnnnnnnnnnnnnnnnnnnnnnnnnnnnnnnnnnnnnnnnnnnnnnnnnnnnnnnnnnnnnnnnnnnnnnnnnnnnnnnnnnnnnnnnnnnnnnnnnnnnnnnnnnnnnnnnnnnnnnnnnnnnnnnnnnnnnnnnnnnnnnnnnnnnnnnnnnnnnnnnnnnnnnnnnnnnnnnnnnnnnnnnnnnnnnnnnnnnnnnnnnnnnnnnnnnnnnnnnnnnnnnnnnnnnnnnnnnnnnnnnnnnnnnnnnnnnnnnnnnnnnnnnnnnnnnnnnnnnnnnnnnnnnnnnnnnnnnnnnnnnnnnnnnnnnnnnnnnnnnnnnnnnnnnnnnnnnnnnnnnnnnnnnnnnnnnnnnnnnnnnnnnnnnnnnnnnnnnnnnnnnnnnnnnnnnnnnnnnnnnnnnnnnnnnnnnnnnnnnnnnnnnnnnnnnnnnnnnnnnnnnnnnnnnnnnnnnnnnnnnnnnnnnnnnnnnnnnnnnnnnnnnnnnnnnnnnnnnnnnnnnnnnnnnnnnnnnnnnnnnnnnnnnnnnnnnnnnnnnnnnnnnnnnnnnnnnnnnnnnnnnnnnnnnnnnnnnnnnnnnnnnnnnnnnnnnnnnnnnnnnnnnnnnnnnnnnnnnnnnnnnnnnnnnnnnnnnnnnnnnnnnnnnnnnnnnnnnnnnnnnnnnnnnnnnnnnnnnnnnnnnnnnnnnnnnnnnnnnnnnnnnnnnnnnnnnnnnnnnnnnnnnnnnnnnnnnnnnnnnnnnnnnnnnnnnnnnnnnnnnnnnnnnnnnnnnnnnnnnnnnnnnnnnnnnnnnnnnnnnnnnnnnnnnnnnnnnnnnnnnnnnnnnnnnnnnnnnnnnnnnnnnnnnnnnnnnnnnnnnnnnnnnnnnnnnnnnnnnnnnnnnnnnnnnnnnnnnnnnnnnnnnnnnnnnnnnnnnnnnnnnnnnnnnnnnnnnnnnnnnnnnnnnnnnnnnnnnnnnnnnnnnnnnnnnnnnnnnnnnnnnnnnnnnnnnnnnnnnnnnnnnnnnnnnnnnnnnnnnnnnnnnnnnnnnnnnnnnnnnnnnnnnnnnnnnnnnnnnnnnnnnnnnnnnnnnnnnnnnnnnnnnnnnnnnnnnnnnnnnnnnnnnnnnnnnnnnnnnnnnnnnnnnnnnnnnnnnnnnnnnnnnnnnnnnnnnnnnnnnnnnnnnnnnnnnnnnnnnnnnnnnnnnnnnnnnnnnnnnnnnnnnnnnnnnnnnnnnnnnnnnnnnnnnnnnnnnnnnnnnnnnnnnnnnnnnnnnnnnnnnnnnnnnnnnnnnnnnnnnnnnnnnnnnnnnnnnnnnnnnnnnnnnnnnnnnnnnnnnnnnnnnnnnnnnnnnnnnnnnnnnnnnnnnnnnnnnnnnnnnnnnnnnnnnnnnnnnnnnnnnnnnnnnnnnnnnnnnnnnnnnnnnnnnnnnnnnnnnnnnnnnnnnnnnnnnnnnnnnnnnnnnnnnnnnnnnnnnnnnnnnnnnnnnnnnnnnnnnnnnnnnnnnnnnnnnnnnnnnnnnnnnnnnnnnnnnnnnnnnnnnnnnnnnnnnnnnnnnnnnnnnnnnnnnnnnnnnnnnnnnnnnnnnnnnnnnnnnnnnnnnnnnnnnnnnnnnnnnnnnnnnnnnnnnnnnnnnnnnnnnnnnnnnnnnnnnnnnnnnnnnnnnnnnnnnnnnnnnnnnnnnnnnnnnnnnnnnnnnnnnnnnnnnnnnnnnnnnnnnnnnnnnnnnnnnnnnnnnnnnnnnnnnnnnnnnnnnnnnnnnnnnnnnnnnnnnnnnnnnnnnnnnnnnnnnnnnnnnnnnnnnnnnnnnnnnnnnnnnnnnnnnnnnnnnnnnnnnnnnnnnnnnnnnnnnnnnnnnnnnnnnnnnnnnnnnnnnnnnnnnnnnnnnnnnnnnnnnnnnnnnnnnnnnnnnnnnnnnnnnnnnnnnnnnnnnnnnnnnnnnnnnnnnnnnnnnnnnnnnnnnnnnnnnnnnnnnnnnnnnnnnnnnnnnnnnnnnnnnnnnnnnnnnnnnnnnnnnnnnnnnnnnnnnnnnnnnnnnnnnnnnnnnnnnnnnnnnnnnnnnnnnnnnnnnnnnnnnnnnnnnnnnnnnnnnnnnnnnnnnnnnnnnnnnnnnnnnnnnnnnnnnnnnnnnnnnnnnnnnnnnnnnnnnnnnnnnnnnnnnnnnnnnnnnnnnnnnnnnnnnnnnnnnnnnnnnnnnnnnnnnnnnnnnnnnnnnnnnnnnnnnnnnnnnnnnnnnnnnnnnnnnnnnnnnnnnnnnnnnnnnnnnnnnnnnnnnnnnnnnnnnnnnnnnnnnnnnnnnnnnnnnnnnnnnnnnnnnnnnnnnnnnnnnnnnnnnnnnnnnnnnnnnnnnnnnnnnnnnnnnnnnnnnnnnnnnnnnnnnnnnnnnnnnnnnnnnnnnnnnnnnnnnnnnnnnnnnnnnnnnnnnnnnnnnnnnnnnnnnnnnnnnnnnnnnnnnnnnnnnnnnnnnnnnnnnnnnnnnnnnnnnnnnnnnnnnnnnnnnnnnnnnnnnnnnnnnnnnnnnnnnnnnnnnnnnnnnnnnnnnnnnnnnnnnnnnnnnnnnnnnnnnnnnnnnnnnnnnnnnnnnnnnnnnnnnnnnnnnnnnnnnnnnnnnnnnnnnnnnnnnnnnnnnnnnnnnnnnnnnnnnnnnnnnnnnnnnnnnnnnnnnnnnnnnnnnnnnnnnnnnnnnnnnnnnnnnnnnnnnnnnnnnnnnnnnnnnnnnnnnnnnnnnnnnnnnnnnnnnnnnnnnnnnnnnnnnnnnnnnnnnnnnnnnnnnnnnnnnnnnnnnnnnnnnnnnnnnnnnnnnnnnnnnnnnnnnnnnnnnnnnnnnnnnnnnnnnnnnnnnnnnnnnnnnnnnnnnnnnnnnnnnnnnnnnnnnnnnnnnnnnnnnnnnnnnnnnnnnnnnnnnnnnnnnnnnnnnnnnnnnnnnnnnnnnnnnnnnnnnnnnnnnnnnnnnnnnnnnnnnnnnnnnnnnnnnnnnnnnnnnnnnnnnnnnnnnnnnnnnnnnnnnnnnnnnnnnnnnnnnnnnnnnnnnnnnnnnnnnnnnnnnnnnnnnnnnnnnnnnnnnnnnnnnnnnnnnnnnnnnnnnnnnnnnnnnnnnnnnnnnnnnnnnnnnnnnnnnnnnnnnnnnnnnnnnnnnnnnnnnnnnnnnnnnnnnnnnnnnnnnnnnnnnnnnnnnnnnnnnnnnnnnnnnnnnnnnnnnnnnnnnnnnnnnnnnnnnnnnnnnnnnnnnnnnnnnnnnnnnnnnnnnnnnnnnnnnnnnnnnnnnnnnnnnnnnnnnnnnnnnnnnnnnnnnnnnnnnnnnnnnnnnnnnnnnnnnnnnnnnnnnnnnnnnnnnnnnnnnnnnnnnnnnnnnnnnnnnnnnnnnnnnnnnnnnnnnnnnnnnnnnnnnnnnnnnnnnnnnnnnnnnnnnnnnnnnnnnnnnnnnnnnnnnnnnnnnnnnnnnnnnnnnnnnnnnnnnnnnnnnnnnnnnnnnnnnnnnnnnnnnnnnnnnnnnnnnnnnnnnnnnnnnnnnnnnnnnnnnnnnnnnnnnnnnnnnnnnnnnnnnnnnnnnnnnnnnnnnnnnnnnnnnnnnnnnnnnnnnnnnnnnnnnnnnnnnnnnnnnnnnnnnnnnnnnnnnnnnnnnnnnnnnnnnnnnnnnnnnnnnnnnnnnnnnnnnnnnnnnnnnnnnnnnnnnnnnnnnnnnnnnnnnnnnnnnnnnnnnnnnnnnnnnnnnnnnnnnnnnnnnnnnnnnnnnnnnnnnnnnnnnnnnnnnnnnnnnnnnnnnnnnnnnnnnnnnnnnnnnnnnnnnnnnnnnnnnnnnnnnnnnnnnnnnnnnnnnnnnnnnnnnnnnnnnnnnnnnnnnnnnnnnnnnnnnnnnnnnnnnnnnnnnnnnnnnnnnnnnnnnnnnnnnnnnnnnnnnnnnnnnnnnnnnnnnnnnnnnnnnnnnnnnnnnnnnnnnnnnnnnnnnnnnnnnnnnnnnnnnnnnnnnnnnnnnnnnnnnnnnnnnnnnnnnnnnnnnnnnnnnnnnnnnnnnnnnnnnnnnnnnnnnnnnnnnnnnnnnnnnnnnnnnnnnnnnnnnnnnnnnnnnnnnnnnnnnnnnnnnnnnnnnnnnnnnnnnnnnnnnnnnnnnnnnnnnnnnnnnnnnnnnnnnnnnnnnnnnnnnnnnnnnnnnnnnnnnnnnnnnnnnnnnnnnnnnnnnnnnnnnnnnnnnnnnnnnnnnnnnnnnnnnnnnnnnnnnnnnnnnnnnnnnnnnnnnnnnnnnnnnnnnnnnnnnnnnnnnnnnnnnnnnnnnnnnnnnnnnnnnnnnnnnnnnnnnnnnnnnnnnnnnnnnnnnnnnnnnnnnnnnnnnnnnnnnnnnnnnnnnnnnnnnnnnnnnnnnnnnnnnnnnnnnnnnnnnnnnnnnnnnnnnnnnnnnnnnnnnnnnnnnnnnnnnnnnnnnnnnnnnnnnnnnnnnnnnnnnnnnnnnnnnnnnnnnnnnnnnnnnnnnnnnnnnnnnnnnnnnnnnnnnnnnnnnnnnnnnnnnnnnnnnnnnnnnnnnnnnnnnnnnnnnnnnnnnnnnnnnnnnnnnnnnnnnnnnnnnnnnnnnnnnnnnnnnnnnnnnnnnnnnnnnnnnnnnnnnnnnnnnnnnnnnnnnnnnnnnnnnnnnnnnnnnnnnnnnnnnnnnnnnnnnnnnnnnnnnnnnnnnnnnnnnnnnnnnnnnnnnnnnnnnnnnnnnnnnnnnnnnnnnnnnnnnnnnnnnnnnnnnnnnnnnnnnnnnnnnnnnnnnnnnnnnnnnnnnnnnnnnnnnnnnnnnnnnnnnnnnnnnnnnnnnnnnnnnnnnnnnnnnnnnnnnnnnnnnnnnnnnnnnnnnnnnnnnnnnnnnnnnnnnnnnnnnnnnnnnnnnnnnnnnnnnnnnnnnnnnnnnnnnnnnnnnnnnnnnnnnnnnnnnnnnnnnnnnnnnnnnnnnnnnnnnnnnnnnnnnnnnnnnnnnnnnnnnnnnnnnnnnnnnnnnnnnnnnnnnnnnnnnnnnnnnnnnnnnnnnnnnnnnnnnnnnnnnnnnnnnnnnnnnnnnnnnnnnnnnnnnnnnnnnnnnnnnnnnnnnnnnnnnnnnnnnnnnnnnnnnnnnnnnnnnnnnnnnnnnnnnnnnnnnnnnnnnnnnnnnnnnnnnnnnnnnnnnnnnnnnnnnnnnnnnnnnnnnnnnnnnnnnnnnnnnnnnnnnnnnnnnnnnnnnnnnnnnnnnnnnnnnnnnnnnnnnnnnnnnnnnnnnnnnnnnnnnnnnnnnnnnnnnnnnnnnnnnnnnnnnnnnnnnnnnnnnnnnnnnnnnnnnnnnnnnnnnnnnnnnnnnnnnnnnnnnnnnnnnnnnnnnnnnnnnnnnnnnnnnnnnnnnnnnnnnnnnnnnnnnnnnnnnnnnnnnnnnnnnnnnnnnnnnnnnnnnnnnnnnnnnnnnnnnnnnnnnnnnnnnnnnnnnnnnnnnnnnnnnnnnnnnnnnnnnnnnnnnnnnnnnnnnnnnnnnnnnnnnnnnnnnnnnnnnnnnnnnnnnnnnnnnnnnnnnnnnnnnnnnnnnnnnnnnnnnnnnnnnnnnnnnnnnnnnnnnnnnnnnnnnnnnnnnnnnnnnnnnnnnnnnnnnnnnnnnnnnnnnnnnnnnnnnnnnnnnnnnnnnnnnnnnnnnnnnnnnnnnnnnnnnnnnnnnnnnnnnnnnnnnnnnnnnnnnnnnnnnnnnnnnnnnnnnnnnnnnnnnnnnnnnnnnnnnnnnnnnnnnnnnnnnnnnnnnnnnnnnnnnnnnnnnnnnnnnnnnnnnnnnnnnnnnnnnnnnnnnnnnnnnnnnnnnnnnnnnnnnnnnnnnnnnnnnnnnnnnnnnnnnnnnnnnnnnnnnnnnnnnnnnnnnnnnnnnnnnnnnnnnnnnnnnnnnnnnnnnnnnnnnnnnnnnnnnnnnnnnnnnnnnnnnnnnnnnnnnnnnnnnnnnnnnnnnnnnnnnnnnnnnnnnnnnnnnnnnnnnnnnnnnnnnnnnnnnnnnnnnnnnnnnnnnnnnnnnnnnnnnnnnnnnnnnnnnnnnnnnnnnnnnnnnnnnnnnnnnnnnnnnnnnnnnnnnnnnnnnnnnnnnnnnnnnnnnnnnnnnnnnnnnnnnnnnnnnnnnnnnnnnnnnnnnnnnnnnnnnnnnnnnnnnnnnnnnnnnnnnnnnnnnnnnnnnnnnnnnnnnnnnnnnnnnnnnnnnnnnnnnnnnnnnnnnnnnnnnnnnnnnnnnnnnnnnnnnnnnnnnnnnnnnnnnnnnnnnnnnnnnnnnnnnnnnnnnnnnnnnnnnnnnnnnnnnnnnnnnnnnnnnnnnnnnnnnnnnnnnnnnnnnnnnnnnnnnnnnnnnnnnnnnnnnnnnnnnnnnnnnnnnnnnnnnnnnnnnnnnnnnnnnnnnnnnnnnnnnnnnnnnnnnnnnnnnnnnnnnnnnnnnnnnnnnnnnnnnnnnnnnnnnnnnnnnnnnnnnnnnnnnnnnnnnnnnnnnnnnnnnnnnnnnnnnnnnnnnnnnnnnnnnnnnnnnnnnnnnnnnnnnnnnnnnnnnnnnnnnnnnnnnnnnnnnnnnnnnnnnnnnnnnnnnnnnnnnnnnnnnnnnnnnnnnnnnnnnnnnnnnnnnnnnnnnnnnnnnnnnnnnnnnnnnnnnnnnnnnnnnnnnnnnnnnnnnnnnnnnnnnnnnnnnnnnnnnnnnnnnnnnnnnnnnnnnnnnnnnnnnnnnnnnnnnnnnnnnnnnnnnnnnnnnnnnnnnnnnnnnnnnnnnnnnnnnnnnnnnnnnnnnnnnnnnnnnnnnnnnnnnnnnnnnnnnnnnnnnnnnnnnnnnnnnnnnnnnnnnnnnnnnnnnnnnnnnnnnnnnnnnnnnnnnnnnnnnnnnnnnnnnnnnnnnnnnnnnnnnnnnnnnnnnnnnnnnnnnnnnnnnnnnnnnnnnnnnnnnnnnnnnnnnnnnnnnnnnnnnnnnnnnnnnnnnnnnnnnnnnnnnnnnnnnnnnnnnnnnnnnnnnnnnnnnnnnnnnnnnnnnnnnnnnnnnnnnnnnnnnnnnnnnnnnnnnnnnnnnnnnnnnnnnnnnnnnnnnnnnnnnnnnnnnnnnnnnnnnnnnnnnnnnnnnnnnnnnnnnnnnnnnnnnnnnnnnnnnnnnnnnnnnnnnnnnnnnnnnnnnnnnnnnnnnnnnnnnnnnnnnnnnnnnnnnnnnnnnnnnnnnnnnnnnnnnnnnnnnnnnnnnnnnnnnnnnnnnnnnnnnnnnnnnnnnnnnnnnnnnnnnnnnnnnnnnnnnnnnnnnnnnnnnnnnnnnnnnnnnnnnnnnnnnnnnnnnnnnnnnnnnnnnnnnnnnnnnnnnnnnnnnnnnnnnnnnnnnnnnnnnnnnnnnnnnnnnnnnnnnnnnnnnnnnnnnnnnnnnnnnnnnnnnnnnnnnnnnnnnnnnnnnnnnnnnnnnnnnnnnnnnnnnnnnnnnnnnnnnnnnnnnnnnnnnnnnnnnnnnnnnnnnnnnnnnnnnnnnnnnnnnnnnnnnnnnnnnnnnnnnnnnnnnnnnnnnnnnnnnnnnnnnnnnnnnnnnnnnnnnnnnnnnnnnnnnnnnnnnnnnnnnnnnnnnnnnnnnnnnnnnnnnnnnnnnnnnnnnnnnnnnnnnnnnnnnnnnnnnnnnnnnnnnnnnnnnnnnnnnnnnnnnnnnnnnnnnnnnnnnnnnnnnnnnnnnnnnnnnnnnnnnnnnnnnnnnnnnnnnnnnnnnnnnnnnnnnnnnnnnnnnnnnnnnnnnnnnnnnnnnnnnnnnnnnnnnnnnnnnnnnnnnnnnnnnnnnnnnnnnnnnnnnnnnnnnnnnnnnnnnnnnnnnnnnnnnnnnnnnnnnnnnnnnnnnnnnnnnnnnnnnnnnnnnnnnnnnnnnnnnnnnnnnnnnnnnnnnnnnnnnnnnnnnnnnnnnnnnnnnnnnnnnnnnnnnnnnnnnnnnnnnnnnnnnnnnnnnnnnnnnnnnnnnnnnnnnnnnnnnnnnnnnnnnnnnnnnnnnnnnnnnnnnnnnnnnnnnnnnnnnnnnnnnnnnnnnnnnnnnnnnnnnnnnnnnnnnnnnnnnnnnnnnnnnnnnnnnnnnnnnnnnnnnnnnnnnnnnnnnnnnnnnnnnnnnnnnnnnnnnnnnnnnnnnnnnnnnnnnnnnnnnnnnnnnnnnnnnnnnnnnnnnnnnnnnnnnnnnnnnnnnnnnnnnnnnnnnnnnnnnnnnnnnnnnnnnnnnnnnnnnnnnnnnnnnnnnnnnnnnnnnnnnnnnnnnnnnnnnnnnnnnnnnnnnnnnnnnnnnnnnnnnnnnnnnnnnnnnnnnnnnnnnnnnnnnnnnnnnnnnnnnnnnnnnnnnnnnnnnnnnnnnnnnnnnnnnnnnnnnnnnnnnnnnnnnnnnnnnnnnnnnnnnnnnnnnnnnnnnnnnnnnnnnnnnnnnnnnnnnnnnnnnnnnnnnnnnnnnnnnnnnnnnnnnnnnnnnnnnnnnnnnnnnnnnnnnnnnnnnnnnnnnnnnnnnnnnnnnnnnnnnnnnnnnnnnnnnnnnnnnnnnnnnnnnnnnnnnnnnnnnnnnnnnnnnnnnnnnnnnnnnnnnnnnnnnnnnnnnnnnnnnnnnnnnnnnnnnnnnnnnnnnnnnnnnnnnnnnnnnnnnnnnnnnnnnnnnnnnnnnnnnnnnnnnnnnnnnnnnnnnnnnnnnnnnnnnnnnnnnnnnnnnnnnnnnnnnnnnnnnnnnnnnnnnnnnnnnnnnnnnnnnnnnnnnnnnnnnnnnnnnnnnnnnnnnnnnnnnnnnnnnnnnnnnnnnnnnnnnnnnnnnnnnnnnnnnnnnnnnnnnnnnnnnnnnnnnnnnnnnnnnnnnnnnnnnnnnnnnnnnnnnnnnnnnnnnnnnnnnnnnnnnnnnnnnnnnnnnnnnnnnnnnnnnnnnnnnnnnnnnnnnnnnnnnnnnnnnnnnnnnnnnnnnnnnnnnnnnnnnnnnnnnnnnnnnnnnnnnnnnnnnnnnnnnnnnnnnnnnnnnnnnnnnnnnnnnnnnnnnnnnnnnnnnnnnnnnnnnnnnnnnnnnnnnnnnnnnnnnnnnnnnnnnnnnnnnnnnnnnnnnnnnnnnnnnnnnnnnnnnnnnnnnnnnnnnnnnnnnnnnnnnnnnnnnnnnnnnnnnnnnnnnnnnnnnnnnnnnnnnnnnnnnnnnnnnnnnnnnnnnnnnnnnnnnnnnnnnnnnnnnnnnnnnnnnnnnnnnnnnnnnnnnnnnnnnnnnnnnnnnnnnnnnnnnnnnnnnnnnnnnnnnnnnnnnnnnnnnnnnnnnnnnnnnnnnnnnnnnnnnnnnnnnnnnnnnnnnnnnnnnnnnnnnnnnnnnnnnnnnnnnnnnnnnnnnnnnnnnnnnnnnnnnnnnnnnnnnnnnnnnnnnnnnnnnnnnnnnnnnnnnnnnnnnnnnnnnnnnnnnnnnnnnnnnnnnnnnnnnnnnnnnnnnnnnnnnnnnnnnnnnnnnnnnnnnnnnnnnnnnnnnnnnnnnnnnnnnnnnnnnnnnnnnnnnnnnnnnnnnnnnnnnnnnnnnnnnnnnnnnnnnnnnnnnnnnnnnnnnnnnnnnnnnnnnnnnnnnnnnnnnnnnnnnnnnnnnnnnnnnnnnnnnnnnnnnnnnnnnnnnnnnnnnnnnnnnnnnnnnnnnnnnnnnnnnnnnnnnnnnnnnnnnnnnnnnnnnnnnnnnnnnnnnnnnnnnnnnnnnnnnnnnnnnnnnnnnnnnnnnnnnnnnnnnnnnnnnnnnnnnnnnnnnnnnnnnnnnnnnnnnnnnnnnnnnnnnnnnnnnnnnnnnnnnnnnnnnnnnnnnnnnnnnnnnnnnnnnnnnnnnnnnnnnnnnnnnnnnnnnnnnnnnnnnnnnnnnnnnnnnnnnnnnnnnnnnnnnnnnnnnnnnnnnnnnnnnnnnnnnnnnnnnnnnnnnnnnnnnnnnnnnnnnnnnnnnnnnnnnnnnnnnnnnnnnnnnnnnnnnnnnnnnnnnnnnnnnnnnnnnnnnnnnnnnnnnnnnnnnnnnnnnnnnnnnnnnnnnnnnnnnnnnnnnnnnnnnnnnnnnnnnnnnnnnnnnnnnnnnnnnnnnnnnnnnnnnnnnnnnnnnnnnnnnnnnnnnnnnnnnnnnnnnnnnnnnnnnnnnnnnnnnnnnnnnnnnnnnnnnnnnnnnnnnnnnnnnnnnnnnnnnnnnnnnnnnnnnnnnnnnnnnnnnnnnnnnnnnnnnnnnnnnnnnnnnnnnnnnnnnnnnnnnnnnnnnnnnnnnnnnnnnnnnnnnnnnnnnnnnnnnnnnnnnnnnnnnnnnnnnnnnnnnnnnnnnnnnnnnnnnnnnnnnnnnnnnnnnnnnnnnnnnnnnnnnnnnnnnnnnnnnnnnnnnnnnnnnnnnnnnnnnnnnnnnnnnnnnnnnnnnnnnnnnnnnnnnnnnnnnnnnnnnnnnnnnnnnnnnnnnnnnnnnnnnnnnnnnnnnnnnnnnnnnnnnnnnnnnnnnnnnnnnnnnnnnnnnnnnnnnnnnnnnnnnnnnnnnnnnnnnnnnnnnnnnnnnnnnnnnnnnnnnnnnnnnnnnnnnnnnnnnnnnnnnnnnnnnnnnnnnnnnnnnnnnnnnnnnnnnnnnnnnnnnnnnnnnnnnnnnnnnnnnnnnnnnnnnnnnnnnnnnnnnnnnnnnnnnnnnnnnnnnnnnnnnnnnnnnnnnnnnnnnnnnnnnnnnnnnnnnnnnnnnnnnnnnnnnnnnnnnnnnnnnnnnnnnnnnnnnnnnnnnnnnnnnnnnnnnnnnnnnnnnnnnnnnnnnnnnnnnnnnnnnnnnnnnnnnnnnnnnnnnnnnnnnnnnnnnnnnnnnnnnnnnnnnnnnnnnnnnnnnnnnnnnnnnnnnnnnnnnnnnnnnnnnnnnnnnnnnnnnnnnnnnnnnnnnnnnnnnnnnnnnnnnnnnnnnnnnnnnnnnnnnnnnnnnnnnnnnnnnnnnnnnnnnnnnnnnnnnnnnnnnnnnnnnnnnnnnnnnnnnnnnnnnnnnnnnnnnnnnnnnnnnnnnnnnnnnnnnnnnnnnnnnnnnnnnnnnnnnnnnnnnnnnnnnnnnnnnnnnnnnnnnnnnnnnnnnnnnnnnnnnnnnnnnnnnnnnnnnnnnnnnnnnnnnnnnnnnnnnnnnnnnnnnnnnnnnnnnnnnnnnnnnnnnnnnnnnnnnnnnnnnnnnnnnnnnnnnnnnnnnnnnnnnnnnnnnnnnnnnnnnnnnnnnnnnnnnnnnnnnnnnnnnnnnnnnnnnnnnnnnnnnnnnnnnnnnnnnnnnnnnnnnnnnnnnnnnnnnnnnnnnnnnnnnnnnnnnnnnnnnnnnnnnnnnnnnnnnnnnnnnnnnnnnnnnnnnnnnnnnnnnnnnnnnnnnnnnnnnnnnnnnnnnnnnnnnnnnnnnnnnnnnnnnnnnnnnnnnnnnnnnnnnnnnnnnnnnnnnnnnnnnnnnnnnnnnnnnnnnnnnnnnnnnnnnnnnnnnnnnnnnnnnnnnnnnnnnnnnnnnnnnnnnnnnnnnnnnnnnnnnnnnnnnnnnnnnnnnnnnnnnnnnnnnnnnnnnnnnnnnnnnnnnnnnnnnnnnnnnnnnnnnnnnnnnnnnnnnnnnnnnnnnnnnnnnnnnnnnnnnnnnnnnnnnnnnnnnnnnnnnnnnnnnnnnnnnnnnnnnnnnnnnnnnnnnnnnnnnnnnnnnnnnnnnnnnnnnnnnnnnnnnnnnnnnnnnnnnnnnnnnnnnnnnnnnnnnnnnnnnnnnnnnnnnnnnnnnnnnnnnnnnnnnnnnnnnnnnnnnnnnnnnnnnnnnnnnnnnnnnnnnnnnnnnnnnnnnnnnnnnnnnnnnnnnnnnnnnnnnnnnnnnnnnnnnnnnnnnnnnnnnnnnnnnnnnnnnnnnnnnnnnnnnnnnnnnnnnnnnnnnnnnnnnnnnnnnnnnnnnnnnnnnnnnnnnnnnnnnnnnnnnnnnnnnnnnnnnnnnnnnnnnnnnnnnnnnnnnnnnnnnnnnnnnnnnnnnnnnnnnnnnnnnnnnnnnnnnnnnnnnnnnnnnnnnnnnnnnnnnnnnnnnnnnnnnnnnnnnnnnnnnnnnnnnnnnnnnnnnnnnnnnnnnnnnnnnnnnnnnnnnnnnnnnnnnnnnnnnnnnnnnnnnnnnnnnnnnnnnnnnnnnnnnnnnnnnnnnnnnnnnnnnnnnnnnnnnnnnnnnnnnnnnnnnnnnnnnnnnnnnnnnnnnnnnnnnnnnnnnnnnnnnnnnnnnnnnnnnnnnnnnnnnnnnnnnnnnnnnnnnnnnnnnnnnnnnnnnnnnnnnnnnnnnnnnnnnnnnnnnnnnnnnnnnnnnnnnnnnnnnnnnnnnnnnnnnnnnnnnnnnnnnnnnnnnnnnnnnnnnnnnnnnnnnnnnnnnnnnnnnnnnnnnnnnnnnnnnnnnnnnnnnnnnnnnnnnnnnnnnnnnnnnnnnnnnnnnnnnnnnnnnnnnnnnnnnnnnnnnnnnnnnnnnnnnnnnnnnnnnnnnnnnnnnnnnnnnnnnnnnnnnnnnnnnnnnnnnnnnnnnnnnnnnnnnnnnnnnnnnnnnnnnnnnnnnnnnnnnnnnnnnnnnnnnnnnnnnnnnnnnnnnnnnnnnnnnnnnnnnnnnnnnnnnnnnnnnnnnnnnnnnnnnnnnnnnnnnnnnnnnnnnnnnnnnnnnnnnnnnnnnnnnnnnnnnnnnnnnnnnnnnnnnnnnnnnnnnnnnnnnnnnnnnnnnnnnnnnnnnnnnnnnnnnnnnnnnnnnnnnnnnnnnnnnnnnnnnnnnnnnnnnnnnnnnnnnnnnnnnnnnnnnnnnnnnnnnnnnnnnnnnnnnnnnnnnnnnnnnnnnnnnnnnnnnnnnnnnnnnnnnnnnnnnnnnnnnnnnnnnnnnnnnnnnnnnnnnnnnnnnnnnnnnnnnnnnnnnnnnnnnnnnnnnnnnnnnnnnnnnnnnnnnnnnnnnnnnnnnnnnnnnnnnnnnnnnnnnnnnnnnnnnnnnnnnnnnnnnnnnnnnnnnnnnnnnnnnnnnnnnnnnnnnnnnnnnnnnnnnnnnnnnnnnnnnnnnnnnnnnnnnnnnnnnnnnnnnnnnnnnnnnnnnnnnnnnnnnnnnnnnnnnnnnnnnnnnnnnnnnnnnnnnnnnnnnnnnnnnnnnnnnnnnnnnnnnnnnnnnnnnnnnnnnnnnnnnnnnnnnnnnnnnnnnnnnnnnnnnnnnnnnnnnnnnnnnnnnnnnnnnnnnnnnnnnnnnnnnnnnnnnnnnnnnnnnnnnnnnnnnnnnnnnnnnnnnnnnnnnnnnnnnnnnnnnnnnnnnnnnnnnnnnnnnnnnnnnnnnnnnnnnnnnnnnnnnnnnnnnnnnnnnnnnnnnnnnnnnnnnnnnnnnnnnnnnnnnnnnnnnnnnnnnnnnnnnnnnnnnnnnnnnnnnnnnnnnnnnnnnnnnnnnnnnnnnnnnnnnnnnnnnnnnnnnnnnnnnnnnnnnnnnnnnnnnnnnnnnnnnnnnnnnnnnnnnnnnnnnnnnnnnnnnnnnnnnnnnnnnnnnnnnnnnnnnnnnnnnnnnnnnnnnnnnnnnnnnnnnnnnnnnnnnnnnnnnnnnnnnnnnnnnnnnnnnnnnnnnnnnnnnnnnnnnnnnnnnnnnnnnnnnnnnnnnnnnnnnnnnnnnnnnnnnnnnnnnnnnnnnnnnnnnnnnnnnnnnnnnnnnnnnnnnnnnnnnnnnnnnnnnnnnnnnnnnnnnnnnnnnnnnnnnnnnnnnnnnnnnnnnnnnnnnnnnnnnnnnnnnnnnnnnnnnnnnnnnnnnnnnnnnnnnnnnnnnnnnnnnnnnnnnnnnnnnnnnnnnnnnnnnnnnnnnnnnnnnnnnnnnnnnnnnnnnnnnnnnnnnnnnnnnnnnnnnnnnnnnnnnnnnnnnnnnnnnnnnnnnnnnnnnnnnnnnnnnnnnnnnnnnnnnnnnnnnnnnnnnnnnnnnnnnnnnnnnnnnnnnnnnnnnnnnnnnnnnnnnnnnnnnnnnnnnnnnnnnnnnnnnnnnnnnnnnnnnnnnnnnnnnnnnnnnnnnnnnnnnnnnnnnnnnnnnnnnnnnnnnnnnnnnnnnnnnnnnnnnnnnnnnnnnnnnnnnnnnnnnnnnnnnnnnnnnnnnnnnnnnnnnnnnnnnnnnnnnnnnnnnnnnnnnnnnnnnnnnnnnnnnnnnnnnnnnnnnnnnnnnnnnnnnnnnnnnnnnnnnnnnnnnnnnnnnnnnnnnnnnnnnnnnnnnnnnnnnnnnnnnnnnnnnnnnnnnnnnnnnnnnnnnnnnnnnnnnnnnnnnnnnnnnnnnnnnnnnnnnnnnnnnnnnnnnnnnnnnnnnnnnnnnnnnnnnnnnnnnnnnnnnnnnnnnnnnnnnnnnnnnnnnnnnnnnnnnnnnnnnnnnnnnnnnnnnnnnnnnnnnnnnnnnnnnnnnnnnnnnnnnnnnnnnnnnnnnnnnnnnnnnnnnnnnnnnnnnnnnnnnnnnnnnnnnnnnnnnnnnnnnnnnnnnnnnnnnnnnnnnnnnnnnnnnnnnnnnnnnnnnnnnnnnnnnnnnnnnnnnnnnnnnnnnnnnnnnnnnnnnnnnnnnnnnnnnnnnnnnnnnnnnnnnnnnnnnnnnnnnnnnnnnnnnnnnnnnnnnnnnnnnnnnnnnnnnnnnnnnnnnnnnnnnnnnnnnnnnnnnnnnnnnnnnnnnnnnnnnnnnnnnnnnnnnnnnnnnnnnnnnnnnnnnnnnnnnnnnnnnnnnnnnnnnnnnnnnnnnnnnnnnnnnnnnnnnnnnnnnnnnnnnnnnnnnnnnnnnnnnnnnnnnnnnnnnnnnnnnnnnnnnnnnnnnnnnnnnnnnnnnnnnnnnnnnnnnnnnnnnnnnnnnnnnnnnnnnnnnnnnnnnnnnnnnnnnnnnnnnnnnnnnnnnnnnnnnnnnnnnnnnnnnnnnnnnnnnnnnnnnnnnnnnnnnnnnnnnnnnnnnnnnnnnnnnnnnnnnnnnnnnnnnnnnnnnnnnnnnnnnnnnnnnnnnnnnnnnnnnnnnnnnnnnnnnnnnnnnnnnnnnnnnnnnnnnnnnnnnnnnnnnnnnnnnnnnnnnnnnnnnnnnnnnnnnnnnnnnnnnnnnnnnnnnnnnnnnnnnnnnnnnnnnnnnnnnnnnnnnnnnnnnnnnnnnnnnnnnnnnnnnnnnnnnnnnnnnnnnnnnnnnnnnnnnnnnnnnnnnnnnnnnnnnnnnnnnnnnnnnnnnnnnnnnnnnnnnnnnnnnnnnnnnnnnnnnnnnnnnnnnnnnnnnnnnnnnnnnnnnnnnnnnnnnnnnnnnnnnnnnnnnnnnnnnnnnnnnnnnnnnnnnnnnnnnnnnnnnnnnnnnnnnnnnnnnnnnnnnnnnnnnnnnnnnnnnnnnnnnnnnnnnnnnnnnnnnnnnnnnnnnnnnnnnnnnnnnnnnnnnnnnnnnnnnnnnnnnnnnnnnnnnnnnnnnnnnnnnnnnnnnnnnnnnnnnnnnnnnnnnnnnnnnnnnnnnnnnnnnnnnnnnnnnnnnnnnnnnnnnnnnnnnnnnnnnnnnnnnnnnnnnnnnnnnnnnnnnnnnnnnnnnnnnnnnnnnnnnnnnnnnnnnnnnnnnnnnnnnnnnnnnnnnnnnnnnnnnnnnnnnnnnnnnnnnnnnnnnnnnnnnnnnnnnnnnnnnnnnnnnnnnnnnnnnnnnnnnnnnnnnnnnnnnnnnnnnnnnnnnnnnnnnnnnnnnnnnnnnnnnnnnnnnnnnnnnnnnnnnnnnnnnnnnnnnnnnnnnnnnnnnnnnnnnnnnnnnnnnnnnnnnnnnnnnnnnnnnnnnnnnnnnnnnnnnnnnnnnnnnnnnnnnnnnnnnnnnnnnnnnnnnnnnnnnnnnnnnnnnnnnnnnnnnnnnnnnnnnnnnnnnnnnnnnnnnnnnnnnnnnnnnnnnnnnnnnnnnnnnnnnnnnnnnnnnnnnnnnnnnnnnnnnnnnnnnnnnnnnnnnnnnnnnnnnnnnnnnnnnnnnnnnnnnnnnnnnnnnnnnnnnnnnnnnnnnnnnnnnnnnnnnnnnnnnnnnnnnnnnnnnnnnnnnnnnnnnnnnnnnnnnnnnnnnnnnnnnnnnnnnnnnnnnnnnnnnnnnnnnnnnnnnnnnnnnnnnnnnnnnnnnnnnnnnnnnnnnnnnnnnnnnnnnnnnnnnnnnnnnnnnnnnnnnnnnnnnnnnnnnnnnnnnnnnnnnnnnnnnnnnnnnnnnntggatccccactggaaacaaagagccaggaaaagtcttcatcccaggagacaaagatccaggaagaattttccagccaagagccaggctcaggagtcagggagtaaatgtcttcttgacgcagtgagccccagaaagaaagacgtctagctgagtagatgcctttcaaacaaagaagtctgggcctctaatccagcttcagacaatgtaatcagaatcttaatcaaaatctttcctcactgtgattcgatggacatttatctggagcactggatattggagtcactcaccaccagataccmaaaaagcaagcagactgaagacaaagtcttggtgtatgcttagagattggttattgtgtccaagagtctaayggtggttcagatccagatctraatcatggacgaaaaactgttaaagaaaaataagagatartagttaaaatggtaaaaacagattttattcaggaaaagctgcaatagaagaagggattccagtatagaactgggcttaattccatatagagagcatgcrcaagtggggattcctaattccaaatagcatggtcaagagagcagggatgggggtcagtggatgaaaaattactaagaggaaagaaacatcacaggtaaggygattctggttaaacagaactaacaggatccttgctgcaggttggccagggtgataagataccaagggtggcagtgaggaatttgatcagatattgagggtgatttcaatatctggggagttctttctcaactgaccttgtaagattcctgttacaactgggtgatgtaaagaggaacacagaaatccaaagctctaggcctagttgagatgaggttcagaagagcctgactaaagtttggtcaaggagagcattttatcactgtgtgcaggacgctataccaagtactttatgaaaatgagctaacttaatccccaagtcaaccctatgtgatagatataactccttttttacataaaagagaattgttgcaaagaagttaagtaaactgtccaaggtcacacagctagcatgtattagagacaatatttaaacttgagtatctgacttcaaccattagtatttactgcctcctggactccttggggcctccacatctcctttggtgtgttgtttggttagaatatgtgtgatgtttcaatgatctctaagagttaaactgtgtttgaagttaagagttaaaggsaagtatttggatctataggtgactgattacaaatttagtttaatagatagtaattgagtaatttagttacataagaatttaaaagggggcaccatatattaaatgcctataacatcactctggttattaaaattatacattagactttaaggtagtgactcaagacaacataatcaataggtcaaaaaattatcacaagaatgtgtgctaagaaaaggccataagatggtttcatgcccttttcctcctgataggttcacttatatgtgtgaccctgatgctgagcttgagtttctgttagtacttatgataactaatcttcataggacctgcttctaatgattttggtatcctaaattctgggcactggtgagtaataatgaggtcactttgtagtttagcagactctcactttgtttcttttaatatggaaattagagttccaagttcttgaaggtaagaaacacctgccactaaaaagaaggttaaaatgtcctcctgaagaaatgttgtatctggctgttattaaaaagcmaaaaattaatggrtgatggcgagattgtggagaaaagggaatccttacacactgctggygagaatgcaaatcagttcagcccctgaggaaatccccagtttggagatttctcaaactaaaatagaattaccattccacccaggaatcccattactaggtatatactcaaaggaaaataaattgttctaccaaaaagacacctgcacttttatgtttatcacagcactaytcacaatagcaaagatatgaaatcaacccaggtacccatcaaaggtgaattagataaagaaaatatggtacatatacacsaaggaatactacacagccataaaaagaacaaaatcatgtcctttgcagcagcatggatgcagctggaggtcgttaacctaagtgaattaacacaggaacagaaaatcaaatactgcatgttctcacttataagtaggagctaaacactgggtacgcatggacataaatatgggaaaaatagacactgaggacctagagccaggagagagggaaaagaagaagggttgaaaaactacttattgggtactttgttcactacttgggtgatgggatcattaaaagccctaacagcttcacacaatataatggtataacaaacctgcatgtgtaataaatttaaaaattaaaaatttttaaatgccatatccttatgctgatttctgtgaacatatacatggctcttttgcctcatttaggtcaagaagatgttcctttttgaatacaaatctctctctaaaggatactttttaaccattctcactttattgttcaagccgaccttgtatagtgaagtttttgttgctttgaaaataggagtagtaggccaggcgtgatggctcacgcctgtaatctcagcactttgggaggctgaggtgggtggatcacctgaggttaagagttcgagacaagcctggccaacatgcaacatggtctctactaaaaatacgaaaattagctgggcgtggtggagggcacttgtaatcccagctactcaggaggctgaggcaggagaatggcttgaacctgggaggtggaggtctcagtgaaccaagatcacaccactgcactccagcttgggtgacagagtaagactctgtctcaaaaaaaaaaaaaaaaaaaaataggagtaatatttagtctgtgttttttyccttgtagaaaagactttattctaaggaagaccatgcaatgcactgtccatgtcagcaaagagatgtttataccatagtgtttgaatagatttgggcataaatactttaaaaaatataataaggtcactagaccctgggtgggcttgggatagaagacaaagttgcgaaagaggctctgagaacagagttggaactagataaaggtgtgcctgctttacagtttttcttgagttcatcatttaacayaatgcctctgaaagtaacttactgctgtctttgatagraatgcatattggtgtattgccagtgccacagctgggatgtctggactaattttgaaggttgcaaactgccacgtacccaccttcagacctgtcttgactttctggcctttccccacactgaatgaatggagtgggagggaagagcctagacagaaacatatgttttctatttatttcttcctacttcttttttttttttgagatggagtttcgcttttgtcacccaggctggagtgcagtggtgcaatcttggctcactgcaacctctgcctcccgggttcaagtgattctcctgccttagcctcctgagtagctgggattacaggcatgcaccaccacacccagctaatttttgtattattattagagatggggttttaccatgttggccaggctggtctcgaactcctgacctcaagtgatccacccgcctcggcctcccaaagtactggtgtgagccaccatgcccggccttcctacctcttttcatacccaatgcttagaggttttcctttgagtygtggatatgaagacctakaaagtatttgctaaaaaatatctccaagtaaatacagtctctgtacaatatttcttgaatttgtaaatttgaaaaccagagatgacaatttgtttggtaaatacatggatagtttgaaagcttagtaagatccaagtttcatttatttttatttttttcttgtttccagtaggcttggaagagtccaaattttagacatgtatacaaaggcagtrmatgaattggaaagaagagggaagttaatacttctagcttttctcttttagagagattagctttctattattttaacagaatagcttaccaaaatgttctttccctattttgtgatgaacataactgaaatcttgtatctaattaaattcaattcctacctaaaagttttcacaaaaaagattatagttcatgtttatgactaaagaaacaaacagaagttgtttataaagtgtttggtggaaattttaatgtccttgttttcaccagttaaattaatgatggcttgaaagtctttcttctttcttgaaagttttcttttctttgaaatgctatttgtttttctggttattggttacttgtggacagatagcagttgtgaagacataaactaccgattgttaaaaatttcagcattctctttttaaaagaaatcggcaagccaattctaaaatttatatggaaatgcaaggacgtagaatagccaaaataatcttgaaaatgaacaaagtaggactcacttacctttgaaagttactctaaagctattgtaatcaagactgtgttattggcaaaaggacagayatatagatcaatgggatccagttggatctgatccagtcagatccagttccaaaaatagaactacacatatgtggtcaaatttgatgaggatgctgacgtgatttaatgggaaaaagaaagtgtcttcaacatatggtgttcggaaaggtgtttttccacatgcagaataaaaaggactttgattcctaccttacaccacagacaaaaattaacttgagatgaatcaggacctagacttaaaagctaaaacattacaatttctaaaggacaacataaaaatatctttgcaatttatcttaggacacagagagcactaccattaaaaagttgataaattgkacttcatcaaaaataaaaacacctgctcatcagaagataacgtcaagtagataagcctttgttacaattatatttgacaaaaggcttgtgtccagaatatataaagaattattcaattattaaaagaaggcaatcaacatttttaaatgggcaaaagatttgaacagacatttcataaaataaggaatatcactggtcaaaaagcacatgaaaaagtgctcatgatcattagtcatcagggaaatgcaaagtgagatgccactggctacccaccagaatggctaaaattagcaagattgatcataccaaatgttggggagaatgtagaactgtcagtgattgctggtgggggtataaaatagtacaactactctggaaaatgtttggcagcaattccacttctatgtayttatcccagagaaatgaaaatatatacctacaaaagtcatatgtaagaatgttcatggccacttgattgagaataaccaaaaactgtaaaagcccagtgtgtatggtaggaaaaaaccaattttctcctactgtactctyaacacaragggtatagygaccagatgtgtggatttttctcacactgaccaattctctgatgctagccggatagcctatattcaattcacttctgacactaactagagctcatgcagatctctcatggattaagagctcagtctcacaagactgtgccctacttcatataccaattgcaagcagtaggttcccaggtcaccacaacttctgaccagtttggtcacaagtgggaggttaccacaacccccttctcaggttcagtaatgtgctrgagcagctcatagaactcagggaaacacttatatttatcagtttattataaaggattgttttaagggatacaggtgaayagacaaagaagtactctgggtaagatatgtaggaagcrgcatggaccttccatgccctctctgggtgttccaccctcctatcatctccatgtcttcagcatcccagatgctttctaaaccctgtagtttagggatttttatggaggcttcatcatacaggctgagcatttattaactcatttttcagccccctccttttcctggacgatggcatagtgtgtctgaaagttccaggcttctaattatggcttggtctttctggtgaccagcccccatccaggagcccaccaagagtcacctcattagaacaaaagacactcttatcaatgcccaggaagttccaagggattagcaactctgttagaaactggsgccacagaccaaatattagaacaraagatgcacctagcatccctcttgctcaggaaattacaagagttttgrgaactctctgcgaggaaccagggtcagggatcaaatacacatttcttattgtatcacaatatcacatccaggtgcccatcagcaagagcctagacaagcaatctggtatatccatacagtagaacactgctcggcaataaaaaagaacaaattgctgatacatgtaatggcaaggataaatctcagaagcattaaaggacatgaaagaagccagacacaaaatactttataccgtatgattccattgatataaagttatagaatagttaaaactaatctgtggtaacaaaaatcggatcagtagttgcttctggttgtggagggaggggaatgttgactgagaagaagcaagagggaattctacaggttgatagaaatgttctatcttctggtaggggtgtgggttatataggtatagtcacttannnnnnnnnnnnnnnnnnnnnnnnnnnnnnnnnnnnnnnnnnnnnnnnnnnnnnnnnnnnnnnnnnnnnnnnnnnnnnnnnnnnnnnnnnnnnnnnnnnnnnnnnnnnnnnnnnnnnnnnnnnnnnnnnnnnnnnnnnnnnnnnnnnnnnnnnnnnnnnnnnnnnnnnnnnnnnnnnnnnnnnnnnnnnnnnnnnnnnnnnnnnnnnnnnnnnnnnnnnnnnnnnnnnnnnnnnnnnnnnnnnnnnnnnnnnnnnnnnnnnnnnnnnnnnnnnnnnnnnnnnnnnnnnnnnnnnnnnnnnnnnnnnnnnnnnnnnnnnnnnnnnnnnnnnnnnnnnnnnnnnnnnnnnnnnnnnnnnnnnnnnnnnnnnnnnnnnnnnnnnnnnnnnnnnnnnnnnnnnnnnnnnnnnnnnnnnnnnnnnnnnnnnnnnnnnnnnnnnnnnnnnnnnnnnnnnnnnnnnnnnnnnnnnnnnnnnnnnnnnnnnnnnnnnnnnnnnnnnnnnnnnnnnnnnnnnnnnnnnnnnnnnnnnnnnnnnnnnnnnnnnnnnnnnnnnnnnnnnnnnnnnnnnnnnnnnnnnnnnnnnnnnnnnnnnnnnnnnnnnnnnnnnnnnnnnnnnnnnnnnnnnnnnnnnnnnnnnnnnnnnnnnnnnnnnnnnnnnnnnnnnnnnnnnnnnnnnnnnnnnnnnnnnnnnnnnnnnnnnnnnnnnnnnnnnnnnnnnnnnnnnnnnnnnnnnnnnnnnnnnnnnnnnnnnnnnnnnnnnnnnnnnnnnnnnnnnnnnnnnnnnnnnnnnnnnnnnnnnnnnnnnnnnnnnnnnnnnnnnnnnnnnnnnnnnnnnnnnnnnnnnnnnnnnnnnnnnnnnnnnnnnnnnnnnnnnnnnnnnnnnnnnnnnnnnnnnnnnnnnnnnnnnnnnnnnnnnnnnnnnnnnnnnnnnnnnnnnnnnnnnnnnnnnnnnnnnnnnnnnnnnnnnnnnnnnnnnnnnnnnnnnnnnnnnnnnnnnnnnnnnnnnnnnnnnnnnnnnnnnnnnnnnnnnnnnnnnnnnnnnnnnnnnnnnnnnnnnnnnnnnnnnnnnnnnnnnnnnnnnnnnnnnnnnnnnnnnnnnnnnnnnnnnnnnnnnnnnnnnnnnnnnnnnnnnnnnnnnnnnnnnnnnnnnnnnnnnnnnnnnnnnnnnnnnnnnnnnnnnnnnnnnnnnnnnnnnnnnnnnnnnnnnnnnnnnnnnnnnnnnnnnnnnnnnnnnnnnnnnnnnnnntgacaggtactctgcttaatgttttaatttaatttaatataatctccatagcaatttaatgcattaatattactgtccctatagattaggaaaattgaggattgaagtaataccctttataagtggacaagctggggattctttcccaggtttctttgcctcccaagcctgggatctttaaaatgcctactctgtgtgtgttgctcttagtatgagcccagagaaagcaagccaaggcaactctgaagtgtcttgcagtcacttaaaagaggggggatttacctgttttccaaaatatggrctgcccaccttttgtatttaagtttcagttcattgccaatatgtataattatttataaactcaaaataatctgttttatttttatttctatctacatgatactttaatttcatgtatgaaaaattgccaagtaatcattctctaagctttctacagtatccattttataagttaaagaatcatagcagtaaaaactataagctctttatagccatttcactctaattattagagtgagaaccttgaagattttgccctttgaaaatgacttgttatttgggcaatctggcttctcactatttaacaagtgttgcttaatgtaccatgtaggaacatttgatgtgctccacagccactcacagcttctgataattctrtttgtgccagccttgagagatcactgagtggtagtttaagattgtgctccagtataaaagtggcaaggtttgtcttttaaacaaacatgtatttttttcagagtagaagataaatttttgactaaatcagtcatttgccgtactctaaaattcattttagaaacttggttttaggtttgtagtttttgcccaaatgaccacttaacatgggacacccaccctaacccctacctctttcccaggaaaattagatttttgtccaagattccaccagtattgaatatttgctcttgccagatatcttgtcaaaggtacattgtctgcttttggttgaccaatggggtatgggttgttatgccagatgagtgtcacctagtagtggaattagaaaatcatcaaccaagggcccgacatagtggctcacatctgcaatcccagggctttagtargccaaggtgggaggattgcttgagcccaggagtttgakaccagcctgggcaacatwgcaagaccttgtctggtgacacacacctgtagtcctagtcacccaggaggctgaggtgggaagatcacttgagcccaggagttctatgagctgctctagcacattactgaacctgagaagggggttctggtaacctcccacttgtggccaaactggtcagaagttgtggtgacttgggaacctactgcttgcaattggtatatgaagtagggcacagtctkgtgagactgagctcttaatccatgagagatctgcatgagctctagttagtgtcagaagtgaattgaatatagcccacactctttctgtaataccacacttccttagtaataagaaataacaaaatatttaaaagtaataacttccagttaaatctttttaggacataacttctctctttcagactccgttttaaatgatacttcattttgtggtccaaaatctcttcttcctacatatttcaatagcattttacctatacttatacctagacctctctagaagatttatcttcataacatatttgatttttatagcactttacttcttttatgacacattatcatgttattttctattaatcaygcattcacatagttgattagttcctccaggaccataaactccttgaggtaagatctgtctattggatctttgcacccacctcagtaccagcatgcatgaagaaaaaagtgtgaagtactccttggtctactatagcattaggaagctatcaacccattattctgcttccattaaatgttttccaatgcatgatggttagtgactttttaaatttarttcttaatttttcttagagtcagaatattgctctgttgccctgactgcaatgccacgatcatagctcactgcctcaggctcctgagtagctgagacgacaggtgcatgccaccacacacagctaatatttcatttttttgtagagttgggttttggaatcagacttgtctgtacatgtctaccatttaataactgtcatgcatcacattgcttcatactttgaacttcagttttctcaagtgtagcatcatagaggagttgtgattatctaaatgattaaatgggattacacttttaaaagctcctacaaaatgcctggcacctggtcacttttcattatatgctggttccttttgttctcctgtctgacccagttcaaagtcccttctgtcccattagcttgttttatgaacatggaggcaaggattctgggtaggaggcagttgtagtacttcattcattaagcatttgctgactactttgtatagtggaaatccagaggaagggattgttattattattattgttattatattttgagaccgggtctcactatgttgcccaggctgaagtacagtggcacaatcatggctcactgcagcctcaaccccccagcccaagtgataattctacctcaggctcctgagtagctgagacgacaggtgcatgccaccacacccagctaatatttaatttttttgtagagatgggtctcactgtgttgcccaggctggtcttgaactcctgggctcaagcgatcctctcgtctaagcctcctgaagtgctgggattacaggcatgagccactgcacctggcctaggattaactattttataggcatttaggaagtagaatgggttagatacaggaattcagggagaattaggggaaggtggatagaaaagaggctaaactgattttcttctataatctttggaatcaaacgaagaagggcaaattgattattcttctcaggaaaagatttactttatctttaaacgtataggtaacattagctgtcttctacctgataaatttgttttctataagttttgtacctttttttaaaaaagaaattatttgtatcataaaggacctaaataatatacatggcatgaatgtacatctgcctgtgaatgctgaatttattctagaaaatattgctttgcactctttgattctagcttgtgttgctgacctcactagtataattattggctgactttgtctctttttccatttcctcccaatcagtttggtaaaggttgctcttacaacatctgtcacagctttggaaaggaaggcaagaggacagactatacacctttcagttgcctgaagattattctatccaatccaccaagccaaggggattatcatggtaagtgcctccactggatatgttggccaagtacagaaatccaagagctctgttggaaacactgaaacaatgctgcggctttttgcattcctgtcaggacctagtttgtagcttatgtcagtcgtcactgtcaagctagagctccattactcttagaacaatttgtcttattactgaactaggtcaggcaagagaaattcattcagctgcacttcagtttgtgctggattaggcttttcagttctcactttcttccttcccgctgttctctgtctccctcatcttctgcagtgttctgcgagtgtcttagagggcgatgtaagttttacaaagctttttgaaattagaatattctaagtttggaatagtagattcattaattttccaaaggctaactactaaggaaaagtgtgaggtttttttcttatcaccatcatctgattaaccaacaaagattaagtgggcaatttaacatgtcgtgatatctgccataactatcagtttgcctgagttatttataaagaaaaacaaaacatctcatttgtctggtatgtccaagaatgaattaatagtttatatcagtaaattttctggattatcaaagcttactacagtatgtgtcaaaacttatttttgttttagaatcttaaacactttttaaaagactgcacacttttggactgctaaagatcaaataatcataaacaatatttttagaaagacattctatgtgaccaaatcattaaaaaatgcctatatattcattagttaatagatgaagaagtggccagcactagttatatagataggcagataagatagatctatatatagacatagattttttttttttttgagacagagtttcgttcttgttgcccaggctggagtgcaatggtgcaatctcggctcactgcagtctccacctcctgggttcaagcaattctcctgcctcagcctcctgtgtagctaggattacaggcacctgccacccagcctggctaattttttgtatttttagtagagacgaggtttcgcctagttggccaggctggtgggcctcaggtgatctgcccgccttggcctcccaaagtgctaggattacaggcctgagccaccacaaccagcctggtaatagatattgagtggtttttatcacttatttcagagtcccttgaggtacttttttagaaatgcagattctcagggtgcaccctcagtcatataaaatcagactttatttgcaagtacactgggtgagttttatgtcttctaaagtttgaaaaccatgggtccaggtacttctgttgaggaagcctgaagccttttttagcttagcagccataccaggcagtcaacttatgattaagcttgtggccaagtaaaactcccagggatttgtctgcaaatttccaggttctagcatttgtctcttaattagttggttttctttagcttaaatgcaaaactttatttctgttaagttgtatcttgttatcccagtgctttatgttattattttgtttctaagttcaactctgtcagtcaagaaatattatacttagcactcaatgaactcattatttgttggacatttacttactccgtttttaaaaagtaataaacttaattttttagagctgttttaggttcacagcaaaatcgtgtgggaagttcagagttcccgtatacctccatgccccaacatacgcacaacctccgttgctgtcagtatyccacaccacactggtacatgtgttacaattgatgaamctacattgacaaatycttatcatccaaagcccatagtttacaagagttcattgtgtatttygcataacagtactttatcagatttgtcttttgcaaatgttttctccccatctgtgcttctgttcttttctctcttttttcaccttttgggatttcatttacacacacgttataccttttatagttgtcccatagttcttaggtattgtattttgttttgttttgtttttgtcttttttctctttgctttttagtttcagaagtttctatctgtcacatccacaagatccaaggattttccccagtcatgtccagtctactgatgaacctattgaagacattcttcatttctgttacagtgtttttgatcrctagcatttcttttttgttcttagaattttcatgtctctgctagctggttattccaacacatttattgaatagggagtcctttctccattgcctatttttattgactttgttgaaggtcagatagttgtaggtatgctgkcttatttctgattctctattctgtttcattagtctatgtgtcggtttttgtaccagtaccatactgttttggttacaatrgccttatagtatagtttggagttaggtagagtgatgcctctggctttgttccttttgcttaggattgctttggtcatttagrctcttttttagttccayatgaattttagaatagttgttttcttattctgtgaaaaatgacattggtagtttgatagaaatagcattgaatctgtacattacttagggtggtatggccattttaatgayattgattcttccaatccatgagcatggaatgttttyctgtttgtgttgtctctgatttctttcagcagcgttttgtagttcttcttgtagagayctttcacttccttgcttagatgtattcctaaatattttatttatttawtttttggtggctactstaaasagaattgtgtttttgatttggctctcagcttgaacattgttggtatgtagaaatgctactgatttttaaggctggtcgtggtggatcatgcctgtaatcccagcactttgggaggccaacacgggtagatcacttgaggtcaggagttcaagaccagcctggccaacatggtgaaacctcatttctactaaaattaaaaagcaaaacaaaaattagccaggcgtggtggtgtgcacctgtaattccagctattcaggaggcggaggttgcagttggctgagatggcaccactgcaccaggtgacagagtgagactctgtctcaaaaaagaaatgctactgatttttatatattaattttgtatcctgaaactttgctgaagtcattgattaattccaggagcctttttggtgcattctttagggttttctaggtatagaatcatatcatcagcaaagaaagatagtttgacttcttttcctatttggatggcttttatttctttcttttgcctgattgctctgggtaggactcccagtagtattttnnnnnnnnnnnnnnnnnnnnnnnnnnnnnnnnnnnnnnnnnnnnnnnnnnnnnnnnnnnnnnnnnnnnnnnnnnnnnnnnnnnnnnnnnnnnnnnnnnnnnnnnnnnnnnnnnnnnnnnnnnnnnnnnnnnnnnnnnnnnnnnnnnnnnnnnnnnnnnnnnnnnnnnnnnnnnnnnnnnnnnnnnnnnnnnnnnnnnnnnnnnnnnnnnnnnnnnnnnnnnnnnnnnnnnnnnnnnnnnnnnnnnnnctgtttcccaggcttgaatgcagtggtgcgatctgggctcactgcaagctccgcctcctgggttcatgccagttctcctgcctcagcctcctgagtagctgggactacaggtgcctgccgccatgcccagctaattttttgtatttttagtcgagatggggtttcaccgtgttagccaggatgatcttgatctcctgatctcgtgatccgcctgcctcggccttccaaagtgctgggattacaggcgtgagccaccacgcttggccaggatattggattttattgaaagctttttctattgagataatatgttttttgtttttaattctgtttatgtggtgaatcacttttattgatttgcatatgttgagtcagacttgcatcccagaaataaagcctatttgatcatggtgaattcgctttttgatgtgctgctggattcagtttgctagtattttgttgaggatttttgattctatggtcatcagagatattggccagaagttttctttttttcattgtgtctcggccagattttggtatcagggtgatgctggcttcataaattgagttaatggggggagtcgccccccttagttttttggaatagttttggtaggattggtaccgattcttctttgtacatctggtagaatttggctgtgaatctacctggtccagggctttttctggttgataggttttttattccagattcaatttcagacctcattattggtctgttcagattttcactttcttcctgcttcagtcacggaaggttgtgtgtttcctggaacttagtcatttcctctagattttctaatttgtgaaaaatgcacaattattaacttacaaatctatcatctgtatgactgaaaaaaaagacttttctgtattaaatttttaataagcatttgacttaccattgcagtttgttaaaatnnnnnnnnnnnnnnnnnnnnnnnnnnnnnnnnnnnnnnnnnnnnnnnnnnnnnnnnnnnnnnnnnnnnnnnnnnnnnnnnnnnnnnnnnnnnnnnnnnnnnnnnnnnnnnnnnnnnnnnnnnnnnnnnnnnnnnnnnnnnnnnnnnnnnnnnnnnnnnnnnnnnnnnnnnnnnnnnnnnnnnnnnnnnnnnnnnnnnnnnnnnnnnnnnnnnnnnnnnnnnnnnnnnnnnnnnnnnnnnnnnnnnnnnnnnnnnnnnnnnnnnnnnnnnnnnnnnnnnnnnnnnnnnnnnnnnnnnnnnnnnnnnnnnnnnnnnnnnnnnnnnnnnnnnnnnnnnnnnnnnnnnnnnnnnnnnnnnnnnnnnnnnnnnnnnnnnnnnnnnnnnnnnnnnnnnnnnnnnnncctggagtgccctgataacctacagctaagtaatcatttagatgaaaagaggaaagcagttgcacccatgggcaattacctttttttattaataagctgttagacaattaaggggagcttagatggtctctcgagtgtggtattgtactaagttgtgggtaaataaccttgtttgtgtgctggcttatttttttgttgtcagggtgcccattccgtcacagtgatccagagctgctgaagcaaaagttgcagtcatacaagatctctcctggagggataagccaggtaggtcatattcttctctctgcatctgcagtaatgaggccttagacagatctgtcggttttatttaatgttcttgcagtgatgctgtgtaccacttgtcaggcctcacaccagacatcttatcttcaagatgaattaagttaaaaccttgacttatctggtttagactcttgggaaattctagttcttctgtctgctaagctgcatttttatttttcctagtcataaaggaagctggaaaccttcctccacacctcagtttgttttactatctcaactggggactacatctttaaaaataaaatttttgagcaatgcatggaagcttattaatgaagctgaaaattaatgacagcatattgcagtttgggaaattattttctgagcagatgataatgtagtacatactggctgaatgttctgataggcatcagttattgctgtgtttaatctacacttctgatggtagatcaaatagtttgtcaaaatactttgtcttatgaacaatggaaatgctcagattgtaaaaccaaatgtgaaacagtacattttttagtagtagtaactctacctttaaaaaattaatattgtgacatagcaaagactattttctatagtgtgctttcaagttgactggaattttgaaggaataggggaagagcttctgcttccttagcttaagaagaacattatatattttagagttagaacatctaaatcatcatacatctttaaactgttatttttatttaaagaaaattgttactctagacaactttacagctgcttctgtgtccaaagttcagataacaaatcttaaacagttttttagtactttgagcaaagcagtgttcaaggtgccatagagtatgcaaggaagaatcagatataaatcctgctcccrcaaaaccagtgtcygaaaawaaaaaaacataaaccaagtgtcatgagaggtacacatagactgtyttgggtcttctgatgagggaaagactataaccagctgaagaggtcaaggaaccctttatggaagagatgccctttgaattaggccttgcaygaaggttgggaattagggagagagaatgcacaaatgaaagactataggagtrttaagatttcaagcttaggataatggtggcaccaatacataaatactaataggtaacttaaaggaagtatagttggtttcggtttgagtgacttaattttannnnnnnnnnnnnnnnnnnnnnnnnnnnnnnnnnnnnnnnnnnnnnnnnnnnnnnnnnnnnnnnnnnnnnnnnnnnnnnnnnnnnnnnnnnnnnnnnnnnnnnnnnnnnnnnnnnnnnnnnnnnnnnnnnnnnnnnnnnnnnnnnnnnnnnnnnnnnnnnnnnnnnnnnnnnnnnnnnnnnnnnnnnnnnnnnnnnnnnnnnnnnnnnnnnnnnnnnnnnnnnnnnnnnnnnnnnnnnnnnnnnnnnnnnnnnnnnnnnnnnnnnnnnnnnnnnnnnnnnnnnnnnnnnnnnnnnnnnnnnnnnnnnnnnnnnnnnnnnnnnnnnnnnnnnnnnnnnnnnnnnnnnnnnnnnnnnnnnnnnnnnnnnnnnnnnnnnnnnnnnnnnnnnnnnnnnnntctctttgtcaagcattaaaaggaggtgggatcaatgaagactgaacagaaatggggagagagggagaaaatacattagggtagtgaagtatcacaaaagtcaaggagaaaattttgagaagagaataagttccacagaagtcccttgtagcagagatttcttttcatggagagaactaagaaaaggtggttggatatgctgagaggattatttgactttgactttggtgaggtgtcagtaaaatggtggaaaccaaaagcaagattatacttgcttaaaaaattaatgaaagacagtaaataacctttccaaaraatgtgtcaggccaggtgcagtggcttgtacctgtaatgctagcacttagtagggaggctgaggcaggcagattgctgagcccaggcattcaagaccagcctgggcaacatggcaaaaacctgtctctacaaaaaattagcaggtgtggtgrcatgcaactgtagcctcagctactcaggaggcagaggtagaagaatcacctgagcccaagaagttgagcctccagggagccgtgatcatgccactgcactccagcattggcaatggagtgagaccctgtctcaagaaaaaaaaaaagtgccagtaaaggggatgctatagtggtattagcttaagcatcattgttcatttctgggtttaagacctgagcctatctgtagaaagaggaggagaagaaagaactgtcagagagggtgggcttgatgaagatataaaagaaagaaaatatctctctaaccaagcagaattaagttctcttttctttataccatgactggattgtacatgcctttgctcttaacatttgttacacttgattgtaattatttgtttacctgttcatctttcccaatagtttgtgagtttcccgaaaggaggactggatttttacttaactttctgtctcatggcaatccaatgagttacacttgttaggtgctttaaaaatgttggaagagtgaatgggcatatttaggtatgaggtggatgctagagtatgcatggtggtatgcagagagaggcaaataggaactcaaagacacaagtgaaaaagtaacttattggaggaaggacgatatgtacttgaaccaaagaatggtgacagagaaagtcatacccctcagcaatgtgggaacatagaggaaatagttaagacacagcaaagggaagttgatggagtgtatcaactggtctcactcttccttgtaaataaagtaaggagggtcatcagctggagagtaaaggggttatgaatgatattctggttatagaaaatgttagaaactaccaccaacaaatgtgatagggaatctagaagaaattagaggcgttttttagcagtcataaagaatcacctttaaaaaaaatcttaatatactaacattatctcaagaaaattaatgtttatagttaatagtaatgaccatgtttgtatactctttgcttttgactccactgtatttctccatttgcccttgatccacaaggatactccttacttagctgaagctggttagtaattttcacattaccctttagacctgcattgtaaccttttatctgagatgaacacagatgtatagtgcatgccagcaagctgtaaataatgtcttgcttttatatgatgtctttattgagtggatctcactagagtgaagcagctggtggactgtattctaaagggcagagagtcaatgaatgaaaatgccatgtaaaacattttgatgaggttgaattttgcaggttggcctaagtgcagattagatcttgaaaactccaagcgtacattaaaatattgaatgagagttaagaaaaacatcattaaaatgtacgtaaggtagaactccatgtggttatttttatctcagagaaaactacttgaaaaagataccttcaacaataggaaatagatttttttttttttaatttttggagacagagtcttgctctgtcttccaggctggagtgcaatggcgcaatctcggctcactgcaacctccatctcccgggttcaagtgattctcccacctcagcatcccaagtagctgggattacaggcaccctccatcatgtccagctaatttttgtatttttgtagagatggggtttcaccatgttggccaggccagtcttaaactcctgaccttgggtggtccgcctgcctcggcctcccacagtgctgggattacaggcgtgagccatcacgcctggccaagaaatagatgttttaaataatcagaattttggtgatcagaaaagagatcattgtgactcagctggtgttgctgattttttttataaagcatacttacaggatcacatttcattttcctttttaattaaccttaatagtgttacaaaatcactgaaaattaatgagcttggtatccagcttaagaaacagcaattaaacaacagaatatggccaaagaaaatgggtacccctgcatttattctcctctcctccccgaaaagagaaatacacagcagtcaattcaccaacacgatataaaaattataaatatttatgccccaacaacatagcttcaaaatacatgaattaataatagagaactgaaaagagaactagaaaaatccacagttacatttggagacttcagcactcctcttaataattaacagaagaagcaggcagaaagtcaggaaggatatagaagccttgaacaatactgtcaaccaactttaccyaattaacatctgtagaacatgttacccagcaacaggagacatgaaatagtaacccaggtagatcatagtctaggtctttaaaatccattacaaatgtaaataatttgaaatcctataaagtaggatttaaagcagagcaataaagcaagaaaaacaaaagattagaaaagaagaaagaaaacctttttctattctcaaagtgattatcagtgtaaaaaatctcaaagaacctagcaagatgctactgtaactagtaggtggaaggatacttactcaatatacaaaaatcaattctatttcttacagtgaacaattggaaattaaacatttcaaaaagtattagtttgctgcaaacataattgtggcttttactgcaaatacttttgtagcaacctaataccatatacagcagtaccagaaatccaaaatatacatgagatctttacatgaaagactgatgaaaatgaaaaagtggagacacatatttcctgatttcaaaacttactgaaaactattgtaattaagatggtgtggtattagggaaatgatgaagacagattaattggacagaatagagttcagaagtagacccacatatatacgggcaactgatttttaaacaaaggtgccagggcaatttaataaggaaatggtaatgtggagttccagaacaactccagagttctagaacaagtagatctagaacaattggatatccaaatgcaaaaatcctagacatatacctccaagcttatataaaaattatttaaaaattgattatagaactaagtaactgtaaaatgtgaaacttaacaaaagaaaacagaatatctgcacgagcttgggtttggtgtgttccctgaaagaaaatagtgataaattagactttaccaaaattaaaaattttgctctgcaaaagacagctttaagagaacaagataagccacagactggaagaaactatttgcaaatcataaatttcataaaagatgtgaatccaaaagatataaagaactctcaaaactcagtaattagaaaacagttttttaaatgggcaaaacatttgagtagacagttcaccaaagaaaaagtgtgaatggtaaatataagcacaggaaaaaatatagctcattagtgaaatgaaatttaaaactacaatgaataccatgatatgccaaatagaattggtctaatttaaaaaaatcaagcaatactaagtgctagtgaggatgcagagtgactgaaagtctcatacaatagtggaggaaatgcaagtcatagagtcactttgaaaaggagtgtggcaacttcttataaaatgaagcttacacatgctatgtgacacagtgatacctgtaactagtatttatagaattgaaataaaagcataagtacacataaaaatctgttcctaagtgtttatagtgtaggcattattcataattgccaaaaactagaaacaacccagatgttcttcagtgtgtgattggataaacaaattgtggtatagtcatacaatggaatattacctggcaatagaaaggaataaattactggtacacccattaacatgtaaggttctcaaatacattatactaagtgaaagaagtcagactcaaaagcactatggtgtataattctatttgtatgacaaatctgtaggtacagagtgattgctgggagcaggagaggtgttataaaggacaagggaaatatttttgggtaatgggaatgatctgtgttgattgcagggtaatatcaaaagtgaatttgtcaaatgttgcagaactatgataaaaggaaatatattttatttaaaaacttttacttttttaggaaaaacttagtccctgagtaaaaaggggatatattttactgtgtggaaattataccttaaatttttttcttttttttcttttcgctttttttttttttttttttttaatagacagggtcttgctctgtcacgcaggctggagtgcagtagtgtgatcatatctcattgcaaccttgaactcctgggcctaagtgatcctcttgcctcagtctcctaagtagctggggttacaggtgcacatcaccatgcccagctaattttttacttttttgtagagatagaggtcttgctgtgttgcctaggctggtcttgaactcatggctcaagcagtcctgtcaccttgacctcccaaagtgctggcattatagacatgagccacttaatttctttttttaatggggggagaaagaaagggtagatggtaagtagcataatgagccaaaatatttagttttcatagtaaaaatgcagtggattaagtttatatcaggaacttaaagtataaacatataatttagagtgacatagacaacatcttatgtaataaaaaatggaaatggttaaagtaattgcctcttggaaactaaccaagcagtgggaagaaatgtgatatgagaactgttgattttaataataagccataatgtacttcagtttttttccttacatacattactttgattaaaagttagaaagaaagtataatgttattaatgaagtttaagttaaatggtcgtgtgcctaatggatagatggtaatagcagtagtactagatgactgcaaggtctttgggtatgaaattctaaccctaatccctctgagctcccagtacctagcatagtatctgatccatgttaggaactgtgaaggatctgagattttaccctacttgcaagctaagaacttagctgccacacttctatggattctggcagaagacatgacaattccagcaatagcagtatgtcagccttttcttgcatttgttccttgagccctacttcccacagagcaacatgaaggccaggtactacctgcacatgcagtggcttgcttgtgttggaggagggaaaccctgaatttagggaatctgaaccttttattatggacagtaagtatgtctactcttttaatttatttttaattaattaattattttttttgagacagagttttgctcttgtcacccaggctggagtgcaatggcgcgatctctgctcactgcaacctctgcctcctgggttcaagcaattctcctgccatatgtctgctgtttaatccagtggaaggaaccattgtcttccagggctgttcattatatcagagktccccaacccctgggccacggactggtacttgtycatggcctgttaggaacagcaggaggtgagccagggcaagcaagcattactgyctgagctccacctcctgtcagatcagtggccatgttacatggtactggtccatggcctgttaggaacagcaggaggtgagccagrgcaagcaagcattactgcctgagccccacctcctgtcagatcagtggccatgttagattctcataggagctcgaaccctattgtgaactgtgcatgcgagggatctaggttgtgtgctacttatgagaatcgaactaataatgtctgatgatctgaggtggaacagtttcatcctgaaaccacctttccaccctggcccgtggaaaaattgtcttctacgatactggtccctggttccaaaaaggttggagaccattgtattatatgaacatctttgaaaaaatggtctgaagtaaaggccgttgttgcctctatttgcaaaatgttcagaaatttaagactattggaaagttatttctcaggaatacatagctgatgaccagtgaataatatatagatatacaatctatattggtcacttcttattggaacctcagctttttctccttaaaatattggtgtacgttggctgggtgtggtggctcacacctataatcccagcactttgggaggccgaggcgggcagatcacaaggtcaggatatcgagaccatcctggctgacacgatgaaaccccgtctctactaatacaaaaaattagccgggcgtgctagcgggcgcctgtagtcccagctacttgggaggctgaggtaggagaatggtgtgaacctgggaggtgggagcttgcagtgagcagnnnnnnnnnnnnnnnnnnnnnnnnnnnnnnnnnnnnnnnnnnnnnnnnnnnnnnnnnnnnnnnnnnnnnnnnnnnnnnnnnnnnnnnnnnnnnnnnnnnnnnnnnnnnnnnnnnnnnnnnnnnnnnnnnnnnnnnnnnnnnnnnnnnnnnnnnnnnnnnnnnnnnnnnnnnnnnnnnnnnnnnnnnnnnnnnnnnnnnnnnnnnnnnnnnnnnnnnnnnnnnnnnnnnnnnnnnnnnnnnnnnnnnnnnnnnnnnnnnnnnnnnnnnnnnnnnnnnnnnnnnnnnnnnnnnnnnnnnnnnnnnnnnnnnnnnnnnnnnnnnnnnnnnnnnnnnnnnnnnnnnnnnnnnnnnnnnnnnnnnnnnnnnnnnnnnnnnnnnnnnnnnnnnnnnnnnnnnnnnnnnnnnnnnnnnnnnnnnnnnnnnnnnnnnnnnnnnacaaaaaaatataaaaattagccaggcatggaggcatgcacctgtagtgtcagctatgcaggaggctgaggtgggaggattgctggattgcttgagcccatggggactgagtgagccatgatcatgccactgcactccagcctgggccacagagtgagaccctgtctccaaaaaaaaaaaaaaaaaaaaaattgagaatatgtgttcaaaatattgacagtaaaatctcttattggccttaaatggtttgtttctcagaagttttttctattgtggaaagatgcacatgaaattttcaaattgtactttgtttcatgggcttataatggtgtgctatgtcctattttaatagaaaaattggggctggccacagtggctcacgcctgtaatcccagcactttggaaggccgaggtgagaggattgcttgaagccaggcgttggagaccaccttgtagaccctgcctttaaaaaagtaataaaaataacagttgtggtggtgcacacctgtagttctagctgttcgggaggctgaagcaggaagcttgcttgagcctagtaattgttacagtgagctataattgtgccactgtactccatcctggaagacacagcaagactccatctctccaaaaattaacaaacaataaatacataaagtttataggaaaattgtctttttgttatactgaatcacttgcggcatatccttagttctcacagaacttaataaataaacaataattgctgcctacagactaatctaaaagtggtagttcattgtaatatatgccacaatgaagttaacgtcttttattgtaatctctgaatgctattactccttaatagtttttttttcttattatgtagtaatgaggggtgtgcttgatctgtctctggaaatagaacaatttgaagccatggtagtttgttttatttttggcctgcttatgcaaagcattgtgatggaggctttacacaaataaactgtatctcatttgattcccaccactacattatccctattttatagatgagaaagctgaggtttggagaaggcaagaaactgctcagaaccatagaactaatatatgataaggccagaattcgcacctatgcctgacagtgaagctgaagtttcttacaatacattgttctgattctctgtagtatttttctattttaaatccagttgaaattctttttggtttcttctttcatggaaagccatcactgtgaagtgaatggtaattcttatgtacctaaacttaagaaaatgtataatgcattgttgaaacactgacaaatgtgaaacaaagatgagaataattcagaaaatgtaaattatatatggtaacagattttcaaaagatctgattgctttttttattgaggtgaaagtcacataacatacaaataactattttaaaatgtacaattcagtgcatttagtacattcacaatattttacaactactatttctatnnnnnnnnnnnnnnnnnnnnnnnnnnnnnnnnnnnnnnnnnnnnnnnnnnnnnnnnnnnnnnnnnnnnnnnnnnnnnnnnnnnnnnnnnnnnnnnnnnnnnnnnnnnnnnnnnnnnnnnnnnnnnnnnnnnnnnnnnnnnnnnnnnnnnnnnnnnnnnnnnnnnnnnnnnnnnnnnnnnnnnnnnnnnnnnnnnnnnnnnnnnnnnnnnnnnnnnnnnnnnnnnnnnnnnnnnnnnnnnnnnnnnnnnnnnnnnnnnnnnnnnnnnnnnnnnnnnnnnnnnnnnnnnnnnnnnnnnnnnnnnnnnnnnnnnnnnnnnnnnnnnnnnnnnnnnnnnnnnnnnnnnnnnnnnnnnnnnnnnnnnnnnnnnnnnnnnnnnnnnnnnnnnnnnnnnnnnnnnnnnnnnnnnnnnnnnnnnnnnnnnnnnnnnnnnnnnnnnnnnnnnnnnnnnnnnnnnnnnnnnnnnnnnnnnnnnnnnnnnnnnnnnnnnnnnnnnnnnnnnnnnnnnnnnnnnnnnnnnnnnnnnnnnnnnnnnnnnnnnnnnnnnnnnnnnnnnnnnnnnnnnnnnnnnnnnnnnnnnnnnnnnnnnnnnnnnnnnnnnnnnnnnnnnnnnnnnnnnnnnnnnnnnnnnnnnnnnnnnnnnnnnnnnnnnnnnnnnnnnnnnnnnnnnnnnnnnnnnnnnnnnnnnnnnnnnnnnnnnnnnnnnnnnnnnnnnnnnnnnnnnnnnnnnnnnnnnnnnnnnnnnnnnnnnnnnnnnnnnnnnnnnnnnnnnnnnnnnnnnnnnnnnnnnnnnnnnnnnnnnnnnnnnnnnnnnnnnnnnnnnnnnnnnnnnnnnnnnnnnnnnnnnnnnnnnnnnnnnnnnnnnnnnnnnnnnnnnnnnnnnnnnnnnnnnnnnnnnnnnnnnnnnnnnnnnnnnnnnnnnnnnnnnnnnnnnnnnnnnnnnnnnnnnnnnnnnnnnnnnnnnnnnnnnnnnnnnnnnnnnnnnnnnnnnnnnnnnnnnnnnnnnnnnnnnnnnnnnnnnnnnnnnnnnnnnnnnnnnnnnnnnnnnnnnnnnnnnnnnnnnnnnnnnnnnnnnnnnnnnnnnnnnnnnnnnnnnnnnnnnnnnnnnnnnnnnnnnnnnnnnnnnnnnnnnnnnnnnnnnnnnnnnnnnnnnnnnnnnnnnnnnnnnnnnnnnnnnnnnnnnnnnnnnnnnnnnnnnnnnnnnnnnnnnnnnnnnnnnnnnnnnnnnnnnnnnnnnnnnnnnnnnnnnnnnnnnnnnnnnnnnnnnnnnnnnnnnnnnnnnnnnnnnnnnnnnnnnnnnnnnnnnnnnnnnnnnnnnnnnnnnnnnnnnnnnnnnnnnnnnnnnnnnnnnnnnnnnnnnnnnnnnnnnnnnnnnnnnnnnnnnnnnnnnnnnnnnnnnnnnnnnnnnnnnnnnnnnnnnnnnnnnnnnnnnnnnnnnnnnnnnnnnnnnnnnnnnnnnnnnnnnnnnnnnnnnnnnnnnnnnnnnnnnnnnnnnnnnnnnnnnnnnnnnnnnnnnnnnnnnnnnnnnnnnnnnnnnnnnnnnnnnnnnnnnnnnnnnnnnnnnnnnnnnnnnnnnnnnnnnnnnnnnnnnnnnnnnnnnnnnnnnnnnnnnnnnnnnnnnnnnnnnnnnnnnnnnnnnnnnnnnnnnnnnnnnnnnnnnnnnnnnnnnnnnnnnnnnnnnnnnnnnnnnnnnnnnnnnnnnnnnnnnnnnnnnnnnnnnnnnnnnnnnnnnnnnnnnnnnnnnnnnnnnnnnnnnnnnnnnnnnnnnnnnnnnnnnnnnnnnnnnnnnnnnnnnnnnnnnnnnnnnnnnnnnnnnnnnnnnnnnnnnnnnnnnnnnnnnnnnnnnnnnnnnnnnnnnnnnnnnnnnnnnnnnnnnnnnnnnnnnnnnnnnnnnnnnnnnnnnnnnnnnnnnnnnnnnnnnnnnnnnnnnnnnnnnnnnnnnnnnnnnnnnnnnnnnnnnnnnnnnnnnnnnnnnnnnnnnnnnnnnnnnnnnnnnnnnnnnnnnnnnnnnnnnnnnnnnnnnnnnnnnnnnnnnnnnnnnnnnnnnnnnnnnnnnnnnnnnnnnnnnnnnnnnnnnnnnnnnnnnnnnnnnnnnnnnnnnnnnnnnnnnnnnnnnnnnnnnnnnnnnnnnnnnnnnnnnnnnnnnnnnnnnnnnnnnnnnnnnnnnnnnnnnnnnnnnnnnnnnnnnnnnnnnnnnnnnnnnnnnnnnnnnnnnnnnnnnnnnnnnnnnnnnnnnnnnnnnnnnnnnnnnnnnnnnnnnnnnnnnnnnnnnnnnnnnnnnnnnnnnnnnnnnnnnnnnnnnnnnnnnnnnnnnnnnnnnnnnnnnnnnnnnnnnnnnnnnnnnnnnnnnnnnnnnnnnnnnnnnnnnnnnnnnnnnnnnnnnnnnnnnnnnnnnnnnnnnnnnnnnnnnnnnnnnnnnnnnnnnnnnnnnnnnnnnnnnnnnnnnnnnnnnnnnnnnnnnnnnnnnnnnnnnnnnnnnnnnnnnnnnnnnnnnnnnnnnnnnnnnnnnnnnnnnnnnnnnnnnnnnnnnnnnnnnnnnnnnnnnnnnnnnnnnnnnnnnnnnnnnnnnnnnnnnnnnnnnnnnnnnnnnnnnnnnnnnnnnnnnnnnnnnnnnnnnnnnnnnnnnnnnnnnnnnnnnnnnnnnnnnnnnnnnnnnnnnnnnnnnnnnnnnnnnnnnnnnnnnnnnnnnnnnnnnnnnnnnnnnnnnnnnnnnnnnnnnnnnnnnnnnnnnnnnnnnnnnnnnnnnnnnnnnnnnnnnnnnnnnnnnnnnnnnnnnnnnnnnnnnnnnnnnnnnnnnnnnnnnnnnnnnnnnnnnnnnnnnnnnnnnnnnnnnnnnnnnnnnnnnnnnnnnnnnnnnnnnnnnnnnnnnnnnnnnnnnnnnnnnnnnnnnnnnnnnnnnnnnnnnnnnnnnnnnnnnnnnnnnnnnnnnnnnnnnnnnnnnnnnnnnnnnnnnnnnnnnnnnnnnnnnnnnnnnnnnnnnnnnnnnnnnnnnnnnnnnnnnnnnnnnnnnnnnnnnnnnnnnnnnnnnnnnnnnnnnnnnnnnnnnnnnnnnnnnnnnnnnnnnnnnnnnnnnnnnnnnnnnnnnnnnnnnnnnnnnnnnnnnnnnnnnnnnnnnnnnnnnnnnnnnnnnnnnnnnnnnnnnnnnnnnnnnnnnnnnnnnnnnnnnnnnnnnnnnnnnnnnnnnnnnnnnnnnnnnnnnnnnnnnnnnnnnnnnnnnnnnnnnnnnnnnnnnnnnnnnnnnnnnnnnnnnnnnnnnnnnnnnnnnnnnnnnnnnnnnnnnnnnnnnnnnnnnnnnnnnnnnnnnnnnnnnnnnnnnnnnnnnnnnnnnnnnnnnnnnnnnnnnnnnnnnnnnnnnnnnnnnnnnnnnnnnnnnnnnnnnnnnnnnnnnnnnnnnnnnnnnnnnnnnnnnnnnnnnnnnnnnnnnnnnnnnnnnnnnnnnnnnnnnnnnnnnnnnnnnnnnnnnnnnnnnnnnnnnnnnnnnnnnnnnnnnnnnnnnnnnnnnnnnnnnnnnnnnnnnnnnnnnnnnnnnnnnnnnnnnnnnnnnnnnnnnnnnnnnnnnnnnnnnnnnnnnnnnnnnnnnnnnnnnnnnnnnnnnnnnnnnnnnnnnnnnnnnnnnnnnnnnnnnnnnnnnnnnnnnnnnnnnnnnnnnnnnnnnnnnnnnnnnnnnnnnnnnnnnnnnnnnnnnnnnnnnnnnnnnnnnnnnnnnnnnnnnnnnnnnnnnnnnnnnnnnnnnnnnnnnnnnnnnnnnnnnnnnnnnnnnnnnnnnnnnnnnnnnnnnnnnnnnnnnnnnnnnnnnnnnnnnnnnnnnnnnnnnnnnnnnnnnnnnnnnnnnnnnnnnnnnnnnnnnnnnnnnnnnnnnnnnnnnnnnnnnnnnnnnnnnnnnnnnnnnnnnnnnnnnnnnnnnnnnnnnnnnnnnnnnnnnnnnnnnnnnnnnnnnnnnnnnnnnnnnnnnnnnnnnnnnnnnnnnnnnnnnnnnnnnnnnnnnnnnnnnnnnnnnnnnnnnnnnnnnnnnnnnnnnnnnnnnnnnnnnnnnnnnnnnnnnnnnnnnnnnnnnnnnnnnnnnnnnnnnnnnnnnnnnnnnnnnnnnnnnnnnnnnnnnnnnnnnnnnnnnnnnnnnnnnnnnnnnnnnnnnnnnnnnnnnnnnnnnnnnnnnnnnnnnnnnnnnnnnnnnnnnnnnnnnnnnnnnnnnnnnnnnnnnnnnnnnnnnnnnnnnnnnnnnnnnnnnnnnnnnnnnnnnnnnnnnnnnnnnnnnnnnnnnnnnnnnnnnnnnnnnnnnnnnnnnnnnnnnnnnnnnnnnnnnnnnnnnnnnnnnnnnnnnnnnnnnnnnnnnnnnnnnnnnnnnnnnnnnnnnnnnnnnnnnnnnnnnnnnnnnnnnnnnnnnnnnnnnnnnnnnnnnnnnnnnnnnnnnnnnnnnnnnnnnnnnnnnnnnnnnnnnnnnnnnnnnnnnnnnnnnnnnnnnnnnnnnnnnnnnnnnnnnnnnnnnnnnnnnnnnnnnnnnnnnnnnnnnnnnnnnnnnnnnnnnnnnnnnnnnnnnnnnnnnnnnnnnnnnnnnnnnnnnnnnnnnnnnnnnnnnnnnnnnnnnnnnnnnnnnnnnnnnnnnnnnnnnnnnnnnnnnnnntattcgagtgattaggttctgtttctacagtgtattttaatgtttgcttctgctgtacaattgtgttagacctattacaaccaatacttacttttacatgttggcccataagtaagtatacataaggctattcatttttcaagattttgattgaaatgatacattatttacaaatgtatttctgcactaatgtttttaaaactgtctttttatttctcattttagtttttttaatagaggaaggaaatgtgttttagaattttcactcaactattaatgatttttaaaacaaatctaattggtgcttctaagaaacttaagagtgaattaaagccatgaaatatgaaaaaatgtatgctcttattgctttttgagaggttggttaacctctgtttttcacagtcaaaaattctcaagaagttagtgactatattaaatctaaaactggcaaatgccttttaatgaagaaatctttcaaaggggacagtttaaaagacttaaaagtaactctttgtcaagaagtttttatgataaagataaatttcaatgactctttatttaatgttcctaaaaatctgagctacctaaaaactcctatgattttcttaggtaagggggacttaccagtggatgatagtattcaggctgtctattactttatggaaagtaactgcttttaaggggagcttttgtatctatttcgtcttcaggagtatctcttctgatttttgagaacggtagtttgattgctgcacttagctttgcttttcttagtgttgtagttgaagatgtgtaacgttcttggtaaaactcagaactgcattaaggaaaagatgggaagttgagcattagaattggtgtcaccaggccatggttgtacttttggctttaatacttgatttctgtgtatatccttcctttcttataggctgaagataaatggttgcttgaagatttaatgttcaaggtggttcaaagaaaaatcactttgaaagtcaagtaacatatgtcattgttagctaagcctattaattaaaacttatattcattaaaattgcattcaaatggaaaacatcctttcttaaaatttaatactactgttcatatagttacacatctttctatatttattatgtattcattacatgaaaaactactgatacnnnnnnnnnnnnnnnnnnnncacctcctgctgtgaggcccaattcctaacaggccacggactgggttgggaacccctgccttaatgtataccaggcacagcactaaaatttttgaacgcattagctcttttgattgacattacagaaagatactatatgtatatttccctgtctatgaataaaacttagagaagttaaacaatctgtgtggggttacactacttataggggatagaacttagatttaaattcaagctgtctaactcatctaaagcttgtgagcataactatgactgtactgtcctatgatatttggtactaaatatgtgataatgacagcagaggtaattggcattttcctgtttatcttcatagcatggtaaacaggtagggactctaacttgccttacatgctgtaattgattaatggaagatctggagctagagccccagtctgttgtgggtcctgtcctcattcttctatacctaacttttgaaagtattattctcatttaaaagstttttttaaaacaaaactcaaggagtaaacatcaagaaaatagcaacaacaaaatctcattarttttatcacactaggaatctcgccagataagccatgtttggcaacaccaggtttatatgactcactctctcggagactgcattctttaatttggttgctccacttgagagttttaatttcctattgttctttaatcatttgtggatgcttttaattaagaggcctcagaattttcacaagtgagttctattatccaacctctttttataaaaataagatatgaaaattagatttaaacattgagtttgtggcataatcaccaaaaaggaaggagtagtttttatttctcaaatctgcttttgtaatatctctcctattgattattccctcaagtattgccactattgccaatttttaaaacttgytttasattaatgaagattttggaaagacatatatctaaatcccctcatatataaaaatagtctaacttaaaccacacttaaatcaacaaaataaaaaggctgtttgtagtcactagattcnnnnnnnnnnnnnnnnnnnntcttgtaaatttgtttgagttcattgtagattctggatattagccctttgtcagatgagtaggttgcaaaaattttctcccatgttttaggttgcctgttcactctgatggtagattcttttgctgtgcagaagctctttagtttaattagatcccatttgtcaattttgtcttttgttgccattgcttttggtgttttggacatgaagtccttgcccacgcctatgtcctgaatggtaatgcctaggttttcttctaggatttttatggttttaggtctaacgtttaaatctttaatccatcttgaattgatttttgtataaggtgtaaggaagggatccagtttcagctttctacatatggctagccagttttcccagcaccatttattaaatagggaatcctttccccattgcttgtttttctcaggtttgtcaaagatcagataattgtaggtatgcggcgttatttctgagggctctccaatcaatagaaaaagagggaatcctccctaactcattttatgaggccagcatcattctgataccaaagctgggcagagacacaaccaaaaaagagaattttagacacattaccttgatgaacattgatgcaaaaatcctcaataaaatactggcaaaccgaatccagcagcacatcaaaaagcttatccaccatgatcaagtgggcttcatccctgggatgcaaggctggttcaatatatgcaaatcaataaatgtaatccagcatataaacagagccaaagacaaaaaccacatgattatctcaatagatgcagaaaaagcctttgacaaaattcaacaacccttcatgctaaaaactctcaagaaattaggtattgatgggacgtatttcaaaatcataagagctatctatgacaaacccacagccaatatcatactgaatgggcaaaaactggaagcattccctttgaaaactggcacaagacagggatgccctctctcaccactcctattccacacagtgttggtagttctggccggggcaatcaggcaggagaaggaaataaagggtattcagttaggaaaagaggaagtcaaattgtccctgtttgcagacgacatgattgtttatctagaaaaccccattgtctcagcccaaaatctccttaagctgataagcaacttcagcaaagtctcaggatacaaaatcaatgtacaaaaatcacaagcattcttatacaccaacaacagacaaacagagagccaaatcatgagtgaactcccattcacaattgcttcaaagagaataaaatacctaggaatccaacttacaagggatgtgaaggacctcttcaaggagaactacaaaccactgctcaaggaaataaaagaggatacaaacaaatggaagaacattccatgctcgtgggtaggaagaatcaatatcgtgaaaatggccatactgcccaaggtaatttacagattcaatgccatccccatcaagctaccaatgactttcttcacagaattggaaaaaactactttaaagttcatatggaaccaaaaaagagcccgcatcaccaagtcaatcctaagccaaaagaacaaagctggaggcatcacactacctgacttcaaactatactacaaggctacagtaaccaaaacagcatggtactggtagcaaaacagagatatagatcaatggaactcactttttctttctttgttttgtttttttctgagacagtcttgctctgtcactcaggctggagtgtagtgttgcaatcttggctcactgtaacctccacatcctgggttcaagcgattctcctgcctcagcctcctgagtagctgggattacagacacgcaccaccacacccagctaatttttgcatttttagtagacatggggtttccccatgttggccaggctggtcttgaactcctgacctcatgatccacctgccttggactcccaaagtgctgggattacaggcgtgagccaccgtgcccatccactactcactttttcttagccttttgattactgatgaactggattagaacagtaagtggattgttacacttgacattttgtactttatctggaaatactggcattaaaaactaagtcatattgccatttgtataatattcttagatctttatatgagttttttcttcaaataaaaattgtgtttttaaatgtctttgatatgattgttcaaattgtttgatatttttctaaaacagatttaggaaacttctggccccaccatcagaatggacccttgatttggtttcctctgacctttggaaaactgttctttggtattattgcaatatgcaagaggacctcataaggtgctctggttctttcagaatggaacatgaaaactggagagttactgtcaatgctcattgaaacatcttttgtgagctgtgggttagactttgatgcttgcaaaccacataaatagcaagccatggactccatttacttatcccatttctctggctttccacatttttcttcctattcttgttttttgtctcttcattatatttcttcctcttgatgggtttccacctctatgtagtatgtgttttcctgacctattctatttctgaccctcactctgggcagtcctggcctgccatcttgggaagctatctttttaggagccaagaccagcttgtgaggatggaggtctgggctttcagaagctatgctgcagaaacaaacacaggcaaaaagtactcttgcctaacaacaccttcattactttgtggagtatttcagttttttaatacgttttttaaaatttttattttagattcaggggggcacatgtgcaggtttattatatgggtatattgcatgatgctgaggcttgggcttctaatgatcccattgcccaagtagtgaacatagtacctgataggtagtttttcaactcttgtctccctccccccagttttagaatccccagtgtttattgttgccttttttgtgtccatgtataaccaatgtttagctcccactttaagtgagaacatgtggtatttgattttctttctgcattaatttgcttaggataatggccttcagctgcatctgtgttgccataaaggacatgattttgttctttttttgtggctgcatagtactccatggtgtataagtatcttgtggaaatttgaccctaarttctgtttcacgcagtgtaccttaggcatctgttcttggattttggtgttygccaggtttktaattttgatcctatatcataagytgaattttagtgtcttggtcataccttaatgcttcatttccttcacctgatttttagtttgtatttcctgccttggagtcatcmaaccccctcagcaagttrtattagtatcaacatcaaaatagagtkacctgcagaatatcttaatacagtgcttagtggtgatgttcatattggaaaaatttaacaaaacaaagtgcagaagaagtctcaggttgcagtccatatacaaattctagaacatcagaatcacttgggaagattttgacatcagcaaagtgtgcatctaagaagtcctaactctaagagacawgaggtatcatactcctgtttctacacagaaaatatctgtttgttaatcatattgtttagtggctactacgtgatattttgggtattttacatttattttatatgataggtttgtttttcatattggcattttcccgagttttagaactagttatttaggaaatcagttggcaggggaaggggttgagtggtagctcatgcattattttaagacattggaggacaggttcctcttgagtgttttcatggagaacatctgattttagaaatattttatagccattaagtgggaaatgctcctgtctccaaatctgaccacttaccatcgccactgatattgccaccgtggtccatggatctaccatctattccctgaattcgtgtaatgagctccctgtttctacctctgtcctttccaatctgttcccagcacagcaggcaaaaatgaaccctctgtaaatgtcagttcactttagtcctgcacatagaatattgtattatnnnnnnnnnnnnnnnnnnnntctgtaatatagatcataatctgaaatgaaactatatattcattagttggattttttggagtaatgttttatattttctaccttaattttaaaagcatgtaagttatcttcctttaaaagaaagattattaatttgtatgtgatttttaaaattctttctgcggttaatggccctcaccctcaggagacagatactccaattttaatatatttcctcatttctgaagtgaagataaaagtatctaccaataatacttgtttacctcaaaaacctctattgcctttttttctcatcacacctttacttatttatagaaaccttcacttatcttaaatatgctgggacatgattaaagttctttaagctatcctgatcatagttgaatgacttgtttatagatttcaagcagattttaaataaaaattcatcctaataaaataaaacaaaaataaaagtaaattatttttgtttaggaagagccctctctgcgagttgggtcaggtcaggggaagattgtagtgtgattaatttaaatttaattttttatggaccctaaaaattgaacctaaaatttgcaatacatctgtttttctcacattctgtggcttttatgtcagttttctttagtaagttttttacacgtgtggattacccaaataaattttttattaatatgatttattatttctttatagcacgtttcccaaacatatacatactagattgtatgtatgtatgtatatcatgttacatatttactttttatatggttgagcttttttatttctgtgaatccatttcctcttcaggtaatttatgggatcatctaaagcttaaatttatgtttgaagtctttacttctccaaaattctaactcagatattaatatatgattatagatgtttgtcagtaattatttgcaagtttatctcatcacaatttgaaaatmtttgtgaagagcatcagacaacatgaactcagtgttagcgttacttggaaaacttgcagaataaatttaaaaatgaagaaagtctcatttcaaactgatttttcatattttgctctaataattcaagaaaagtagacaggccagataggcagactggcagaaacctggcctctgtggttggctggaatttacacaggtctttcatatatgattaaataaaaggtgacacgaaattcagaaatgtaatctataagacaatcagagaaaaacaatttttgaagcacattcttgtcagtattgtataatgcctgtcctgtaactgtaattttttttgtgtatctgtcaaatgacattaagctatactcaataatgaagatagcaagaatttgagaccccatgttcatttctttttgtgacaggaagatcagccttttaaaaaataaaagaggaatagaaattaacatttctccagaattatgtttccattcatttgaggttatctcttaattccagcattttactgcatttgataaataggccaaatatgtgttttatttatttgagggcttgggggaagcaatgaaactttacaaatttcaactggcattgcagtctgctgataaggatgggagtttgcaccgctctgaagagattacatgaagtagaattggannnnnnnnnnnnnnnnnnnnnnnnnnnnnnnnnnnnnnnnnnnnnnnnnnnnnnnnnnnnnnnnnnnnnnnnnnnnnnnnnnnnnnnnnnnnnnnnnnnnnnnnnnnnnnnnnnnnnnnnnnnnnnnnnnnnnnnnnnnnnnnnnnnnnnnnnnnnnnnnnnnnnnnnnnnnnnnnnnnnnnnnnnnnnnnnnnnnnnnnnnnnnnnnnnnnnnnnnnnnnnnnnnnnnnnnnnnnnnnnnnnnnnnnnnnnnnnnnnnnnnnnnnnnnnnnnnnnnnnnnnnnnnnnnnnnnnnnnnnnnnnnnnnnnnnnnnnnnnnnnnnnnnnnnnnnnnnnnnnnnnnnnnnnnnnnnnnnnnnnnnnnnnnnnnnnnnnnnnnnnnnnnnnnnnnnnnnnnnnnnnnnnnnnnnnnnnnnnnnnnnnnnnnnnnnnnnnnnnnnnnnnnnnnnnnnnnnnnnnnnnnnnnnnnnnnnnnnnnnnnnnnnnnnnnnnnnnnnnnnnnnnnnnnnnnnnnnnnnnnnnnnnnnnnnnnnnnnnnnnnnnnnnnnnnnnnnnnnnnnnnnnnnnnnnnnnnnnnnnnnnnnnnnnnnnnnnnnnnnnnnnnnnnnnnnnnnnnnnnnnnnnnnnnnnnnnnnnnnnnnnnnnnnnnnnnnnnnnnnnnnnnnnnnnnnnnnnnnnnnnnnnnnnnnnnnnnnnnnnnnnnnnnnnnnnnnnnnnnnnnnnnnnnnnnnnnnnnnnnnnnnnnnnnnnnnnnnnnnnnnnnnnnnnnnnnnnnnnnnnnnnnnnnnnnnnnnnnnnnnnnnnnnnnnnnnnnnnnnnnnnnnnnnnnnnnnnnnnnnnnnnnnnnnnnnnnnnnnnnnnnnnnnnnnnnnnnnnnnnnnnnnnnnnnnnnnnnnnnnnnnnnnnnnnnnnnnnnnnnnnnnnnnnnnnnnnnnnnnnnnnnnnnnnnnnnnnnnnnnnnnnnnnnnnnnnnnnnnnnnnnnnnnnnnnnnnnnnnnnnnnnnnnnnnnnnnnnnnnnnnnnnnnnnnnnnnnnnnnnnnnnnnnnnnnnnnnnnnnnnnnnnnnnnnnnnnnnnnnnnnnnnnnnnnnnnnnnnnnnnnnnnnnnnnnnnnnnnnnnnnnnnnnnnnnnnnnnnnnnnnnnnnnnnnnnnnnnnnnnnnnnnnnnnnnnnnnnnnnnnnnnnnnnnnnnnnnnnnnnnnnnnnnnnnnnnnnnnnnnnnnnnnnnnnnnnnnnnnnnnnnnnnnnnnnnnnnnnnnnnnnnnnnnnnnnnnnnnnnnnnnnnnnnnnnnnnnnnnnnnnnnnnnnnnnnnnnnnnnnnnnnnnnnnnnnnnnnnnnnnnnnnnnnnnnnnnnnnnnnnnnnnnnnnnnnnnnnnnnnnnnnnnnnnnnnnnnnnnnnnnnnnnnnnnnnnnnnnnnnnnnnnnnnnnnnnnnnnnnnnnnnnnnnnnnnnnnnnnnnnnnnnnnnnnnnnnnnnnnnnnnnnnnnnnnnnnnnnnnnnnnnnnnnnnnnnnnnnnnnnnnnnnnnnnnnnnnnnnnnnnnnnnnnnnnnnnnnnnnnnnnnnnnnnnnnnnnnnnnnnnnnnnnnnnnnnnnnnnnnnnnnnnnnnnnnnnnnnnnnnnnnnnnnnnnnnnnnnnnnnnnnnnnnnnnnnnnnnnnnnnnnnnnnnnnnnnnnnnnnnnnnnnnnnnnnnnnnnnnnnnnnnnnnnnnnnnnnnnnnnnnnnnnnnnnnnnnnnnnnnnnnnnnnnnnnnnnnnnnnnnnnnnnnnnnnnnnnnnnnnnnnnnnnnnnnnnnnnnnnnnnnnnnnnnnnnnnnnnnnnnnnnnnnnnnnnnnnnnnnnnnnnnnnnnnnnnnnnnnnnnnnnnnnnnnnnnnnnnnnnnnnnnnnnnnnnnnnnnnnnnnnnnnnnnnnnnnnnnnnnnnnnnnnnnnnnnnnnnnnnnnnnnnnnnnnnnnnnnnnnnnnnnnnnnnnnnnnnnnnnnnnnnnnnnnnnnnnnnnnnnnnnnnnnnnnnnnnnnnnnnnnnnnnnnnnnnnnnnnnnnnnnnnnnnnnnnnnnnnnnnnnnnnnnnnnnnnnnnnnnnnnnnnnnnnnnnnnnnnnnnnnnnnnnnnnnnnnnnnnnnnnnnnnnnnnnnnnnnnnnnnnnnnnnnnnnnnnnnnnnnnnnnnnnnnnnnnnnnnnnnnnnnnnnnnnnnnnnnnnnnnnnnnnnnnnnnnnnnnnnnnnnnnnnnnnnnnnnnnnnnnnnnnnnnnnnnnnnnnnnnnnnnnnnnnnnnnnnnnnnnnnnnnnnnnnnnnnnnnnnnnnnnnnnnnnnnnnnnnnnnnnnnnnnnnnnnnnnnnnnnnnnnnnnnnnnnnnnnnnnnnnnnnnnnnnnnnnnnnnnnnnnnnnnnnnnnnnnnnnnnnnnnnnnnnnnnnnnnnnnnnnnnnnnnnnnnnnnnnnnnnnnnnnnnnnnnnnnnnnnnnnnnnnnnnnnnnnnnnnnnnnnnnnnnnnnnnnnnnnnnnnnnnnnnnnnnnnnnnnnnnnnnnnnnnnnnnnnnnnnnnnnnnnnnnnnnnnnnnnnnnnnnnnnnnnnnnnnnnnnnnnnnnnnnnnnnnnnnnnnnnnnnnnnnnnnnnnnnnnnnnnnnnnnnnnnnnnnnnnnnnnnnnnnnnnnnnnnnnnnnnnnnnnnnnnnnnnnnnnnnnnnnnnnnnnnnnnnnnnnnnnnnnnnnnnnnnnnnnnnnnnnnnnnnnnnnnnnnnnnnnnnnnnnnnnnnnnnnnnnnnnnnnnnnnnnnnnnnnnnnnnnnnnnnnnnnnnnnnnnnnnnnnnnnnnnnnnnnnnnnnnnnnnnnnnnnnnnnnnnnnnnnnnnnnnnnnnnnnnnnnnnnnnnnnnnnnnnnnnnnnnnnnnnnnnnnnnnnnnnnnnnnnnnnnnnnnnnnnnnnnnnnnnnnnnnnnnnnnnnnnnnnnnnnnnnnnnnnnnnnnnnnnnnnnnnnnnnnnnnnnnnnnnnnnnnnnnnnnnnnnnnnnnnnnnnnnnnnnnnnnnnnnnnnnnnnnnnnnnnnnnnnnnnnnnnnnnnnnnnnnnnnnnnnnnnnnnnnnnnnnnnnnnnnnnnnnnnnnnnnnnnnnnnnnnnnnnnnnnnnnnnnnnnnnnnnnnnnnnnnnnnnnnnnnnnnnnnnnnnnnnnnnnnnnnnnnnnnnnnnnnnnnnnnnnnnnnnnnnnnnnnnnnnnnnnnnnnnnnnnnnnnnnnnnnnnnnnnnnnnnnnnnnnnnnnnnnnnnnnnnnnnnnnnnnnnnnnnnnnnnnnnnnnnnnnnnnnnnnnnnnnnnnnnnnnnnnnnnnnnnnnnnnnnnnnnnnnnnnnnnnnnnnnnnnnnnnnnnnnnnnnnnnnnnnnnnnnnnnnnnnnnnnnnnnnnnnnnnnnnnnnnnnnnnnnnnnnnnnnnnnnnnnnnnnnnnnnnnnnnnnnnnnnnnnnnnnnnnnnnnnnnnnnnnnnnnnnnnnnnnnnnnnnnnnnnnnnnnnnnnnnnnnnnnnnnnnnnnnnnnnnnnnnnnnnnnnnnnnnnnnnnnnnnnnnnnnnnnnnnnnnnnnnnnnnnnnnnnnnnnnnnnnnnnnnnnnnnnnnnnnnnnnnnnnnnnnnnnnnnnnnnnnnnnnnnnnnnnnnnnnnnnnnnnnnnnnnnnnnnnnnnnnnnnnnnnnnnnnnnnnnnnnnnnnnnnnnnnnnnnnnnnnnnnnnnnnnnnnnnnnnnnnnnnnnnnnnnnnnnnnnnnnnnnnnnnnnnnnnnnnnnnnnnnnnnnnnnnnnnnnnnnnnnnnnnnnnnnnnnnnnnnnnnnnnnnnnnnnnnnnnnnnnnnnnnnnnnnnnnnnnnnnnnnnnnnnnnnnnnnnnnnnnnnnnnnnnnnnnnnnnnnnnnnnnnnnnnnnnnnnnnnnnnnnnnnnnnnnnnnnnnnnnnnnnnnnnnnnnnnnnnnnnnnnnnnnnnnnnnnnnnnnnnnnnnnnnnnnnnnnnnnnnnnnnnnnnnnnnnnnnnnnnnnnnnnnnnnnnnnnnnnnnnnnnnnnnnnnnnnnnnnnnnnnnnnnnnnnnnnnnnnnnnnnnnnnnnnnnnnnnnnnnnnnnnnnnnnnnnnnnnnnnnnnnnnnnnnnnnnnnnnnnnnnnnnnnnnnnnnnnnnnnnnnnnnnnnnnnnnnnnnnnnnnnnnnnnnnnnnnnnnnnnnnnnnnnnnnnnnnnnnnnnnnnnnnnnnnnnnnnnnnnnnnnnnnnnnnnnnnnnntagattaaccacagaattttaatagaaaataatgttttcagaggtagacctctttggacactgagtaactgtgggtactattttccaaatggctgagcataatttttccccaccatataaatctctagagaaatcttattaaaacctatcacacattttcctgcaatcttaaacaggatatatgtgatacaattaagcccttttataataactcagggtcatcattatggatatcagttagaatgctgggctagaagccaccatcatctcacttggatcactgcaatagcttgttaactcgtttcccagcatctacacatgccccattccaattctttctcctccacacagctgctggagtgacctttaaaatagaggaatctgatcatttcaggaacctgctttttaaaaccttcagtggcttcctatttctcttaagatgaaatctaaaatttataatgtatcytctaaaggcctccactccacccaccttcctctagactcctaaatttgcttcagatcctttacaggwctttggacctgaaacactaggaccaagctagtgtggtagaatgcaaatgcttcrcagaattttcccatctcaatacataaaataatgcacaaaacataatttttgaaatcatcaaccacaaagaaaaacatcagcaatagtaaccaaaaaagaaaacaggcaaggaaagaaacaaaagagtcacagtagacaaagtcatgaaaatgctcacttaatatttccaaacagagtaaaggaaatagctgctgacytgagaagaaataagtgaaatggaggatttagatgtggatacctctatttctctattccttttcctaatttaattttaaagtgaagatttccattctctttagtttatgctcttccccttccccccacatacaaaaaaaccccctaagtttatttccctaaacaatacaaaaggaaacagccatrtacacttcctttaaaaatgaaagtgaaagaagcagaacacaaagaactcatcctagaagaaaatagaattctataaaaaggaaacttcataatttcattttgctatcaagcaacttagtagatcacaaagagcatcaaaaatgagttaaggacaattgcagatcaagaraaaggagaaacagcatcacagagccatggcacaaatcctcacttcaaggcccttggcactgttttagtggttaataaaaaaagattaattatctctgaaaaaaaaggcagcagccccagtcaggggcttacagataaaatccccatctccctgggatggrgcacatgggrgaaggggcagctgtgggtgcagcttcagcagacttaaacgttcctgmctgccagctctaaagagaccagcagatctcccagcatagcattcgagctctgttaagggactgcctcctcaagtgggtccctgaccaccatgtctcctgactgagagacacctcccagcaggggccgacagacacctcatacaggagagctccggctggcatctggtgggtgcccctctgggacgaagcttccagaggaaggaacagggtgcaatctttgctgttctgcagcctccactggtgatacacaggcaaacagggtctggagtggacctccaacaaactccagcagacctgcagcagaggggtctaactgtcagaaggaaaattaacaaacagaaaggaataccttcaacatcaataaaaaggacatctattcagaaaccccatgcaaagttcaccaacatcaaagaccaaaggtagataaatccacaaagactgggagaaaccagcgcaaaaaggctgaaaattccaaaaaccagaatatctcttctcctccaaagggtcacaactcctcaccagcaagggaataaaactggatggagaatgagtttgacaaattgccagaagtaggcttcagaaggtgggtaataacaacttcctccgagctaaaggagcatgttctaacccaatgcaaggaagctaagaaaccattgaaaaaaagttagaggaaatgctaactagaataactagtttagagaacataaatgacctgatggaactgaataacacagcaagagaacttcatgaagcatacacaagtatccacagctgaactgatcaagcagaagaacagatatcagagattgaagattaacttaatgaaataaaacaagagacaagattacagaaaaaagaatgaaaaggaatgaacaaagcctccaagaaatatgggactatgtgaaaagaccaaacctatgtttgattggtgtacctgaaagtgaccgggagaatggaaccaagttggaaaacacttcaggatataatccaggagaacttccccaacctagcaagacaggccaacattcaaattcaggaaatgcagagaacaccacaaagatactcctcgagaagaacaaccccaagacacataattgtcagaatcaccaaggttaaaatgaaggaaaaaatgttaagggcagccagagagaaaggtcaggttacccacaaagggaaacccatcagactaacagcggatctctctgcagaaaccctacaagccagaatagagtgggagccaatatacaacattcttaaagaaaagaattttcaacccagaatttcatatgcagccaaactaaccttcataagcaaaggagaaataaaatcctttacagacaagcaaatgctgagagattttgtcaccactaggcctgccttacaagagctcctaatggaggcactaaacatggaaaggaacaactggtaccagcaactgcaataacatatcacattctaaagactatcaacactataaagaaattgcatcaaccaacgagcaaaataaccagctagcatcataaggacagggtcagattcacacataacaatattaacttgaaatgtaaagaggctaaatgccccagttaaaagacacagactggcaaattggatgaagagtcaagacccatcggtgtgctgtattcaggaaaccatctcacaggcaaagacacacataggctcaaaataaagggatggaggaatatttattaagcaaacagaaagcaaaaaaaaaaaaaaaaaaaaaaaaaaagcagggattgcaatcctagtctctgataaaacagacttaaaaccaacaaagatcaaaagagagaagggcattacataatggtaaagggatcaattcaaaaagaagagctaactgtcctaaatatatatacacccaatacaggagtgcccagattcataaagcgagttcttagagacgtacaaagagttgtagactcctgcacaataatagtgggaaactttaacaccccactgtcaatattagatcaacgagacagaaaattaacaaggatattctggacttcaactcagctctggaccaagtggacctaatagacatctacagaactctctaccccaaatcaacagaatatacattcttctcagcaccacattgcacttattctaaaattgaccacataattagaagtaaaacactcctcaacatatgcaaaagaatggaaatcttaacaaacagtctctcagaccacagtgcaatcaaattagaactcaagatgaagaaactcactcaaaaccgcacaactacatgggaaccgaacagtctgctcctgaattactacagggtaaataataaaattaaggcagaaataaataagttcttgaaaccattgagaacaaagacacaacataccagaatctctgggacatagctaaagcagtgtttagagggaaatttatagccctaaatgcccacaagacaaagcaagaaagatctaaagtcaacaccctagcatcacaattaaaagaactagagaagcaagagcacacaaattcaaaagctagcagatggcaagaaataactaagatctgagcagaactgaaggagatagagacacaaaaaacccttcaaaaaatcaatgaatccagaagctggttttttgaaaagatcaaaaaagtagactgctagccagactaaccaagaagaaaagagaaacgattcaaatagatgcaataaaaaatgataaaggggatatcaccactgatcccacagaaatacaaactaccatcagagaatactgtaaacacctctacacaaataaactagaaagtttagaagaaatggatacatttctggacacatacaccctcccaagactaaaccaggaagaagtcaaatccctgaatagactaataacaagttctgaaattgaggcagtaatagcctatcaaccaaaaaaaaagcccagaaccagacagattcacagacaaattccaccagaggtacacagcagagctggtaccattctttctgaaactattctaaacaacagaaaaagagggagtcctctctaactcattttatgaggccagcatcatcctgattccgaaacctggcagagacacaacaaaaaaagaaaatttctggccaatatccctggtgaacatcgatgcaaaaaatcctcaataaaatactggcaaactgaatccagcaacacatcaaaaagcttatctaccatgatcaagtcagcttcatccctgggatgcaaggctgggtcaacatatgcaaatcaataaacataatccagtgcataaacagaaccaatgacaaaatccacatgattatctcaatagatgcagaaaaggccttcaacaaaattcaacatcccttcatgctaaaaactctcaataaactaggtattgatggcacatatctcaaaatagtaagagctattttttgacaaacccacagccaatatcatactgagtgggcaaaactggaagcattcgctttgaaaactggcgcaagacaaggatgccctctctcaccactcctattcaacacaaaattggaagttctagccagggcaatcaggcaagagaaagaaataaagggtattcaaataggaagagagggagtcaaattgtctctgtttgcagatgacatgattttacatttagaaaaccccgttatctcagcccaaaaacttcacaagctgatcagcaacttcagcaaagtctcaggatacaaactctctgtgcaaaatcacaagcattcctatacacctctaatagacagagacccaaatcatgagtgaacttccattcacaactgctacaaagagaataaaatacctagcaatacaacttccaagggatgtgaaggacctcttgaaggagaactacaaaccactgctcaaggaaataagagaggacacaaacaaatgggaaaacattccatgctcatggataggaagaatcaatatcgtgaaaatggctgtaatgcacaaagtaatttacagattcaatgctatccccatcaagctaccattgactttttacacagaattagaaaaaactactttaaatttcatatggaaccaaaaaaaagcccacatagccaagacaatcctaagcaaaaaaaaaaaaaaaaaaaaaaaaaacaacgctagaggcatcacactacctgacttcaaactatactacaaggctacagtaaccacaacagcatggtactggtaccaaaacagatatatagaccaatggaacagaacagaagctcagaaataatgccacagatctacaaatctacaaccttctgattgttgacaaacctgacaaaaacaatcaatggggaaaagattctctatttaataaatagttttgaaaaaactggctagccatatgcagaaaactgaaactggaccccttccttacaccttatacaaaaattaactcaagttggattaaagacttaaacgtaagacctaaaaccataaaaaccctagaagaaagcctaggcaaatccaatcaggacataggcatgggcaaagacttcatgactaaaacaccaaaagcaacggcaacaaaagccaaaattgataaatgagatctaattaaactaaagagcttttgcacagcaaaagaaactatcatcagagtgaacaggcaacctacagaatgggagaaaatttttgcaatctatccatctgacaaagggctaatatccagaacctacaagaacttaaatttacaagaaacaaacaatcccatcaaaaggtgggtgaaggatatgaacagacactttgcaaaagaagacatttatgtggccaagaaacatatgaaaaaatgctcatcatcactggtcatcagagaaatgcaaatcaaaactgcaatgagataccatctcatgccagttagaatgacaatccttaaaaagtcaggaaacaacagatgctggagaggatgtggagaaataggaatgcttttacactgttggtgggagtgtaaattagttcaaccattgtggaagacagtgtggcgattcctcaaggatctagaaccagaaatatcatttgacccagcaatcccattactgggttgtacccaaaggattataaatcatgctactgtaaagacacatgcacacgtatgtttattgtggcattgttcacaatagcaaagacttggaaccaacccaaatgcccaccaatgatagactgggtaaagaatatgtggcacatatacaccatggaatactatgcagccattaaaaaggatgagttcatgtcctttgcagggacatggatgaagctggaaaccatcattctcagcaaactaacacaagaacagaaaccaaacactgcatgttctcactcataagtgggagttgaacaatgagaacacatggacacagggagggaaatgtcacacaccagggcctgtttgggggggtggggctgctaggggaaggatggcattagtagaagtccctaatgtagataacaggttggtgggcacagcaaaccaccatggcatgtatatacctatgtaacctgcatgttctgcacatggactccagaactttaagtataatttaaaaaatactaattaaaatgaggattcattaacgatatgcacataccttaaatatatcttaaagttaagacatttaaatgccatttattagttagggcagggtcttttgagtatcgtttagtgtttggaatttgattttatctttcttttataaactatacccataatacagcatcagacgtttccagtttggattccttaaagtagaaaaggaacttgatatatgcaaagcaataggatctttctccctctccttctgtgacctccacctttttttttaagtgacttgcttttcttgactctttaaaaacattttctttagatttcatagaacaactcttttttttacattcatttttatttacttttcccatagcaaccctatgacctaacactgttatctccatttcatcaatggagaaactcagactttaagaagatgaccctattttgtgcaatatatgaattataattgattcatttgaagtctaataaatgtattgataactgacaacttgaagcgaggtatagaaaatgccaagatattattatagcataagatactaggttatttttgcatgaaataatacaactatgtttttataatccttgtagccaagtttatctctagaaataaaatttataatggagatatcattatcagyatgattttgcatacaatctcttaaaacagatttcagagcaactaatgatctagtcagaaggcctgaattttaattcagacaaaaccagttactaattctatgaccttgaataaactatctattctccttaggcctctgtacatggaggagattgaatttaatggattccccaaggtctttctaatctctgattttctgcttacaaactattttacaaactataaggccttctgattaaaatgtattagacaataaacatactttttgtgaaacacattgcaaaatgcaaaatttatattggatttctcagtttttaatgaattgggtgaaaattgaatgtaacaaaaaagttcataataaaaaagttcataaatgattccattgttaataaaaattataaatataaaacatttcagaaacattttgaaatcaagcagctaagttaaaaaaataaagcaagataaaaatttgttcttaatgatctataactcttaaaatcagtctgtatactatccatctgttacaacctggaattactataaaattagcctaacatgtattaacaactagcaaaagagaatcagagattcctagggtgcttaaataagtattaccagaaaagactcatgtttctgtctgttggtccgtccaccagtagggttcattctagaccgcagcagcaacccctttttccctgaccaattcattttaatctactataagattatacatagctttaatcacaccacgtctctttttaagggtttttggtgactctgttgcctagagaattaggtcttgaccacttaccctgattttcaaggctctctcaggctggcccctgcctgtctttccaacctcattccttattgtttccttgtatgtgcctttcataataggctatgtgaactatttaatatttgctttcccaggacattccctctttaccttgctcatgtggccctgctgcaaatattgcctttcccctcatcatcccagcttttcactccctccatctttccagacgcaactcaaatagcactcctcttacaaagccttccttgatctcctcagtcgaaatttctctctactgtggagtgtaataggcctttatctgtgaccctcatcagttctccattcttggtagaggtttttaagtatgtaacttactgggctggaaatttgagttagtcaaatatattcctgtatgctgaatagcgaatagtttataacacagtcttttatatagtaaggctttaattaaatatgcaaaattatcactggtatacactatttctgggttcacttcaccaaatatttattagatacctacaatgtgcaagtcacttcagtatgaagggtgagacgtaaaaggattagttaatacaagacagatgaacaaaagaaatggaatcacttctcagtttccaaaaacttgataaatgaaaataccaccaaagaaaccaacagtcactcactcaagcaaaatgatatttttgttgtcaactccaactgcagaaggtgagaaggcagggatttgagactgtggaaagtgaaactgaatataaggagagattactagagtgcataatttgaaatgatactcaaaattaaagtttaatgatagtatttgagaaaaaataagttatgaaccaggcatgtttgtattcagtcacagtgaaatttacaagaagagattttctgtaaaaagactaaggaaaggccaagattagaatgaagaattacattgacttaggttgctttttcagtttatatcatactaaaggagcgcacatgccagacttacaagtcagctctaaaacacaagtggtatcagggacaagtatcaaaatgatcaaaaatgattttacaatcacttaaaaacccacaaatatttattggcctacaatgtggtaggccttttcttggaactggggatacaatagtgaatcacacaggtccctaacctgtgcctcactaacatacaatgtcattcacacacacacacacacacacacacacacacacacacacacacacacacacacacacaggtttgtattccaaacacatttttatagttttctaattttttgttttgatgtaattgtcaaccagaattggtaatgttttgggtattgccagaattgaggtcttggtgtagatgggaggtggcaggtgggagttgggggctggggatgtgagagaaaggtgtctagtatgccccaaggatgaatggtgataccagtcactgagagcaaaggatggggaaaggggaaagaatatgtttcctgttgggtttgagctgcttttgagccatcttagatgttgagtaggtgttggatatgggactgaaactagacagggaactggagccaaacacagaggctcagactagaaataaaaatgtgggagccatttaggtttgggtagtggttgaagctctctttgaatgaaatggtgtaagtagctgattaagtgttagaatgcatacagctagaatccatgtttcaggtattaagttttaaacaagtactaaaacagcttttgaaactcatatatttatagctttgccatgtattaatgcaatataaatttccttcctttacaggtggatgattgtggcttttctttgaatcatcctaatcagttcttttgtgagagccaaagtattctaaatggtggtaaagacataaagaaggaacctatccaaccagaaactcctcaacccaaaccaagtgtccagaaaaccaaggatgcatcatctgctctggcctctttaaattcctctctggaaatggatatggaaggactagaagattactttagtgaagattcttaggcagttttctaacccattttcctcaatagcctgtttcctgtttttaagattttgcctttgttgttgaaaaagggtttcactctgtcaccaaggcttagtgcagtgacacaattacagctgattgcagccttgaccttcccagctcaggtgatcctgctacctcagcctcccaagtagttgggaccacaggtgtgtaccccatatccaactaatttttttcaatttttttttgtagaggtgagggtctccctatgttgcccaggcagatctcagactcctggactcaagcgatcctcacacctcagcctcccagagtgctgggattacagttgtgagccactgtgcctggtctttctttttttaacctttttgtttaacttctctcttcattgcatcccaatccatctacaggcatgcacacttattaggaaagcaggtttgaggtaacaacagagactttcactatattttactttgacagaaggaaagaggaagagtttctattaaaatctgtcatttgagtgatgtcatttaagtcctattttaggagataaaaacagctttggggactggttaaagtcccccagaaactacaataaagaataacttttgttttaactcttaatcactttgtaattttgactcaatccttttctggaccatttttgttaataaatgtcaaagtgtacatgacagtgtctgcgtataattgggagagtcttatgtcataacagattggacattacttcagttttaaagtggtagtttgaagtatccaacacattgctgatcactaatgaatattttaaacttttctttacctttttttaagagttgacctatttgtggttattctacatcaggcaccagactctcctgagtgaactgtgacttgggaattaaaataaagtatagccagttatatttattaaggaataatagggatattttattatgtaaaataatgacacgtcttatctgctgccattactctggggacaggttcatgaagaatagacaattagcaagcaagaaagttgtacatataaaataaagtgtttattttaccctccaacttccataccttattgcttctgtagttgctgtgaattaccaaatagatttggtaaattaattaacttcagcaatgaatagtgatacttatagtaaccccctcctttaagtgccagcaatagaatttaataaatgttgtggatgattacagacatacgagatcaatgccctgttctctctgcctgctttcgtcaagggagtaaggtgaagttgatgatccctggcacgtatgccttgtggagcagtgccattgtggataccctcatctaaatagtgatttcctcccggggctctactcactcaccaataggatttggggtgttcaggaaaccctgtttgaaacatagttcttcctcatctattaccttggaatatgtgaaaagtattagtctatttctgtcttcttttcttagtaaagagggatacttttatccttttgaatcagatactaactaaattgaaaagaggacattgtattcagaaaactagactgttagcagcaccatatttttaatcatgtgataaactgcatcacgatgaaaaggattaaacaggatcagatcatcagaaactaaaaatgtcaactaattgagttttcgttttaggcttctgagtcaaagatttcttggaatatttagcaacgtataattaaatgagatactatctaaacttttacttgtcttggtgaattattattacctagttcagaaaatagtattattccactacaaattacccgtataaatctctgccttctgaaaccatctgctactcccttcatcatttgtcgttctcaacaggaatctgatgattgcctaccactttatccatggactgcaaaaccacaagtcctctttttaaaaaaaaaataagaacaagtgctacctggagctgttttaaccacagaattaagttagctttagaaagccgagcatagaaatgtaggtcttcattgtgttaaaagggagatattagaagtactctcgccactctagttcaatgagaaattttctgatagaatgttttgtatctgacagcattttgcaaggctgtctttttctactgcttcacgttctccttcttttatgaagcctgtgatcccaccagctaaaaggacagagtcattaacggcatggtagatgcagcttactggactgtttattttatactggcagccccaggaatttgtgtcatcttacttgaatgttttatatgtgtctagttgaactccaaaataacactagtttaaatattagttgtattacaggttcaattcaatttattcataataaggtttgatctcctgtcatgtattatacagaagaatatataaacattctgtgaaatctatagattagaggataggggacacaggtttataaaagaagaacaaaattaatgcttttctggtgctttttggagttggaaaaagcaatttatttttcatgcttcacaggtcttgacaattttgttttctttgagagcagacctgtttgaattgggtgatgtaaagaacccaaaagaaaaaatcaaaagccaacagactcttttcaaaaccgtagccagtgaaaaagaatatgagtcttccagatcttttaactgttagtcttttattatctcttcaaggaagagaggctgtatgattgtatcaaagacaaaagaagaaaccgcaaaagaaagaaactaggttggaaatctgtagctggttgaagcaatgacattgttaggagaaattctgtcatatttctttcaagttgtttttccataatgtttttcactctgtccatacagtaaaaaacttaattgccatgtgcataaaagaacactaggaaggttttaagtaaactttttaggactgcttataatattgtagagtcataaaagtgaatagttatagatttcaaatgagctgggaatggaataaagcaatgggaaagatctttaattcacatacaattttaataagctaagggaattcttctctctctaaaagcatgcaggttgttttgcttgttacactttgctgtcttattaatactcagggtctttgcaagcaaacttctgtaattctttacaaagaagagaagaaaacttctgggatttaagcttgaaaggcgaaatgagacaactctaaagttctgtttcagttagggtctactctgcaaatttaatcaaggtcttccacaggcatcagcttgacattaaatttaagtgcccattaaagtgagagtttgacagcagttctgaatgtgaagctcagtctgaggacatctttacagctggaagggaaaaaaaacgttgagaagcctcaaaccactgtggtaattagatccatttgttaacttcttttttaatgttggcaaagggagggagagagaaggttgacagaggctggaatcaggaaggcagtccagagctccctgtagaaatcaggtaagcacagggtcctgtattgcagagaatactggcagatattccctctgacaaatgagtgagatggggaatttatttgatgaacttcattcggtttgtcttcctttcaacacacagagccatggtgtgtggaagctgcgtttttggataggtgtgctggtttggttgtaaggccctttggaagacacagagcattatttgggagtggacctctggtggtacgttgttggcctgaagagttaatatttctcacaagggtatctaacttatattcaggtaatcacttatttacccaaagcatctggtcttttcagtattgaattcctttttcacaggtcacgattgccctagtctaaggcttctcactataattggcattgtaggcaattagcttcgtggaaatcatgtcactggtaggaaattatcttcctacttcactgacttgcctgccaaaaatgatactagttcttgttattggtttgctttctatcctgtaagctctttctgttcattgcttcatgacattttactttttccagaattatcactgtagaaccttatcaaaggctaaagaatatgtctttatataaagctcctgcatttcccttgagctttccattgcagtactgtttttgaacattgatgacaaggtagtgaaacaacactgctaataaatatataatgggtttttcaatttaaccttgcatttctaggtattcattcaccacactgaaactatgaggctttttaaggttttgtttagttttgtactgaaagcacagggaaaaataaattcaacaaatactgcatttaatttaagactgaccatcttgtgaacatttccccgattactcccacacatttttttaggagatcttaccttctatttgagtcatgggataccaaggtcttcattgctgattaaaaatgacatagtgatacctacttctcttttccctttcattatcaagaattaaactgtgatttaaacaatgctctatcacccttaactcttggttgtccatagagttcctgcctggttctcttcttacttcatgagtctgcctgagtgaactcattcacccctatggtatttttttccatccatatgcaaataatccccaaatttgtatctccagctgagaattctctgagcaaagatccatctatccagctatctcttggatctctttttaggatatcccacaagtatctcaaatttaatttgttcaaagatcaracctgttctctcacctatttctcacctattttgtcaatacagaaaccctaaagttaaccttgactgtgattttccaccttctccatccaaatccaattgattctattttaataccagtgtgtctaaactagtagatctcaaatgggggtaattttgccatgcaggagacatttttggtgatcacaactggaggaggacctgctcttggcatctagtggatggaggctgaggatgctactaaacatcctacagtgcccctacagtgcacaggacagtccttcaccacaaagaaatatgtggcccgaaatgtgcagaaaccctgttctaaacagtttcctctcctcccttccttccttgtactacattagattgccctctcatcattctaagcgaagtggtctcaactaactggtctagtctccatttgcccaccctgaaccccatccgatatccttcttcaaaatctaatccaaatacttttcccctgggtgtgtgtcttgaacacggctctccgttacctatatgaggaagtccaaccacctattattttgtgcgtgaggccctctatgacctggttctgtctacctctccagttccatctattgccattcagctccctactctataatccaatccagtgatttagccattctgcacaaactttccctgcacattcaactacacactccctctttcctcatattaccctccctgcctggaatgcccttccattccccaccatgctaactactgtttctcctctaaggctcaggttaggtacattccttcagccttctctgttgaccccagtatagattcattgtccctttcagttcatctaacatatgctatggatgttatacttaatagctatatgacagtacttatacttacaatcatccatttacttatgtttcccttatgttttatagtacccatttacttatgtttcccttatgttttatagtacccatttacttatgtttcccttcattacactataaagtccttgaggacagaaactatatcactttcatatttgaatccctaataattagcattgtctctagttctttgcatcgtgcatgacattcttgggcactcagtaaacatgggtagagtgcatgaatggttacttgcttattaggaatctcaaattcattgtttttaagacctacaaacaaggggtggaatggattctgggccccagattggagacatcacttacaatcaaaacttgggcaagctctttaattttccatgcttcatttgcttcatatgacaaggggataatgattacacctacttcaagatgattctattagctgctattacatctacaacagtcagaattctgtctgtcacgtggaaacacttgtgttgtttgataatcaacccttccaacaaatgttatactactacatggattctccctatttcaggggcattcattctgaatatcccttacctggagtaatcctcttatatccactataatggggtagactgtgggatctaggggaatgcaccaaacaaagttttagcaaaaagcacacacgtcaatggatctatgactgccacacctttgacacctttgtagccaggcagggtagatggagaattgccaactatgaaactggaggatttcctacatatgggatatactgtggtatgaaaagttgctcacagggtgtcacagagtactgcttgctcttaaaaaggaagaactgaggcaacttgagctttggaatatagaaatgtcagtgggtttacatatgactcccagtgaaagtgatacctgtggggtacctagtctccaagcacttaaaaaagtagttttaggtagatcaaatcaggtgccaccatggcacttctggaagtggataagaacggtaatcatctgcattttccctaaaaatgactctgagaggcctggcat

SEQ ID NO: 96634 - DNA, 13922 bp, Homo sapiens
tggtgctaaatgccttgcctcagcctcctaagtagctccacagaaaattttactaagagatgaatgggataggagagaaaggggcactccgtgatcatgttatcatgtgtaaaacctcctgtgaccaagaactcatctactgattctcatctatatttgaccttgctcataaatcaatggattgtacatgttagaaacataaacaagaccataaatatcttaaattaatgcactgatgacagttccatacagcttttcaaaaaaacttcccatgaaaacatccctagacctatacaatattatgtaagtctcccaggaaccctgtgagggagataacacgtcatattattacagataaggtaacagactcaaagaggttgtcttttgacaaaagctacagaactaaaaaaaaggcagattctcagtataaattctgtgtgttctgactttaaagtcatgttctattcaatgtgtcatggagaccccaaagcagatctcagcagagcttggtaatatcagcagcgcacaatggactgacttcagacatgagaaatacagaatgtagcactctctgtgttttttagcagagaaactctacacagaaccaaattaccttataggagaaaaataaagaatagtgtttatgtatagttacactatatataaacatatataaatatatgttaaatatagttacactatatttttgcagtgttttacatattgttacatatataaaatgttttacatatgtagtgttttacatattggaacctttgtatttactattatctttgatcttcataacaattttagcttattagctctatttcatgcattgagaaactgactaagagagattctgaaaccaaaaaaaattctcacagtaagtacaattgtccttaaatatccatagaggatttgtgtcaagacccctcacagataccaaaatcaatggatgctcaaatccctatttaaaaaaaaaaaaaagttaacacctgtaattccagcactttgggaggctgaagtgggcagatccctagagctcaggagtttgagaccagccttgggcaaaaccctgactctacaaaaaatacaaaaattaaccaggcatagtggcatacacctgtagtcccagctactagggaggctgaggtgggaggtttggttgagcctgagattttgaggctgcagtgagctgtgatcatgccattgacctcagtctgggtgacggagcaagaccctgtctaaaaaaaaaaaaaaattcagtattttcatataacctatgtgcagcctcttgaattctttaattcatctctagattatttacaatacccaatataatgtaaatgctatatatatttgtatttgtatcttttttgctgtatttttaattgtcttttttttcataatttttttacctgcattttgttgaatccatggatacaaaacccatggatccagagggctgactgtactgaactgggagttgaacatgaatctttcccttcagggtttgcttcactatccattacaatacactacctttataagctattgatggattctgctcttctgctttctcagaaatttttgccctggttaaacagcatcattcccttctacattagactcaatcccttcaaacaataattaggaattgataaacatctctaaaaaggataaaagaccaatgatccagtcttgtgcccattacagtaagcagtcgagggcatcagaatatgccaccccaaaatatgccactttggcataagaattattttgtgttgagttccggaagaattctctgcactccctttaactgcctaaaagtagagcataaatctctctttgtgaagggatcctcctccttccctgtgtcaggcatagaagagcattaatcactgagaaagaatttacactaagagatattgacatcaacaggccttactaaaataacacttatcttccctcataagcttcctggtcgattctccaggatttcttgacccttgaagcccagacaccttttcctttgttaaaatgatatatgtccccaagtcaaaccactttgagttttccttattttctgtgaattcccatgcatgtaaaacattaattaaactcttatgctttttcctcctgctaatctgtctcttgttagtttaattcacaagcccctagttacttaacctaagagagtagcagaaaagatcccccttccatcacaataatatgtataattttttcatttaaaaaatttaaaaaatctccatatattgttcagtgacctgcccctgacaacttcaaattcaaccaatcctaatgtgttaattcatgttaggtattttcttctcatacattgatatgaaactatttctgaaacaagtgaagcactaaaacataattggaaaggcaagcagtatgggagcactggataaattgaagtgcaaggcagagaataatgaaggaggatacctataaagaggcttcctatattatgattttctctgtatttgaccgtgctcataaatcaattgatagtacgttagaaacataaattagatcataatgtctgaaattaatgcactgacgacacttccatagaggttttcaaggaaaatattgatgtttttggagctgttttttgacatttgagttggcatcaggtacaaaacatctcctgccacccatcttttggtgccctactaagtgacaaaattctgataggggcagcacccagctgactccatgtagcagatatgatacttttgcttttatgatgccatctgcagagaaataaatcatcataaagttgactgagtgtgtcctatgttcatctgcttgaacaagttcgatgtaattgactgacaataataaaaggggattagagaaaaaaagtcctcagtattgtcaagtgagtgtcacccaacccctgacttctgaaagatggtcaggacacagatgggctgaaagaaagaagaagctatccaaggagagcaaacacagacaggacataaggagtgtgacagcatggcatctgtgtctgtgctgggagagtctgcatgcggtggaagaaatgggaggagaggtattttgcatagttaaaaggttagtctgattgaaatagatagttcatgttgttaactaataagggataatttaaaactgtacagttcactgaaattattgaatgctataatttgggtttatttttgtatcacatttgacatctcagcacagtagcacaggtagcacactgaggaagaattaattgagagcattctgcagaggtgaggctttcatgctttttcctcctctgcataccagaataggaacttaatggaaagtctgcatctggacagaccagggctctgtatatagcaaaatcttgaggccatttttgaagggattgtataaagagaaggagtatgtaaaaagtagtggaacccatatctgtaatgagacttcagtacattaaatgcttatacacaatgaactataacatctctgcagtgagtttttgttataaccttggttcctcccattgaagcactagtggaaaccattggccagagtttttctgatgatctgattgggtttgttgcctgtgccttgccctcttgcttcatgatccatgttgatcctcagatagttcttaataattctctagttaattcctttaatagcgtttgatgttttatttctgctgttcattccagcttgagtggcttgttagtgtggtctcgtcttctgagcaatagatttttgaaatgacagacagaggattttaaacttcctttagaggaacttatgaatataatcaatgttaagtgaaaagggccaataggccacttacacatgtggattgtctacctgtgaattgtctcaatcttagaaacttagataagcattgtgttataagcagataaatgctcagagcataatacttaataacttacttccaaaatttggtggatttctttgcaaatatttatgagtatacaatttcactccatgcctggacctaatattcaatatgagatccttgagagtccattttcaatgctgatcaaagcctttgtgttctcatacccaccatatgatgtagctataaagatggatagcagcagaaaaactagtgggctcctgtgcagtgagtcaaatgggaatgacaaacagcatgacaaatagaagaaacaatcagtcaatcaacattcatataccgtgcccctactagagtccctgctaggaatcaaagaaagaaatgacatagatcttggttaaaaagatcgatttggaggtccaacatttattcgaatattttcaaatattcatttccatattccaaaatttcaatatttattaaataattaaaatgttaagggcaaataatgatattaaagggagttaaatattaatgttatgtggaatcatcaggactaaaatgttttaaaaaatcttctttgttttcagtaagactttgtagcaggatttaagactggaagtttcagaaataaatatgaaagctattgtaagaattggggaaccaatgtaacaaaaaacgttgaaaaaagactgaatgtggtgtattatggaaatatggaaatagtgagatttcacttaagagaaaccttcatcaaaacacagcctaaagtaacagaagaccatctgttcagcaatagtaaatgtagagattcacttagcataagcaaagaggcaacaattcaagagacaaaaaacaataggtgtataaaattgaaagagctggctaggtatggtggctcatgcctgcaatcccagcactttgggaggctgaggtgaaaatattgcttgagcccaggaatttgggaccagcctgggcaacatagggagactctgtctctacaaaaaaaaacacataaaaataaaccagacatggtggcacatgcctgtggtcccagctactcagtgggaggctgaggtgagaggattgctcaagtcctggaggctgaagctgagtgagccttgatggaaccagtgcattccaggcttgacaacatagtgtctccaaaaaatacataaataaaattaaaagagctttaaaatcctgtttcttactggtagtccattgacattttgcacacaataggtgttcaaatgatactacagaattattggctgggcagaataaaatatgtcactttaaaagtcaaattgagacttttttcctccaaatatgttttgactttggagatttagaaggatcaatttctatcagtggtagagggctatactctgaatatcgagtttaagatccatcatttgcttgagctacattataatagtttaatttttaaaacaacactgctgaaatagtttttggagctagataatagattgtaatacagactagaaggaattgcagtacatttcttcagggcagaaagcaggtgcagttatatctctgcatgtgcatccgatgcttatgtattttaaatgtaaattgtttcttttaagagaaaatattatattgaacattgatgcaaaggcattatgtgtttgtgttttattttcctgagatataaaactcattcttcacctataatgagacttcgatgaaatattccaaagtgtttgtaacaaatctggcatttaaggaagcagatttatataagctatagctgggatttttttctttatctatttccagtttctttataatattttatgcaggcttttgattttatctataggtgcatttaagtatgttttgaatagtgggggaaaattaaaacttgaaatttaacaaagaacttaaagtgagttaccataacaaagcattcttaaataatgaattttagaagtcggataaaattcttcctaaaaggattcattatataaagcaaatagctgaacaatgtcaggttgtaacatagtaatcaagagaaagagcttccaggcgaggtgcagctatcactttaagccccggggcaaccaggctgcttctcacatggttgccggggaagcagaggcttcagcttctgtggtcaagaagctgggtatgtcatggaccagtatttcagatatgcttgcattcaagaatgatttttccagctctcccccaagaaaaattgttcatcttgatggaacggggacagaagtcttgccgaaggacaaagagtgaaacaaatttaactttgagctgttgaagagccagttgtgagattcaaacataaaggatgaccagatcttgaactggctgtgaaaattttgctcttctatcatgtacttggcaaaagactttgagcagctcctcagtattacattragattgccttggttgaatagaattcaaacagtggtggaagagtatttggcttctctgggtagtcttgtaacaacagactcttccttagcccaagtctcagcataattgcttcccatttggcgtaccctccttgaatgatcattaagaagagccatgtaaatgtttcagattctgatgatggagatgattatcttcctgcagattttgacacacgtcatacaaccttacaaataacagcaagatatgtcccactggcactgtggtttcttttgcccatactggtggaaacatttccatttgttcaatcagagagaacactggaatgttacattcataacttactaaagattagtatatactttccaaccttgaggaatgaaattctgaagcttattattaaaaatctattcaagttggatgtgaatacattctggcatgatattgaagatgctgaggaaacagcagctcaaacttgtggtgggacagattccatggaatgattgttcaatatgaacgaagatgaagagactgtttctaaggctgactccaaatggctcggtcagatggtgcaccctgtagctgaatgcctggacaccctgctgtctttgcttttgcagtacttgaagtatgtctgctatgtaaaatacatggtaaggttgataacaacaaaataaaggatttataatatatcacaaactgataaacatatttgacaaacccctgcctcctgtcaygtacagttttttatgttttacctctgtggcttaaaattgcgactctcagaagcatttttggaacgtctctgggaaaaaaaaatgcaggatccaaataatcctgtcatcatcaggtgagctgctggaaattatattggaagctctttggcaaaagctaaattcattcctctcattacaactataaaatcatgcctaggtctttcggttaactggccacacaaataccttactaaccaggatctgagaatgaaggctttttgtgatattgctctccatcaaacattttactcagccttccaagctgtgttccacacctttgtttttagacacaagcaacttttaagcgtaaacctgaaagarggtttgagatgtcttcagtgcctacatttttaagggatagtgactaggcagctaaatcctctgaatatttgcctgccctcagtggttaacttatttgctgctgtcacgaataaatatcagctagtctgctacactatcattgagaggaacaacggccagaaatacagctggaggagactcggtgtgaacgtgcaccaacccattggacgccttcttcccctttgatccttgtgcgcttaagcagtcaaggaaagtcattgattctatttatcagatatgggaagacataagtgtcgaagagcttcaggagtttaagaaacctatgaaaaaggagatggaaaaagatggagatgatcttttgaaaggtgaagttcccccaaatgataccatgatcgggattataccgagccactttgatgcgatgcacatttccaaagtccttcaagtagtgtgggctccccacctgtgttacacctgccagaccagttccttctcatctcgaggatttgtgattgagatgcagcattcttccccatcactcatcatgttctttagcaactgtttatgctgtttgggcactgcattgaactagaatgagcacctgactcaggcatcatactttcaagttagacttgagcatctgaacagacttttttttttttttgcttttttgttccccttagagacaaaattagaagactgaatatcatgtgtaatattttatggtggggttgatgataaatgataaatactttgctcgtttgtttaagaagtacttttcttggccaggcgtggtggtggctcacgcctataatcccagcactttgggtggcccaggcaggcagatcacaatgtcaggagatcgagaccatcctggctaccacggtgaaaccccagctctactaaaaatgcaaaaacttagccaggcacggtggcacgcacctgtagtcccagctactcaggaggctgaggcaggagaatggcatgagcctgggaggcggagcttgcagtgagccgagatcatgccactgcactccagcctgggcgacagagcaagactccgtctcaaaaacaaaagaaaaaaaaaagaaagaaagaaaggaaagtacttttcttatgcattacagctttttgagataattattgtgtaatttctaatatagacagcagcctattttgacagactgcctttttaacacaggattttttttcagagccacattcacagaactttgctgatctactttcaatgaagaatcctttaagataaatcctctatttaaagactttaactagaatgttttatttttgctgcattgtttacctcctgctctagttgtgtgttggaatttcagtagggtgcagaggaaatggaaactggggagacatccaaacctggtctgggacaaagagagttggagctggcactgaaggagatctctagggaccccagaaaccaataacagccagtagggaagagatagagagattagagaaacagaatcagacaaataatatactttcatggtgtaaaaatgaatttgaaaaaaaaagtggagatccaggtaaatgtaattcacgttgactgaaagtaggcttgggcttgcattaaaaaaattacatcatattttactcttcagctttcaagtgtcccgttagaactagaattgctctttggtagcagttagatagagttatttttgacctgcatcatttggttattttgagaatttcttttttcaaacaggaaaaaaaaaaattagggccgggcatggtgtggctcacgcctgtaatcccaacactttgggaggctgaggcaggtggattgcctgagctcagaaatttgagaccagcctggccaaaatagcaaaacattgtctctacaaaaagcacaaaaattagctgggcgtgttggtgcatgcctgtagtcccagctactctggaggctgaggaggaggatggattgagcccaggaggtagaagctgcaatgagctgtgtttgcaccactgcactccagcctgagtgacagagtaagaccccatctcttaaaaaaaaaaaaaaaatggaggttattcggtggaatggttttgctagcaataataggccaataataggccaaacttactacggcagtctttatccaatagctatgcctatcatggattcagcttggtgaaatccttctctacaagcctctttttctattttcacaactaaacactgggagagaggggaagtctaagatgaaaccttgctttataacaaatttgcccaagcactgcccgagtcattgtgaagttcaagtatatttttgctttgttttttaaatgtgtacttttttgtttacttgtgaaaataaccatcttcaagcatatttatttttctgccccttctatttatttaaagacaggcaatattttcttgaccacaaatattttgtaatgaatcacaccctctatcctaaggctttgtatgctattgcataattacactggtggcaatatagagtttgaatttcagtctataaatatgttttttggaaaacagaaattgtcattgcttaaaaaaatttggatattggtgatttgattttggtgacttggtggaaagtcatttgagaacctcatggttcttttttaattgccgacaaaaagtggctttttgtaagttggataaaatgagtaaatgaaattgtatctagagaagttaagagtaagtgtaatctttgtgggttggaaagcagttttaacacagaaggacctatttacaaataagtctgtttagctttgaaagagtttgagaaaaaaaaatccattgtgaaaataaagcaatggtatgattaatccagaaccttcattcttatgccaataaaaggaggtatcccaattttaaaaagatttctcactttaaaaaaaaaagagagacagagacagagagagagaagggagagagaaaaggactgtaatcaagactctatacccagccctgaatcattcatctgtcagagcaaataaagctatctaatgatacgcaaataatcaaaaccatattattctacaccggttagaggagaaatggatcgaattaaaaccaaacaataactagaacagattgctcaagtatcactatggaggagagagatcccccaaccaagaaaagggtattttgtgagctccattctgggggaaaaagattggggatgctggaaatcaaataataaatacagtaagtatgttatttggtcagcctacatgctttattgaagtgcaactaaagtcctagtctttactagttctctatccaattgtgctcagcctaaagttgaatctatgtacgttttagtgtctgcatttttattatcaagattttaattgatgtttcttttatactcatattttattgtttcaatcttcctgttttttacttcctaaataatctaaaacacacttattcctctgaccataatttgatgtggaagaaatttgtcatctgagtgcttaatcattgtgtatgtctttctgagtgttatgctacttaatataatttgaaattttactttgtagacttaagaaataatttcatgtgattattaatattctctctctcctcccactctaattgccttactcaaatcatgcccacccactcaattctgtttttcaaaagtaacagtcatagttccagtagcccaacttgtaagaggcacttctgcctcctacgggagccaaacttgtatctttttttctttttacccagatccagagcactttaggcccataacttcagccctacttagggttttgttgttgtttttctacttcttatccacagaagtatgtcttctttgaatcccagctatgattattttgcttttcttttattatgttgtctattattgcagttttgaggactatgttgtgtggaagtcttcccacttcctctctttttccctcaatctctctctctccctctcgcaaacacatacacacatatatcttattttctttcctttgatccattcctaatcgaattccctcttagaataagcattgattatttctttcataatctgcattcttcccaaaccactgtccatgccattatttatacccatggggatttttgaataatatatagtatatgcttgtatgttttatgatcaaaattgcattatatactacgtatcatgaaaatgtcatgattgtggtttttactgaatattttacttttgatatctctgtcgatatagatagatattattctttctactgttctatagtattccatcatatgcatatcacatattgtgtctcttcattttcttatgtttaacatttctaatctttgttatggaaaacatgcttatatggacaatagcccacatttctctttgtaagtgaagaagtgtttctgcgggatccagtacagatagggctgatttccagctggacaggaagagctctatctgtatctctggaggtgcctagaagactggtttttgaacctttgccaaggaaggggcaatggaattcatgatattctgttcagggtttgaaactttcctagatacccaaagttatcttcctttcactctgtcactcaggctggtgtgcagtggtaggatctcagctcactgcaacctcgacctctcaggctcaagcaatccgtccacctcagtctctgcactagctgagactatgggcatgcaccacaacgtccagctaattttttttattttttgtagagatggcattttgcagtgttgcccaggctggtcttgaactcctggactcaagcaatctgcctgccttggcctctcaaagtgttggcattacaggaatgcaccaccacgccaagcccaaagttagcttctttattgttgactttgtcttaacccattggataagcctgattttactatttaaggaggcactgagagcttttgaggggagctcttccaaagacaaaattcctagcacagatcctggaaatttgaatcagagactcagctcagtcctagagctcaaagataagacccccaagagctcatgctgtaggtatctcttggatttccaaagcttgcctgcattctttagatattaggttggtgcaaaaagccttaaaagcctcaaggaggtctggtgagacactttaaataactgatgtgggaaaaaaacaatacagatatatacccaggagtaaaattgctgggacattgggtatgttcctatttagtgtcaataaactgaataaagctatttataatggctgtactggaacagagtgcaaagtggacttcctacttttccacattctttccagctgtaaatattatctaaatttttaattgttaacaacatgattcatatattaaaatatttcagcatgcctttaacatgcacttctctgatttctaaagtgcccatctctttaaaaatgcattagccattcaggttttccctttgggaattgcttattttaattccttggtcatttttctattgtgtcttctttcttcccgaggagcttcttaaatattctagatataaattttttcctaatctgtcactttcctattaactgggcctattatatctctacttcagttttctgatttgtaaagtagaaataatcatacctataactctttcttttttttgcctctaaggattaaatgagataatgaatgtgaaacactaatacaacatctgacacatagtgagggttcaataccaccagggatttattaagcctctttcttttttatatatactttaaggttaagggtacatgtgcacaatgtgcaggttagttacatatgtatacatgtgccatgttggtgtgctgcacccattaactcgtcatttaacattaggtatatctccaaatgctatccctcccccctccccccaccccacaacaggccccagtgtgtgatgttccccttcctgtgtccatgtgttctcattgttcaattcccacctatgagtgagaacatgcggtgtttggttttttgtccttgcaatagtttgctgagaatgagggtttccggcttcatctatggccctacaaaggacatgaactcatcattttttatgactgcatagtattccatggtgtatatgtgccacattttcttaatccagtctatcattgttggacatttggcttggttccaagtctttgctattgtgaatagtgccgcaataaacatacatctccatgtgtctttatagcagcatgatttataattctttgggcatatacccagtaatgggatggctgggtcaaatggtatttctagttctagatccctgaggaatcgccatactgacttccacaatggttgaactactttacagtcccactaacagtgtaaaagtcttcctatttctccacatcctctccagcacctgttgtttcctgactttttaatgattgccattctaactggtgtgagatggtatctcattgtggttttgatttgcatttctctgatggccagtgatgatgagca

SEQ ID NO: 96635 - DNA, 13059 bp, Homo sapiens
gttcaagtggttttcctgccttggcctcccgagtagctgggattacaggcacgtgccatgacgcccggataatttttgtatttttgctagagacagggtttcaccatgttggccaggctggtctcaaactcctgacctcaagtaattcaccagcctcaaccttccaaagtgccgggattacaggtgtgagctgcctcgcccggccccaaggtagtcttgaactcctgggctcaagtgatccgcccacctcagactcccaaagtgctaggatgataggcatgagccattgcacccagcctgaattttgcatcattgtattttcttttctttgaccatgaaatttgtgtgtgtgtgttgttgtcaatcaaatagacttcataaaaagcaatgtttatttctgttaatttggattttacttatctatgccttagttcttatagcttcagagaggacataaatatgtgacatgtagaatttattcttttctaaggtgacgtgccgggccattgggattggggcttaccttgtccggctgggacagagaaccatccaggttgagaattctcacttaattctaacaggagctggagccctcaacaaagtaagtttctagggttttgaagaagtatgcatagctgattgaagattattgtgtgaattcttaattcaagatcctgattggaaggaagcagttcaatccgtgccttcctcagtctatctcttcccctctccctccatcttttctgcccattgacttgcttgcctttttattcattcattcattcattcatttcatttatcaactattttgagtacttactgttttctaggcactgttccaagccctgtgtatatgttagtgaacaaaccatataaaaccgctgctctaaagtgcttatgttttagtgtcgttgtagaaagacagaattaattgaacgcttctgttctgtcccacttctctctttttcttaatctattagtaaaagatgtgaggagatctatacacagacattgagctgtctctgattccagctgtgctggttcccatttcaggcctacatcatgaattaggtaccggcctaggtgttgagactatcaagttttaatgattttgtgaaatctgtaaatacacctctcgaaaagggcaccgatggtggtctcttgtatatagaagaaatatttggcaaatattgagtgggaagatgggtggatggatgcatggatgggttactgggaaagagtatgcataaagatttatcttcccttccaaagaaagatttgtgcctttttagtccaacttcacaagggtttttccaaaggggaaaaaaatggatggcaaggtcactgctcgaaagagtgaaaactatccaagaatacctgaatgtataaaggacagtgcagttctgacatctttgcaagcataggaaaattattttctcttcagggccagaaaagtataatggaatattctgaggctgactgcccttgtgcaacttatataacctctcagctcctcagctttcttatctgtcaaagggggataataatttaaacctttaaataatgtggagctcaaatgagaaaacataagtaaaagtacctagttctactgggcatgcctagattcccagctactcaggaggccgaaacaggaggatagcttgaacccagaagtttgaatccagcctgacaacatagtaagaccccatctcttaaaaaaaaaaagagtacctagttcttggcaaaaagtgttggcccacattcaaatttcagtttcccgttcctctctctaacatgatttggtgattgagcttatggagttaatacacatactaaattgtatcagatattatgtttactccacttgcaggaactttttatcaagtcttgactttcaagtttaagggtaagaattaagtgttctgtcattcccatttaggaaaaagttgataattccattggtttaattagattttgtggatgtcagaaattagaggaatcatttgatgcgatcagcttgctctgtgcattcatatgaactctgtatcctcctctgggcttgcttttctcatcaaggaaaggcacagcagtgctaacagtggcgaacttggctgtcttcctccctttttggagagtagcctggaaataaaggttgtgaaccactactactgaagattattattgcagtgggagaaactgctgagagtcttaaggttgttgttttttttttttttaagttgctcttttggataccttcttaggatgagatattgatgaatgccaaagataattttaggtaccattatctatgagaacagaatttttgaaagattttaaaaattctgttctcatagataatggtactttaaaaacctatatttccatgatgttcccatacccagtcagagagctaatttctgaaatatatcttcttatattgagtttctttctcccccctgccccgatactatattatatacaaagaatattacaaaaagcagatgttgggtttttggttttgttttgcttgaaaacttgctagttgaatttcatttgtgccatgaagaaacattagagattgatttcttaaaatctgattgaattgttctaatcaaattcattatattcactgtcatagcttacagggctgcttgttaaaacaaaagcttagttacagggtgaaagataaataaagctatagctttaacttaccaaacaatgctcacttccaaaagggcatatttgtttttagctgaagggagtgatcagatacagaggttacctaatgttgctctgcctgcttcactatcttcatgtcagctcctcttaagtatagagctgtgctgctgaagacacccgattttatgcaaattcgttcagaatatcctattagcccctttgcctataaggtatgaaaaaaggaaactaccatgctcagatggcttcctctgactcactccttctgtgtgttgtctttgtgtgtgctggtgtttttcttcatctctgtttgcctttctttctgtaggtatctctctgtattgtgtactttgggtgtgtgcaagtcaccctgagtgcatgtctctttctgtgtgggtgctgatctttctgtctctttgtgtctgtgtcttgcgtatagatccccctctttctctgtctgtgtgccgccctgtgtgttcatgtgtgagaaagtctttgtgtttttgaaacattatagagcctcctttcttaagccttggccattttgctcatagtatgtacctgtgtaaggtggaaatgtaggagacatgcaagcttatatacagtcttagactgtaaatatttgacccccacatttttgagtcttcatcctttatgttaaacattggggtgaagaataaggagtgggggtgttcagaggttgtaggggaaaaaaatcttgtgtgtgcaagtgccgatcctgttgacccctttgaaaattgaaataatgataatgcacgtctcctgactgcatcaaagtatcagcacatcaaaagccaggaggcatgaaatgcaaatgataaagtgaaagcagatggattgtgcatgatcgcctgatgcccaatgaattttaaaaggtgctggtttgcaggaaggggggttggggggttttgggggggactgaaataaacacgttatccctgcaatttttttttgttcttgatgctcactcctgacaatattttttcacacttgagtgaacaccctctctctctctctcccccctccttcttctctccctttctctctcctctccaaatcccctcctctgccccccccttcccccccacctcttacacatctcaggtcatgtcgctgcagctccggtggaaataataagatataaaccacgaggttgttatttgcatagaaatagcatggagccccaggcagcaagggagaaggacacagggatgatttgtctaaaattttaatgaaaacttttgctgaggcagagatttttaaaaactttctttctccctgcttttccccttccttcccctaccccccaaaccccatcattgattttacttaacatggttcagtttgaagagaaaaggttgacactccacatatcatactcccataatgcagcaacctgtaaattgtttcttcctttaatagatatgaagctgaagagacatgcattttcaacttaatacattgcatgtgtgcgcctggcttttatggctatactccatcttggcatacacatgatgttgcctgtcattagcctgtttttaattagtttacaccttcctatcttttgcttccaaagactcttactttttaaaggatttctttttatagccaacagtagtaaccttcatataaaataaatattttctggtgttttcctgtttttttacttttggtggtttttctgtatacttacatgttttattcatggacgccatcctttgccactgtgtcttttattccaaaaccaggaagtgcttcccaccttcgtatttttatccttttccccctgtgaactcaccatttgtgtatcttctttccatgtctgtcttgctttgttgcctgcagttatttgtaaaatattcaaaatattacccaaattgagatgagttgtagtatctggattttattgagtgttactaagcacatttgacattagaactaaaggcagtaggctggtgattagaagcagcccaagtgggtttgcttgaaattcagtcaagaatatctgtctggttccttgctatcttctggaatgggctaatggtatcagggctatatttcgtagacaggaaggcaaaaacagaagggaaagtgacttagtttcattgagagagactagatcagggtcagaacatgaactttcatgtccctaagtttcactgaagaaagctcaggcctctttgcttagtggtctgtaaagcctaagagaaggtggtccggtcgttttcctgtttgtccaaatgtcgtgagaatgatgacattaataagagaagtttctaggggcttgctatttcatgtcactcaaggtagtagatcctaactctaggaactgtaggctgtgggtgacagattccttaaaatgcctcactgcgtggcagacctgatgtgtgtggcaaattaccctgcttgaagggagtcatgctggcctggcaaaggcagtaacctgtgtacttggggaactgttaagatgcacccttaaggagctgagatgattgcagagtcataaactcttaagtctatttgccactggacatttgcagagatgatcatatttacttccctcctcccaccactcttcctctcagtttcctttttactttatttttttctccctttcctggtaaaagtattagtatgtttaacatagtgttaggtggcagataggctgggaagagctagtattgtaaaggaacactgatgtgtactggagcctactagctctcaatccattgccccagacttggggagagagagcacattctctatccagagaaataagaatatgcagtttatggttgtcctgtggacattaactgactgtgaaggtaaggtatatgccaaaggcagtgatatgcaggtgatagattcaccaggagatgatatgtgacttttcttgtattttaaagctctgcttcttttttagaaaaaaaaaaatcctatactctcatcccccttagcgagatcaggcccctatttccactgaatctgccaggaaaaaagaagttatgtgatgggtatgactagggccattagtttggtagggggctaattctgctaatcttgcttttgagacttggtgcaagtaagttacatttctctctggttctcatatatgtatttttctgcagctatgcagtatgaaatgtgaagttgtcatagctgactctgttaggcacagtaccagagttcctctcaggagtgggaattgtctgttacaccagggacctgcactgtgtagtctccatgctcacccacccatgactctgtgaaacacagcatgaaagtcatggaggctcaagaagggaaggagagattacttagctctcactgtggggcgggcagcattgtaactttcacataacttaaagaggttacgatagagacagcgccggggcaagcgagagccagacaggcactgggtgactctgtgcctcgctgtggaaaaacaactaaacatgggcaaaggagatcctaagaagcctagaggcaagatgttgtcatacgcattttttgtgcaaacttgttgggaggagcataagaagcatccagatgcttcagtcaacttctcagttttctaagaagtgctcagagaggtggaagaccatgtctgctaaacagaagggaaaatttgaagatatggcaaagacagacaagacccattatgaaagagaaatgaaaacctacgtccctcctgaaggggagacaaaaaagaagttcagggatcccaatgcacccaagaggcttccttcagcgttcttcctgttgtattctgagtatcgcccaaaaatcaaaggagaacatcctggcttgtccattggtgatgttgcaaagaaactgggagagatgtggaataacactgctgcagatgacaagcagccttatgaaaagaaggctgcgaagctgaaggaaaaatacgaaaaggatactgctgcatattgagctaaaggaaagcctgatgcagcaaaaaagggagttgccaaggccgaaaaagcaagaaaaacaaggaagatgaggaagatgaagaggatgaggaggaggaagatgaagaagatgatgatgatgaataagttggttctagcacagatttttttcttgtctataaagcatttaacccccctgtayacaactcactccttttaaagaaaaaaattgaaatgtaaggctgtgtaagaatttttttaaactgtatggtgtcttcttttgtatagttaacacactaccaaaagtgtctttagatagccctgtcctggtggtattttcatagccactaaccttgcctggtacaggatgggggttgtaaattggcataaaaattttaagcaggttcttattggtgcacagcacatgtaagttatatatggggttggtagttttttcattttcaattgtctctgatgcagcttatatgaaacaattgttctgttaactgaataccactctgtaattgcaaaaaaaaaaaaaaagttgcagctgttttgttggcattctgaatgcttctaagtaaattacaatttttttattagttaaaaaaaaaaaaaagatgttatgagcatggagaggctagagccaggctgcccaggtttaattcttggctctaccacctacttagttgtgtgacctcgggcaatttatttaacctctctgggctacagttttattaactgtaaaagatgagtaataatagtatctgtgtaccagagtcgctgtgagaattaaatgagccaaaataggtaaaacattggcactgccatagtcttctctaaggttcatttagggttccttctcattgcaatttcttatcctggttctggaaaggaaatacgaacacattattctctatactttctgattctttgaaggcaaaaatttcttcaagaaaatgttagatgacagtcctcactgtggcagtacattcatgtattgactttcccaatagatgtatctagcaacaatcaacgcactttggaaagccattaatgtgagaggcacgatgttcagtcgtgacagggtagtatatatgtcagtcatctgtctacaagagtccccaaggactcgttgatacaatagctcataatcactctaaggatcagtctagcaatttgcatttttaaaagtccctaactacctattttcacaatagacagtccctgtactcccatagctccagatgggatcactctcctttctaaagagggcattttagcttcctttctgagtaatccttgctttagcattatgaatgaattctcagaaattattgcacaatggacagatctccctaattttcaagcgctccctccccacacataaaatattggtaaatctggccccatttggggggattattttgtttgtttttcattcaatattcctcaagtttggtagaaaactataccaggttatgttttgactctattagtctgccttagtgacctgccaacaatcctgagtgctctggtttggagatcttgcagggtggaatcgccacacagagctccactgcagaagttgtctctgactctaagagagcccatgcatatatggtggcttagagtctaagaatttgggagaccctacagcaagtaccagtccagagcttctagataaagtgaaagctctgagactctatttggggcattgaatacagactcggaaattatcatgtttgacaacctattatgaatgtgctcaaattttttggagttacagaacctttagattaaaaaaaaaaaaacaaaaaaaacaaaaaaaacttggccaggcatggtggctcatgcctgtaatcccagcactttgggaggcagaggcaggcggatcacctgaggtcagtggtttgagaccagcctggccaacatggtaaagccctgtctctactaaaaatacaaaattagccaggcgtggtggcacacacctgtaatcccagctactcaggaggctgaggcaggagaatcacttgaacctgggaggcagaggtggcagcgagccaagattgcaccattgcactccagcctgggcaaaaacagcaaaactccatctcagaaaaaaaaaaacaaaaaacttttgattgttcttctccctgacatttactaggtaagcaactttgggctttaatctatttagatgttagtttcctctttgtgaaatggaaggcataatacatttcccattttaaagtagaaaatcaggttggcgtggtaatcctataatccaagcactttgggaggccaaggaaggaggatggcttgaggccaggagttcaagaccaggctggccaatatagcaagaagcaagaccccctctacaaaataattaaaaaattagccaggtgtgggggtgcctgagatggggaaccgtggaacctttggcagtggcatccagggctgggaccatggccgtgaacagggcctgggccccacagagctcatggaggcaaggctgagggcaaggaatggatgaccaagttgggccacctggtcaaggacatgaagatcaagtccctggaggagatctatctcttctccctgcccatcaaggaatctgagatcactaactttttcgtggggacctctctcaaggatgaggttttgaagattatgccagtgcagaagcagacgcgtgcttgccagcacatcaggttcaagatgtttgttgccatcagggactacaatggccatgttggtctgggtgttaagtacttcagggaggtggccactgccatccatggggccatcatcctggccaagctcttcattgtccccatgcacagaggctactgggagaagaaggcccacaccattccttgcaaggtgacaggtggctgtggctctgtgctggtgcgcctcatccctgcacccggggcactggcatcatctcggccctggtgcccaagaagctgctgatgatggccagtattgatgactgctacacctcagccaggggctgcactgccaccctagggaactttctcaaggccatctttgatgccatctctaaaacctacagctacctgacccccgacctctggaaggagactgtattcatcaagtcttcctgtcaggaattcactgaccacctcatcaagacccacaccagagtctccatgcaggggacccaggctccaactgtggctacaacacagagtttttacataagaaaaataaagtgaattaagcctgtttttggtttgcttgttttttttaagtagaagaccagaggatctcttaatcttaaattctgttcaatatctagtattctgtgatgctataaagatgcatattgatctgtagccagggaactgttttaggctggggagtgaatagataggaggtggggaatttttaaagttattgcgtattagggtattatatataaaattacatattagtgatatataaaattattacatactcgtgagaccaggaatggaagttgaagagcatgatgatttaaaattttttttaattttgtttcttatccagattacagaaaagtaaacactatatgttgttcacaatcacaagtggctgtagaattataaatcttgagagtgggaggatcctcaaaagttcaaccacacaattgttgtgtgaatctcctctgtgacaccattgctaaatattcacccaattatgtgtgaaaaattcaactgaatgggagctgagtacttttggagccaatcccattcatctatgtattcatctgtgaattcttttttatatttggctaaagtctgtttccctgtacagagactgatcactctttaaagacagtgttcaaatttaacaaagaaactcccagttttgtgatatgaccaattggaaattgaatggaaccaaaatctttctcatgtacttttgtgttcagagtctggtcttgtctcaagaacaaatgtagtgaagatgaaaatgctattccaagatagaaaagaaattggattcataaataactttgccagttaaaaatgtgaaataagtagaagaaacaagagaaacagttaaaacttaattccacttggaagtactccttggaaccttaggggtctcctgcagtgccatgcagtaccttcggagcccgattatctcctgctttctcctcctctgccttgttgaaagtccagatcctgaaataaggttggaggatatttctttttgactgctatatttgtagataccagctaaaactcattgggcctaagatttggtggaatcagtaaaggtgatgtagacttaggtactcaaaccccaagggtacacaaacacaagctaaactgctagaatgtattaccctcttgcctcagtgaacagtctctggctcacttcatccatgtggaccttcattatatctctaccctatatccattgtccatttccacctccagggttctgatgtgtcctgagtattagaatgaagaaatgcctctacctcacactttgggtggcatgtagggtctctacactgtctgtttctaataaaacattgtctctgaactcaagctaagggcccacttagctctgtacacacggttccttaggaagattggtttcttcgtcttcttcattttatattcagttgtgtgttacaccttcatatgttgaattttcttcacctgtctctctttctacatatattcatagctctgtctttgcagatcagtgctcacttgaagctttgctactctgtcaacccctctcctctcttcagcctttcttctcccccaaccccagcctgaagcccaagtaaattagcttatcacccctgccccctagttgtaaaaaaattcccgtactcctccaacagtgtctattcttggatttgcagtcagcaaccatctccaataaccatcaggctgtcagctttgcagctccctaccacctcccacctcccccattactcaccagaagaaaaagagagccagagcaagagcttgaaatatatcatgcaatagtgtatcatgaatttgttgtgaatcacagtggtgaagcaggtttatttatttctgagaccttaaatcaatacaaagtaggtctcttagttctgaagctgggatggagtgtgaaaaaatgagcccattgtactcttacaactttggggaaaggagatgacagctatataattccatttaccaggcactaggggctttaatgtgaaggtgacagggagctctttgtgcatttagagcaccatatcttctaaataaaagatctgtagacttgatagtggagcatagctccaagtttaataatctccaagcattagaccgagccaatatgttcccaagtcagaaaggtcccccttaacactcataaattaaaagtgcaagaaccacacgttagtagattagaaatgcaaggactccagtcttttctagaaggaagacagagctgggccctggctgtgcacagactggtctatgaatatgataaagaagcggaaatgagactgtttagaaacctgactcctagctgttcatcattctagggaatgttccctgtgcatggatccaaatctagctatgtcccttctcattcagattggccatcatcacacagtctaatcagctaatgtacacagtcaggaatattgaattatgaaaggagaagcttaaagagctttttagattgaactacagattaccatgcctgggcttcaagattttctggctgatttttgaccggttcctaattttaataatgtctcagtgtctgggatttaagccttctaaaatagtatgcgcgtctaagaaattgagaaatcagtgttggtaaggaaaagaacccacccaaatttaaccaacagcataagatgcaaatatgagaagtcaagaccattggaacatgtaatcaacttttgagtaacttcattttctacctgacccattggtaaaatatgcctttctcaatagataaagcaggtttatgcagctcagaagagcattcctaacataatatgactttatagtacttagaattactagtttaattttagcccatgtaaagaattttgacagggagggagggagaggggcatctacattggggaaaactaaaaaggtaggaaaattgaaccactccttttgcttcagaaagccactacacattataacactaatatgaaagacttattttgcttatagtggtttaacttgctgaacatactaatcggttgaggttttatagaatacatagaaatgtggtagatcacatgcatttattgcatgcctgttaggtataaagctgttcttatgctgtggcaatacaaagatgattcctgctttcatggagctgaaatttagctaaaagacaataataggcctttcatgtgttctaaaggaaaaaataaaat

SEQ ID NO: 96636 - DNA, 14549 bp, Homo sapiens
gaggtaaaataaattttacatggatgatttaaaagatgaaacttaaggatttcttggataactgacctgaggtgaccctgaggggctctgggccaatggcgccccagggaaccaggccctacctgggatgcaaacctaggaaagagggctgggtcagtccatgctcggatggctggaagggccaaatccaagccagcacctggctccatgtggctcctttctctaaactaaaatgcagactaaaataagacgttttcaataagggaagaatgcgttgatgatagctaccacttgttgaaccttaaatatatgccaggcaccctgataagtacatagaaaccctttacatatctattctccccagctctcacacagcccatatgtaaaatactattgttcctgctgtttcatggagaaagaactgagaccagagtacagaggccattcactgggccgttcactgggctgttcactgaagcttctccctcaaggcttctgtaatgcacaggaaggggctctggaaggggcccagccatgggttctcttggtcatgtgttttgcaagttttgcaaagttagttattaatatttcacttgtaattggtttagataggtttcttcatgccggtgtcccctccagcacatacacgttcccagtgttaagtgtcagtgattttttttcttctttttgagaagaggtctccctctgtcacccaggctggactgcagtggtgtgatcttggctcactgcaacctccgcctcccgggttcaagtgattctcctgcctcggcctcccgagtagctgggactacatgtgcacaccaccacgcccagctaatttttgtatttttagtagagacagggtttcaccatgttggccaggaagttctccatctcttgacctcgtgacccgcctgcctcagcctcccaaagtgttgggatttacaggcatgagccaccgcacccggccacgtgtcagtgattttaaggggaaaaggtcattgagttgggcatacaattagtttgaatgagtgagatctattcagatgatttgctaccacttctgtgtatcaagtgctccctgtataggaatgacttccaggacccaggactactcccactgtccacttcgtgactcacccaggggcatggtgacaggggcgtgtctctgcgtatatgtagaggaacatgaacagtagaggaaccccagatctgtagcatgtggagttcaaagctactctggagaattctcccaattatctgacatgtaaaattgttagcagagttgattctcatcaacaaaggtctctcttgtcaggaacatacttaatgtggcctatatacttttaagcacatcatgcattgttttctttttcaatggcaattccaagaaatacaattcactgcagctattgtatctttagggcagaaattaatagtagtgctgtatctaatgagtatgtctatgcgtgaagtggcatattctacacattccaactatcgataatgaaacatttctatcaaccttgctagggaaaaggctgaattatcttttatgaaatcatagccagatgaaaagtcaatcagagccccaaagcacaggataaaagtattgcagaagtgtattggttgataaaaacatgaaatgatttttctttattgtttactgtttttgcggtactttccagctcttcaatatttgtaatttgccgtgaagtatttacattctaaacatcacttttgtacctaattttgtatttgtaattttatatccttcttttcttaaggaaaatactccagattgtataagatttaggcccacaaaacctgaatcgattcttgacagagtaattaagtaacagccgaaatcacagccactaaatggccaagccaggatttgaagctggagttcaaacgtgggcctcaaaagggcatcttggactctaacatgtgcccctggagtcagggtcttgttaaagttcagattctgactcagtagatgtgggctggtgcccaggtgctgtgaggctgctgctctgtgggccacactccgaggagccaggatctctcagctaatgcactctatggccagctctcagacagtgcaattaaccattgccactcagggaggttgtgggagttgcccagagtagcagagtcagaggctgaactcacagctccatcgcccgccttacatggtggcaggtgggctaagtggggaatcccaggagtcagctctgggtccccaagaggaatgtcccttccagcccctgtcccctgtccctgaattggcctgagatgctgcagtcagtctcaagacctgcaaggtgagcaggagaacactggcgtttccattgcgacagacatacctggctgacctctacttgcctggctttctccaccttggtgacagtgctgctcagccctgctaagcgtcaatttccctatgtattaaacgagcttaatatgacccacctcatcgagttattcatggattaaatgaggcattatatgacaagttacacgatccaactctgcatgtattggcctgtagcacccgtggaactggtgattgttgttcctgagctgaactgaccttgggaatcaagtgacttcttcctgcagcatgtactctcagcttccttttttctcaatgtgtgtgaagaagaaactgtgttagaatagaaggacatctgcaaacatctcacacctgcagagggctgaacagaggtaagggcttgatggcagctaattgttccctgacagatgtcagctttgcctgtctgtctctcttaacatgtttgcagctgtgcagcaggctgacagcctctggcattctctttctgccgggtcctcccaaatgcacccaaaatcccagccatgctgcttgatcaccacaggtctgcctgatgacaacaggctgtggtgattttatttgtcatctttagagcatgtgtagcagtatttctttcccagaggcatcagatgtttgtactgcagacatcttttccaggagaaaaggctaatagatgagggcaggctgtatttcctggctggcccaatcctctggagacttcctggtcattagcatcccccagaaggacatgcaccataatggctgcagactctaggtggtgctgccccaagccctgtagcctagagcgtccgacatcagttgcagcctggcctgggtttgggttattttaagctgcccctgcaatgcagctgcaaatccagaaaaagaggactgaggggcctgctcatcagggaagagctcagtaagcacacgttgtcactggcttagagagcagggagacaatataattacagtcattccaagaggttcattctgctgcattgcccttttcaggaacacccctcccatttctttggcgccaatactattttttaaaaaccttcctggtaaatttcaaaatgccactggtaaaagcaaactgcctcacttagctccttggttatttgtttaaaattcagtgtatctcagtagaatttttttatgcaagggattgaagctcctgaccctgccatttgggggaaagggatgtctaagagtagggggaggagctttcaccttcaacccgaggtcctcaactgcattccacacgaagcgttagctttaggataacatgagcacagactgaaccctgagaatgcagtttgcccactcatctattaatttggtgtgtgaattaacaggctttgcccagaaagaggaagtggtgaagctgtgaaattgctttccttggaaagctttgttcagtggacacctgttagtcctgaatggcaggcagaatcctgggttcacaagtgttaattttctaactctgaagctccttctattgtcatttccatccgtctaacttttcagattcctaagtattttttctgcttcattcgtgtatgtattcattcatccattcagtgagcgtgcattaaatgtgaactgtgtgccaggactgcactggacatgggggccactgtcgctgcccttgagcttccaaagccgtgatgggtggatgagcaggggtcagtaggcagacaccgaggtcagtgccactggtagcccacatgtctggggcatgtggagctgtggagcatcacttactgggtctaggggctggcgaggcttcctggagtggtcctagagaaacaaattggcaataattagggaggaagtttagtgaaagaaagagaaaggcgtttagagggaaatttggaaagtgtggccaaggggtgtaccacataaaccctctctccagtcccccacagcttttagtaagagatcagtttcccgagaatgtactgtgggctgggagctctgtggaggatgtgccaggcatggctcggtgctcctgaggctgctgcccccacgtgatacggagaaggctgtttgcagaacagccactggtagcagcacaaagaacaagcgtgaatgggaaacaggtctcaagagctctgcctccctctcgtgtccattcacttcttaataattaccgaatacctgctgcacacactgtgctcgggactggaaaaacagggaaaaccaccgcatcttggcccttttggacctttacataatgatcagcaaatagatgaatctgtggtttgtcagaccatgatggaggaagacagctatggagaaagacgaaggaaggaagtgagatagagcctgcaaggctagggtgagggtgggaggtgccacactgacaggtgacattcaaacagatccttgagggagtggccatgtgggtgcccgaagtaagggtggtccaggcagaggaaagaagcgggaaagccctgaggcagcagtgggcttgttgtgttcagggaaaggcaaggaggggaaggcagaagcagagcagtgggagggagtgggtcggagaggaggagatggagctgggcagtgcatggagggccgggaggctctgtctcgggcaagtttagaagccaatggaggctgtgggcaagggagtggcagatgtgacctctgtttcaatgtgaacacccactgtcaggtcagcgtgggcccacgcttagagcagccaactggtgcctagcaaaaacaaacaaaaagcaaaaaacccagagtctccagaaaccaattaagcaaaaatatttatagaacatctagtacgtgaaggacattttgctaggtagttggttcctctcctgaaggagcaagctttccggatgagttgaagatatgtgcatgcgcgggaggtgatggctcattgcagggcagggcatcatctgtgttgaaggattgccagtgtttcagaaatggacacagagcaggtatgtttgatggacagttaagaggaacactctctatgtgacagcactgttttaagtgccctggatcttctggggatgagactagtgtttttcagtcgtgcatgggacagttgaggatcatgctaggcagaggtgagccctttcctggaaggagttaacctaaaaagcataatctgcctcatctgggaggagcttaataaatctctcttcaatgacgtaatggtcaatcagaaaatttatattttagctgtaaaattacttatcacaatttaccatggggcataatcttagtcaagcacccaaagtaatgatttcaggcaacagatactgaaacaccaaagtgataaggtggcaggtatttcagttagctactgctgcataatgaaagaccccaaagcttagcgacttaaaacaatgatttgttattccttatcattctgtcagctgggagtttcttctgctggcctcacctgggctcatgcacaagactgcatttagctagggtgtcagcttggggatgggcatagctgggatgctgggtcacctgagtctttctctgcatgtggtattgttttaaaatacaggttttagcgctgcctcaggatgtagagtgtaacaagggggctggggtgggcagcgtgggcctgtcaggcctgtgggtgctcgtgtcctccagattcccccgcagctgactccgcagtggtccgctccggttgcctggcgcagatttgagttccgaacagaaggctgtgtattctctgccgcttattgtggcctcgacaggccrtggttactttggccactgccagagcagccttggcactatggaggagcctagggctacccctcagctgtacttggggctggtcctgcagttgctacccagggttatggcagcactgcctgaaggtgtgagaccaaattcgaatccttatggttttccatgggaattggtgatatgtgcagctgtccttggatttgttgctgttcccttttttttgtggagaagttttagatyggttaggagtcggctttatgtgggaagagagaaagagcttgctatagcgctttctggactaattgaagaaaaatgtagactacttgaaaaatttagccttgttcaaaaagagtatgaaggctatgaagtagagtcatctttagaggatgccagctttgagaaggaggcaacagaagcasaaagtctggaggcaaactgtgaaaagctgaacaggtccaattctgaactggagcatgaaatactctgtctagaaaaggggataaaagaagagaaatctaaacattctgaacaagatgaggtgatggcagatatttccaaaaagatacagtctctagaagatgagtcaaaatccctcaaatcactactaactgaagccaaaatgaccttcaagggatttcaaatgaatgaagaaaaactggagataggaatacaagatgcttcgagtgaaaattgtcaacttcaggaaagccagaaacagcttttgcaagaagctgaagtatggaargaacaagtgagtgaacttaataaacagaaaataacatttgaagactccaaagtacacgcagaacaagttctaaatgataaagaaaatcacatcgagactctgactgaacgcttgctaaagatcaaagatcaggctgctgtgctggaagaagacataacggatgatggtaacttggaattagaaatgaacagtgaattgaaagatggtgcttacttagataatcctccaaaaggagctttgaagaaactgattcatgctgctaagttaaatgcttctttaacaaccttagaaggagaaagaaaccartttatattcagttatctgaagttgataaaaccaaggaagagcttagagagcatattaaaaatcttcagacrgaacaagcatctttgcagtcggaaaacacacattttgaaagtgagaatcagaaacttcaacagaaagttaatgactgagttatatcaagaaaatgaaatgaaactctacaggaaattaatagtagaggaaaataacyggttagagaaagagaaactttctaaagtagacgaaatgatcagccatgccactgaagagctggagacctgcagaaagcgagccaaagatcttgaagaagaacttgagagaactattcttttttatcaagggaagattatataccatgagaaaaaagcacatgataattgtttggcagcatggactgctgaaagaaacctcaatgatttaaggaaagaaaatgctcacaaaagacaaaaattagctgaaacagagtttaaaattaaacttttagaaaaagatccttatgcacttgatgttccaaatacagcatttggcagagagcattcctcatatggtccctcaccattgggtcggccttcatctgaaacgagagcttttctctatcttccgactttgttggagggtccactgagactctcacctttgcttccagggggaggaggaagagrcccaagaggcccagggaatcctctggaccaccagattaccaaggaaagaggagaatcaagctgtgataggtttactgatcctcacaaggctccttctgacactgggcccctgtcacctccgtgggaacaggaccgtaggatgatgtttcctccaccaggacaatcatatcctgattcagctcttcctccacaaaggcaagacagattttattctaattctgctagacgctctggactagcagaactcagaagttttaatataccttctttggataaaatggatgggtcaatgccttcagaaatggaatccagtggaaatgataccaaagataatcttggtaatttaaatgtggctgaytcatctctccctgctggaaatgaagtgagtggccctggctttgttcctccacctcttgctccaatcagaggtccgttgtttccagtggatacgaggggcccgttcatgagaagaggacctcctttycctccacctcctccaggaaccatgtttggagcttctccagattattttccaccaagggatgtcccaggtccaccacgtgctccatttgcaatgagaaatgtctgtccaccgaggggttttcctccttaccttcccccaagacctggattttgcccccacccccacccccacattctgaagrtagagtgagttccctttagggttgagtctgccttcaaatgagcctgctgctgaagatccagaaccacagcaagaaacctgataatatttttgctgtcttcaaaagtcattttgactattctcattttcagttgaagtaactgctgttacttcagtgattacacttttgctcaaattgaaacaatagaattataattctcaggatagtattttgtaaataaggatgatttaaataggaatcttatgagtaaattatttccattttattttattctagatagtgttaactattttaatttgattaatccactattatctaaacagtagtgggagttttatatatgtaatcttgcaggtggtgaggttttaaattctaaagtctttgtccttattccaagaactgtatttactgtggttgtagacaaatgtgaaagtaaatttatgcttaattgaataaattatagttgatttaaaaaatatatataggttgcattattcttcaggtatggagagatgaacagatcaagtgtcgattaccactgaaaagatggtttgttactcacagatcccaacagaagggaaagtactatgccatgcagcaccgaatagggaggcagtatggtcagcgagaagataggagtgatggaaaaacatgggcaagagcctttacggtggtttccatgggaaggaatgagtgaggcaaggtgagcagggttaaggttagctattatagtttgagtagtttcagcaggctctgggtataggggctgtccctagttgtctggtacctggccttggggtgcttagggcagaggaatagtggcctagagtgtgtgagtcctgtggaaggctgatgaagtaggcagctgggggcatgagctctcgactggttagtttgtgtgtgaaaagcacgctcaagggcaagttgtttactgtctctaggaattggctaaccctgggagggacagacctgccaaggtcagcaaggccctagatgttgaagtgtcagaatacataaaaagacatggttaatatggtatcagagcctctgtcttcatgtggcctctcatgaagggctctagagtgagctcccttaggggatgtcaaaggccgttcaagacagcagaagccacaaggccacgtaaagcctcagcttggaagttatgcaacatcacttctgctgcatcccatgggtcaaagcaagtcacagatgcaccccagatccctgctcacgttgggaggagaggaacattaaccatgtgggaggggagggtcattgcagttgtttttgcaaacaacctgctacagaagatgtggcttcagagcactgcaaaggcgtttctgaacagaccagatcacataggaagagcagaaagaagtgagttccagctcattcgtctttgctaatgtggagtcagggtatagcttccctttcactgttggtccccagcatcaagggtcagttggatgtttgtccaggagcctgcagggactgtttgtacttctagaggagagttggcatggctttgggttgctgtctctgaaactgccctagggcctgggatcccggggagtgcctgcctgtgctggcagggagcccaggcctgtttgcaaactgtttgaatgcctcagggtcagggtctctcatggacatattattttcttatcaggagttaaaataactctagaacttctcctgtagaaatgcagatgctttattacaatgaaagtaccatttgtaaagcatatgcaattaggccaataacaaccaacatttactccccactttagggcccatgaagcactttctcatatgttcttccttgttctcacagtcacctgtggttaggcctcattatcctagtttttcatatgagaatactgaagctctaggggctccctgtcttgctgggggctcaaaattggcttggggccctaggagttgccctgggcccaagggtggagctatgggagccctacaaagcctgccctgtttcagtgaatcccttctctcccccataactgctcattctgtgtggctgcactcaatagattatttcaccctttgaattagatgcctcagggagtccccttagcgggctaagttaacctttgcagggggtactgacatgcccaggtacagcccagccctgcatgctgctctttgctccagggaccccagcctggtccaccatttgctaggagaagatttcagtccctccagaacacacagcctgtaaggagccacactggctcccagagcccgagccccaagtcaccactgggtacagtgcacgttcctctgctgtgcagtggtggagcttcatcctggtgagtcatttgttctgcgtctaggtgtctcagtgagactcctacctgtctgcttcagagccacaggtgaagccttcattctcaatccgattgaagaagagaaggcggcatcacagctgagttgctctccatcatagaaccatggggcattgtcctcagacacacgctgacattaaccgaggctaatgaggcagagcctctcataatagcattctgtttctttggaaaccaaggtgtagttttttaagtgtcgcatggcccttgattacaatttgcatttcctagcacttattctaccatttttacagggacctgtggcaggcagaggggctctgggcagcttccctgcaggattccacttcctgcttgggtcgaccgcgccgctgcgagggagggcttgccccttgcttccctgctctctgggtgtttcctttgtgaagggagggacctggcatgctagaaagcatctcaaagccctgctgaagaggaactccggcttcccttgggttgctctgaagaaggtgctctccaaatgagagggcctcaggaagacagtggcatctccctgactgggtgagtcaggtgcagctctagccgaggtgagtgggacctgctgtgtccgaggtggtgacagcaggcactgagactgctctggaatcatggctctctgaggttgttgctctgaagtcctgcctctgggccctcgtccagtgtcgtgacagctcttttctctggaagagggaggacagtctctctccctgcacgaactgccttcagcctgacatttcttctcctgcttagggccgttctctgttgactgcttcgtgttgtctgctgtttctcttagctcaatgcttctcaacgagggtgcttttgacctcccccaggagcatttggtaatgtccacagatattttacacagtaactactggaggtgtgctactggcgtcaagtggttggagggcagggatgctgttaaacaccccacagcacacagaacagactcccacagcaattatctattccaaaatgtcagtactaatgaggttaagaaacactactaatgatgatgttcccctacctggtaaataaaattcaaggttttcagcctccacatcagtacagaatgaatgtttcttaattgaaatgcttggagccagaagtgttttagatttaggattttggaatatttgcattatatttgctggttgagcattcccaaactgaaaatctaaaatctaaaatgctccaatgagcatttcctttgagcatgacctttgagcatcatattgatactcaaaaagttgcagaattttgagcatttcagatttttggattgctcaacctgtacttttcacaatatcttgaaaacggaccatgcttatcttttctcttttgatctagagcctccttcttttccacgtccataccatgaattcctattcaagcccagagaaaattattcattactactatgcattagctgctgaaggccaggtgatgttttcccagatctgactcatcatgatcatgatcatcaattatcattatcatcatcatcaacaacaattaccttagggtcatcataagaattgcatataagctagccaccaagcagtcatcagtcatctgcctttagcccagtgctacctgaattcagtttctgtcatcatgtatttcttaatttcaaaataggcagcagcactaaatctggtccatgggctcattaacatcatcatcatcatcatcattaatattaccatcattgtcatcatcactgcaaagcaggcaacaagcagtcattaagctcatgctgattctgatgctgatggtgaatgagaagcagcactgcagaaaaccacctcatgcctagcatcccagggccacaggtgctgtgtgttagattgagtgttcacttgtccagtgtgaatgtatttttgttaagagttattggcctttgagtttctggtgaccagatgcttctttctaaacacacacacacacacacacacacacacacacacacacacacacacacgtggaagactgttggagaaacccaaatggtgtcataggaggcaggtgtgagaagacactttggttgcacaaccaggtatgattctgccagagcagaagaccctatatggttctcttttctgccccagcactgcctcattatggctatgataggtttattgaagctaaagtttgggcattctggggcagcctttgccccacacccacacgagtctttttcatttttcggttgccactgaagtctggaaatagcactctgccttttcctctggccccatagaaaccgggacttctgggtgtttaacttagcatctgactccattagatgctcagggtctcctgcacttacacctagggataggaaaaaggggtgttctggggagagtagggggagcagtttgccctctatttggtggctttccttgtacagtggagagagcagccagaacctgaagtgacaactgagacatcgtcatctgacgtagagtctctcttccctccctgacctcgttggtgtgccacctctccctccctcccatttccaacagcatgcttaggaatgagttatgaagtgtcttattggaaaccaagacctcaatggcaatgaagggaagacactatagttagttattattgatcatctctacctgcactttctatatttgcaagcactttttgggacttagtgagtaataaataaagtgtctctagatcaccttgctgcttcccactgctgctgcctcgtgcatgcagttctagttgtgtacctcctggatacacacactaaggaggtgagaccttcaaaagaaatgcaaaatatttccacaattgtgtttgtgtacaaactgacctgtcaaaaccaaaactatatttaggtactagattataatcaacacccccagtggatgctattggtgccttgcccagggcccctttaccaggcggatgcactcatctcccagctttgagtattgctcaccgcagccacctgcttcctgaagaattgcccttgcagagcagaagccaccatgctaggaagttatccactccctcggcatcacatagccaataaccgattgctgtcagggctgtgttagttatctgtttctcaaaataaattactccaaaacttagtgccttaaacggacaatgaatatttgttatttcacagtctgtgtgtgtcagagatttgggagcagcttagcagaatggttcccgtttgggtttctcaggaggttgcccacagactgtccatcagggctgcaagtgacctgcaggcttgactgaggcaggtggccttgcttctggggtggctcactggcctggctggcaaggtggggctggttgttggcagaatgctcagtccctctaaccatgggactctcccaagttcagcttctagagtagctatgataacatactttctataaaacctatattctaaaatgtatttaataaaataactttcctctaatttttaaatctgcaacattgcagcagttcattttagacattgagaggctgaacattttagattctggttctaaaggcatgtgggtgccctcaacatcaatagcagcagctaataattcccaaagcttttccaggcgccaggccgtgagaagggcaaaatgtgttgtgattctgttgaagtaatgcctaccaccccttcagtcccacactgaaaatgtaacaaggcaactgggaaactgt

SEQ ID NO: 96637 - DNA, 13559 bp, Homo sapiens
aaaccgtggagagtcttacacgcagaaactgtttcatttccctgtactccacagcaccttgtacgccttacatgtagcaaatgtttaaaaaaaaaaaaaaagtctgggccgggtgcggtggctcacgcctgtaatcccaacactttggaaggttgaggcgggcagttcatgaagtcaggagttcaagaccagcctggccaacatggtgaaaccccatctctactaaaatacaaaaattagccaagcatggtggtgagcacctgtaatcccagctactcaggaggctaaggcaggagaatcgcttgaacccaggaggcagaggttgcagtgagccgagatcgtgccactgcactccagtctggacaatacagtaagaatccgtctccaaaaaaacagtttgctataccatctcacctctccccgaagacaaacaaaaactgaccatccccttccgaaacatacagaccatactgctggccttcggtttttcacagcttaaaacacctcatctgaccattaccaaaaagcatctgctacccttgaaattattccccaacccccctgggtcttgttcccagatgtaaaaggaaaatcttctaatctgaatttttacctctcacctggctccccacttcacatccccaccactcaacttagggtaaccaaaggaagtctcccctgcaagtaatgatttgtaacttcctcccctattttctcactttcactcccacaccacaccaaaaactaaacagaactgatcacagcagcctaagaaaaacttaatcaattttaacattctaagatctgttattgaagtgctatgtggatgtttaacccgactctgattacagagaaaggactgtgaagcacttaagagattagagcaagtccagacgctctctaccagttatctgttggcaaataaagtaagatggctgctggggcccacaagatggctggggcccataaaatggccgctagagactaaaagaccacctcctctgccccaccagacacacaaagctgacacagaatctgtaccagtggtgcccgaacccggcaatgcaaaataatcgcaatagtagacaagttttatttttgagatgaagtgttgctctgtcacccaggctggaagtgcaatggcgtggactcggctcactgcaacctccgcctctcgggttcaagcaattctcctacctcagcttcctgagtagctagctgggactacaggtggccaccaccatgtctagctttttaggctgggcgcggtggctcacgcctgtaatcctagcactttgggaggctgaagagggcggatcatgaggtcaggagattgagaccatcctggctaacatggtgaaaccccgtctctactaaaaatataaaaaaattagctgggcgtggtggtgggcgcctgcagtcccaagtacttgggaggctgaggcaggtgaatggcttgaacccgggaggcggagcttgcagtgagccgagatcccgccactgcactccagcctgggcaacagagagagcctccatctcaaaaaaaaaaaaacaacaaccacgtctggctttttagtagaggctgggtttcaccatgttggccagactgcaaagttttagaatccaaaaaaatacactcttgggccttgctctaaccttgtaaatctgaaaatcccatgggatgtgtatttgtaaatatctgcatgagtctgctgcacagccaggtttgggaggcactggcctgcaggactaaaagcaggaagaaagaggccagggtggctcacacctataatcccagcattttgggaggcccaggtgtgtggatcgcctgagcaacatagcaaaaacccatctctacaacaaatacaaaaaaagttaggctgtgcacggtggctcacacctgtaatcccagcactttgggaggccgaggagggtggatcacaaggtcaagagattgaaaccatcccggccaacatagtgaaacctcacctccactaaaaatacaaaaattagttgggtgtggtggcgtgctcctgtaatctcagctacttgggaggctgaggcaggagaatcgcttgagcctgggaggcgaaggctgcagtgagccaagatcacaccactgcactccagcctggtgacagagcaagactccatctcaaaaaaacaaaaaattagctaggtacggtggtgtgggcctgtagtcccagctactcaggagactgaggtgggcagatcacctgaacccaggaggtggaggctgcagtgtgagccataatcacagacactgcactagagcctaagtgatagagtgagaccctgtctctaaataaataaaagcaggaattaaagaccctcacctgatgcaaccatcaaatgtgcctggcttgaatgggatgccctggcccatatcccccagcagcaggtctccctctatctctcggtccacagcctcatctacattagagaaaaggcagtcagagaaagagaaatacctgtggcttctccacacccatcagggtaatccaccctggtgccagacaggacatacttacccagcatggcagggctgatatccaggcccacccaatagtgcccttcatctgacagataacttccactcagcccagtgccacagctggaagacatgaccagacactcagggtcagtttacaaagacacttcaccaccttagacaatctgaaccaggccccagaatctcacccaatatccagcaggtaacagggcttattctctggcagataaagaagctccaatgctcgcccagccatcctggtctggatatcaatcatccgtgagctggtaaggcagaaacacaagtggacatggtaaaggagttctgggtgaatacttcccccagaccaaaaaacaaaaaacaaaaaaaagccaagttaaaaacaaacaaaaaacggatcaatcatcccgaggtactcttttctgaccccttctaagttgggatcaacaaattcaaccattcgaaagtgaccccaaaaattccatgtaattcaggaccatgttattttgtggtaacaacttatcattgcaccagctgccaagcagatgtgtaaaagcaaatcacttagctagtaataaacaaccactgggatctgcaactctattaggctgggctgctctagcacttgttgaaaacattttctccaaaaattattctccatagtttctctcatctagaaggatcaacaatgcacaaaaacctacagcagcactgtctgtgagaaacagaatgtgagccacgcatggcttcccaatagccagtgaagaagaaacttaaagaaacaggtaaaagaaactggagtcatattttttttttttttgagacggagtcttgctctgttgtcgcccaggctggagtgcagtggcgcgatctcggctcactgcaagctccgcctcccgggttaatgccattctcctgcctcagcttccccagcagctgggactacaggcgcccgccgccacgcccggctaatttttttttttgcattttcagtagagacggggtttcaccatgttagccaggatttctctatctcctgaccttgtgatccgccagcctcggcctcccaaagtgctgggattacaggcgtgagccaccgcgcccggcctctggagtcatatttttaaccccatatatttaataacgtatttccattaactcaatatgttcaaaatatcacttcaacatataatcgacataaaaagtcatcagcaaggaccgggcctggtggctcacgcctataatcccagtactttgggaggccaaggcgggtggatcccgtgagcaacttaccagatccctgggcaacatagcaaaactccctctccacaaaaaaattacacaaactagtcgggcgcgaggaggcgcgcctgtagttccaactacccgggaggcgaggttgcagccactgcagcacttcggcctgggcgatagaatgagagcctgtctcacacgcacaaaaaattatcaagctatttcagccggtgtggtggcgagtgcctctagttccggctgctggggaggatggcttgaggctgcagtcggcagggatcatgccatggcactccagcctgggcaatagagagaccctgtccctaaaaaaaagaaacagtatccaatagctatttatttatttattgagtcagggtctcactctgtcgccaaggctggagtgcagtggtgcgatcgcagctcactgcaacctctgcctctcaggttcaagtgattctcctgcctcagcctcccgtaggcccggctaatatctgtattttcagtagagacgggatttcaccatgctggccaggttggtctcggaattcctgacctcaggtgatccgtccacctccgcctcccacagggctgggattactggtatgagccatagcgcccggccagtaaccatttactgaaatagggctagtctctcagtgagagagcacggaaaaaccacaaagtatctttttttttttttttttttttttttgaaacaaagtcttgctctgtcgcccaggctggagtgcagtgccgtgatgtcggctcactgcaacctccccctcccgggttcaagctattctcctgcctcagcctcccgagtagctggggttacagaaacccgccatcgcgcccggctaattttttccatttttagtagagctggagtttcgccatgttggccaggctggtctcgaactcctgacctcaggtgatccgtctgcctcggcctcccaaagtgttgcgattacaggcgtgagacaccgcgccagcttccccccgcccccatccccccccctttttttttttttttaacgactcgaggtgcgctggctcacgcctgcaatcccaacagttcgggagacgaaggcgggaggatcgcttgagccctgggcttgggccaccttgggcaacacagcgagaccccatcgcaacaaaaatttacaaaaaaaagccaggcgtagtggcgcgcgcctgtggtcccaactactggagaggcagaggggagccaccacacccggctaatttttttattacttgcggagacgggggctcgctacgttgcccaggctggtctcgaacccctgagctcaagcgatcctcccgcctcagcctcccaaagtgctgcgattgctgagattacacgcgtgagccactcccacctggctacaactcagtagttatacaaactaccctctatgaaattcagacaataatacaccaactgctgtcttggagatttattggcaacaaggcgccacgataagcatcctacggccattacttccttccccccaccaggactgacccctcgcccgtacccaccgcccagcgcctcttttaccacatgtttaggacaaattgtcacattcgactttgaaaaccacccacggaaagcaagcgcgatcacccctacctcaacgctgaggtaccgaggcccagagaggtcggcaacttaaagttgatttaccagagacagaaatcggcacccacccgggtccttcccttcccgcacccccaaattctacggcctttccgggcaacgccagcaacaggggcaacttgccgcttcccgacccccggacgccccgcagtattcaggctcccctcacttgcgaacgtatttccgggcttctgtctcgtcataaaactgcgaaaaagagaaaatggcatgtagaggaataattcagacgcggtggccgcagaagtggggagaggggtgtccgcgggccccgggacttaccagctctgggggtccgccatgctccggacgccggccgcgggacgccattctcacgcctcagcagcacacctgcgactggcgcctgccggcacccggtttttatgtcatcagcccggcgaccgcttagtaatacgcatgttccacccccacgaccgccccgcccccccctttacgtgactggccacagggcgaccaaccgactcctctcattggccggtttctcttgcaccgcctgccgaatcaattcaacatggcagccatgcgctggcgatggtggcagcggstgttacyttggaggttgctgcaggcccgtggctttccacaaaattctgcacccagcctgggcctargagcgaggacttattcccagggcgactgctcgtattcgcgcacggcgctgtrtgatctgctcggcgtcccctccacagccacgcaggcccaaatcaagrcggcttactaccgtcagtgctttctctaccacccggaccgcaactccgggagcgcggaggccgccgagcgcttcacgcgcatctcccaggcctacgtggtgctgggcagtgccaccctccgtcgcaagtatgatcgcggcctactcagcgacgaggacctgcgcggacctggcgtccggccctccaggacgcccgcacccgaccccggctcgccgcgtaccccgccgcccacctctcggacccacgacggttctcgggcctcccccggcgccaaccgcacgatgttcaactttgacgccttctaccaggcccactayggggaacaactggagcgggaacggcgcctgagggcccggcgggaggcccttcgcaaacggcaggagtatcggtccatgaaaggcctccgctgggaggatacccgagacacggctgccattttcctcatcttttcaatcttcatcatcatcggcttttatatttaatcggagagagaagggaaggggagtgtccccagccaaccccccagaaacggccttttttcctgcctctgaacccttggccrttgatagtctacctttgctgggatccgaaggaactgtactccccctgccctccccgacccgcccagcttagccgatgacctgcacatcgctccactgtggtccagaaaaggaggcctttcgatgtctgagaaagaggccccacgctgtagagtcccgaaagcccaggagtgaagggggttcctggagtctctagggtgcttcttccagagtctgtcttcttgcttccagatgtggtcaacttctggaacactcgctgtagctttattgtttagccccaagcaagatttatctcctcctgccccgcatgtgtatggtgggcctctgtaaccttgaaatgtgcaatgtgaccaattgttgactaccaaaagaaaaggtctggggttgtacgaaacttgtctttctgtgacttccccaagccgcaggtgagacctggtccagggtaagaatgggatcggtggagagcctgtcgttcctcccgctaaggtcagccccytggggcactcctccttatgttgatagcatgtaggagtgagaaaaagtcattgagcataaggaatgagtgttcctgtgcccatatttaatgtgtgaccttggagaagttactctgtaggcatgacagcagaggagaaaatcatttggcatcttgaggtctgtcatgctttattatccatagtttttggggggttttttgttttgttttgtttttgagatggagtcttgcgctctgttgcccaggctggagtgcagtggtgcgatcttagctcactgcaacctccacctcccgggttcaagcgattctcctgcctcagcctcctgtgtaactgggattacaggctcccaccacacctggctagtgttttgtatttttagtagatacggggtttcaccatgctggccagactgaggtctcgaactgccgacctcaggctgtctgcccgtccagcctcccaaagtgctgggattgcaggcatgagccactgctcccggccctattatccatagttctaatccacagggattacagcataatgctagcagggccaggttcatccttgagacagtgtggctggctgtcacctggtcctccctttaccagccagccccattgcacactgtgcagcccatcccctcccagaaatagagtgacaaactctgcacttaagtcccctgtttctgtttaacttgcagtgcttatcacaggcccttccttaattttttaaacaaggctgcttgaggctggggtaaattttggggctttgggagtacacaggactactgagggacggggagttggtggcttggtgttcatggtggagacttggttctttacgcagagcaggctaaaggcgtgttttttctgctctgtttctaattcatgttaagtagttggtcatcactttggtcagagctgctgctgaagctctcttaactgtgagtcactggacgttggcagggagttggctgtgagattgtaggtgctcaagtgtttctgttcgggactgagtgtgaatctgtaaaaggggaaaatcctcgcaagaggtctacgagaaggatgagggcccaagtctagggtctaaacaaagccaggagtggtttggtatattactgagtgcaatcattgcgtgccattcctgcactcaatgtattgtgtaaaatccttaggtaaaatgggataaacccacagctggtcctacttggcctcttgaaaaccattccatcattgtgccaatctagcctgaaaaggaaaaaaaaaaagggaaaccattgattgtctcttgcctcggaggttgggggtatgcccctactccaggctttgcagtgatcatatgatgcagtaatgaagatctggggcctggcacaacactttgggatccacccaaggcgggtggatcacttgacctcaggagttggagaccagcctgggcaacacggcaaaaccccatctctacaaaaatcacaaaaattagccgggtgtggcaagtgcctgtagtcccagctactcaggaggctaaggtgggagaatcgcttgagcctgagaggtcgtggttgcagtgagctgcgatcctgccactgcattccagcctgggctacaaagctagaccctatctcaaaaaaaaaaaaaaagaaaaagaaaaaaaagatttgagcccaatctggttcagacctgtttggctcagtgagcctggacttgggggaaggggatatgtactttttaaaagaacatttattgttactatgtttcatatttagaaaacaggacagagacttttttctggaaaaacaaaactgcagcaagtggagtttcttttttctggaaaaacaaactgcacgaagtggagtttagcaaaatgttctgaaactagtgcttctcaaccagtaaagcaggcacgacagaaacagtggggcaagggctttttgttctagtgaaacaggtggcctcctttcgatgtgggtttgtaaagcactagtggtctaatagcatgggctccttgagatagacctctgaagtttgttttctcagtcaagatcccagccaggaacgttccctgtgagcccccgaatctggggtacatagaaaattccagaaggttcagactgggggtgggtccagactaaggtaaacttctgggacattccatgaaactctaagcaaagtattctataaggtttactaaccatcatccaatcctaagcctctcccctgactcagcacaaggcctactccgtaatgtcatccctttatgcctcagggttttgtaggccagagctaatgcctgagggaccccactccctgcctgccctgaaactgagcctgtgctcttcatggaaaggaaaatgtgtgggaggctttttgaaggacccccaaaaggttcccatggtcacattttccccccacccactcagattggcttgagtcttttctttctctgctgctacctggcaagtggaggctgaactcggccatgaccttagcccctgccttctaggggctattccataattcctggttgtggaggatggctcagacatgcccagccttaatcctttttctttttcacaaactgaaacaaaactccctagaagtttggacctaggatgggagaatagggtaaaggggcccagcctggcccaggctgtgctcagtggggtggggagggggttactggtatagcacgaggccgagtgagccacaggcgtggttcctaaatggggagacagaggccacaagacaggaaccaaaggcgcacaggtctaggtaattgtggtggtgtctttgggcttgaatgggactttatttctcctgagccaaactgctttttcccttctgttgccctttatttattgctgggtgagatgaccctttacagatcccagtgttgaggaagtaggctttctccctcttccttctgaggttccggcatttcattcattgagtgcacctctgtatgagccaaattgattaggaatagcttaccttaggccacagagctgtcctactgggtcacgattgacttggagtggccaccaacacacccttttttggaaatggaagaggtctgtgtttcaaactgttgggcttcctggaaggtcgccagaccctgtgcaaacaggctgagagagggacggctgataagtggtggtgctacctcagtccacactctggaattcagtgcactagaaaagcgggccctgtcctggcctttgcctcctctcagttcctcagcgccatgatgaagtcacatgctgccacctgcccatggggaagatcatgagggaaagcccagcacaatggcacacacctgtggtcccagttacttgggaggctgaggcaggaggatcgcttgagcccaggagtccaagactagtgtacaaagatctcgcctatgaatagctactgcactccagctgggcaacacgcaagacctcatctctaaaaagaaaaacaggccgggtacggtggctcacctctgtaatcccagcactttgggaggccaaggcgggcggatcacctgaggtcaggagttcgagaccagcctgacgaacatggagaaaccccgtctctacttttaaaaaatacaaaattacctgggtgtggtggtgcatgcctgtaatcccagctactcgggaggctgaggcaggagaatcacttgaacctgggaagcagaggttgcagtgagccgagatcgcgctattgcactccagcctgggcaacaagagtgaaactccgtctcaaaaaaaagaaaaacaacatcatgggagaagacctaccttagcctgccctcagcagctcagctccgaggtccagcttgcagccgtcgtggttttgtgcaaagcagctgagtgtccctctgttaatgtgtgcaaaccatggtgagagctgagcctggatctcaagaccttgcgtaggccaaacatgctcaacacatgcagagagctcatctctcactatctgtcctgaagtcacagcgtcgctatggatctagccacctcaccagtgtctcttaaggctagggtcctgtcactagtcttgtggtgggttggctctcccatcctacccttgtcccttcaaaattcacatcctcagccctgagaggggacagccactttagacaaaagaaggcatgtttcagggcctggcacggtggctcttgcctgtaatcccagcactttcggaggccgaggcaggcagatcacttgaggtcagaagttcaagaccagcttggccaacatagtgaaaccctgtctctactataaacacacacacaaaaaaatggccgggcgtggtggctcccacctgtaatctctgcacttcgggaggctgaggtgggcggatcacttgaggtcaggagttcaagaccagtctggccaacatggtgaaaccccgtctctacaaaaatataaaaattagccgggcatgatggtgggtgcctgtaatcccaactactcaggagctgaggcaggagaatcgcttgaacctgggaggcggaggttgtagtgagccaagatcgcaccactgcactccagcctgggcgacagagtaagactccatctcaaaaaaaaaaaaaaacattggctgggcgcggtggctcacgcctgtaatcccagcactttgggaggccgaggtgggcggatcacgaggtcaagagatcaagaccatcctggccaacatggtgaaaccccatctctactgaaaatacaaaaaattagctgggcgtggtggcgtgcgtctgtagtcccagctactcgggaggctgaggcaggagaatcgtttgaacccgggagacagaggttgcagtgagccgagattgtgccactgcagtccagcctggtgacagagcgagactccatctcaaaaaaaaaaaaaaaaaaaaaggcatggtggcgcacacctgtaatcctagctactcaggaggccaaggtgggaggatagcttgaacccaggaggcggaggttgcagtgagccaagatcatgacgctgcactccagcctgggtgacagagtgagactccatctcagaaaaaaaaaaaaatggcagggaaggcctgtttgaggagtacaaagagcagactgggatttggggttcataggccacagtcaccttgcagatagtatttggctggcacagtgtcctaaaacaactttacccaacattcaaaatttgggcataaaaaccgattttttttttgaggcagagtcttgctctgtccccccaggctggagtgcagtggtgcaatctcagctcactgcaacctccacctcctaggttcaagtgattctcctgcctcagcctcccaagtagctgggattacaggcacatgccactacgcctggttaatttttgtatttttagtagagacagggtttcaccgtgttggccaggctggtctcaaactcctgacctcaagtgatccaccctcctcagcctctgaaactgctgagattataggcatgagccaccgcccccataaaaacagatttctaatctctcaaaaaatgagaaaatctgccaggtgtagtggctcatgcctgtaatcccagcactttgggaggccgaggcgggtggatcatctgagatcaggagttcaaggctagcctgaccaacatggagaaaccccatctctactaaaaatacaaaaaaatcagccgatgtggtggtgcacgccggtaatcccagctactcaggaggctgaggcaggagaatcacttgaagccgggagggagaggttacagtgagccgagatagcacctttgcactccagcctgggcaacaagagtgaaactccatttgaaaaaaaaaaaaaagaaagaaaatctgccaccattcagttcacgtacctgcattagcgctgtgggagaagctcagtagcatttcccctttgaggccaggtgcggtaatgcacgcctgtaatcccagcactttgggaggccaaggtaggcggatcccttgagcccaggagttcgggaccagcctgggcagcatggcaaaaccccatctctacaaaaaatacaaaaattagccaggcatggtggcacgcacctgtagtcccagctacttgggaagctgaggtgggaggatggcttgagcctgggaggttgagatttcaagtaagctatgatcacataactgcactccagcctaggtgacagaccaagaccctgtctcaaaaaaaaaaaagacaacaaaaaaaatttcgtccatttagatgagacatcactccccaatttgctgcacttccaccaacaggggtgaagtgtaaaacgccttttatctacacact

SEQ ID NO: 96638 - DNA, 12388 bp, Homo sapiens
aggaaatgcctgatgcctggggccagtctcagactcgccagataataagaatcaattttcttcatttttttaagggcaatctcaatcagatactcttgatatgttttagatttcttttgtcagtttatatgcggagtgtttaaagaagagacaacatggcttgtgggaaaaggttggccttttaaattacagatcactggtgtttaaatgtgggctccccaaagaagtgacatttgagtcaaaacctgaaagatgataaaggagttaacttgaccaagaagaggggggagaactttcaggcagaaggaagaacatgacaagggccatgtgataggagggagcatagtggatccaaggatagaaaggaggccagcatggcaggtgtggagaggtgagcagggcatagtgtgagagaggctacacagataggcaggaaaccctgcaaagaagtcaggtagaccatttttgggaaatttaagatcctctcaagaacagtgggaaactgaccattaaggggattcaggcaagtgcacaggtagtgacatcagaatagcatgcacagcctatgtcctgaatggtattgcctaggttttcttctagggtttttatggttttaggtcttacgtttaagtctttaatccatcttgagttaatttttgtataaggtgtaaggaaggggtccagtttctgttttctgcatatggctagccagttttcccaacaccatttattaaataggaaatcctttccccattgcttgcttttgtcaggtttgtcaagatcagatggttgtagatgtgtggtgttatttctgaggcctctgttctgttctgttggtctatatatctgttttggtaccagtaccatcctgttttggttactgtagccttgtagtacagtttgaagtcgggtggtatgatgcctccagctttgttctttttgcttagggttgtcttggctatatgtgctcttttttggttccatatgaaatttaaagtagtttttttctaattctgtgaagaaagtcaatggtagcttgatggggatagcattaaatctatacattactttgggcagtgtggccattttcacgatattgattcttcctatccatgggcatggaatgtttttccatttgtttgtgtcctctcatacttccttgagcagtggtttgtagttctccttgaaaaggtccttcacatcccttgtaagttgtatgcctaggtattttattctctttgtagctgttgtgaatgggagttcactcatgatttggctctctgtttgtctattattgatgtatagggatgcttgtgaattcatgactaaaacaccaaaagcaatggcaaaaaaagccaaaattgacaaatgggatctaattaaaccaaagagcttctgcacagcaaaagaaactttcatcagagtgaacaggcaacctacagaataggagaaaatgtttgcaatctatccatttgacaaagggctaatatctagaatctacaaagaacttaagtaaatttataagaaaaaaacaaaccccatcaaaaagtgggcaaaggatatgaacagacacttcttgaagacatttatgcagccaacaaacatatgaaaaaagctcatcatcactggtcattagagaaatgcaaatgaaaaccacaatgagataacatctcacaccagttagaatagcgatcattaaaaagtcaggaacaacaggtgctggagataatgtggagaaataggaatccttttacactgttggtgggactgtaaattagttcaaccattgtggaagacaatgtggcgactcctcaaggacctagaaccagaaataccatttaagccagcaaccccattactggatatatacccaaaggattataaatcattctactataaagacacatgcgaacgtatgtttattgcagcactgttcacaatagcaaagacttggaaccaacctaaatgcccatcaatgacagacaggataaagaaaatgtggcacatatacaccatggaatactatgcagtcataaaaaaggatgagttcatgtcctttgcagggacatggatgaagctggaaaccatcattctcagcaaactaacacaggaacagaaaaccaaacacctcatgttctcactcataagtgggagctgaacaatgagaacacatgggcacagggaggggaacatcacacactgaggcctttcagggagtgggggaccaggggagtgatagcattaggagaaatatctaatgtagatgatgggttgatgggtgcagcaaaccaccatggcacattatacctatgtaacaaacctgtgtgttctgcacatgcatcccagaacttaaagttaaaaaaaaaatatcatacacagatttgcatttttaaaagaccactcaactctggttggcaactgaaacactgactcctcagggtgtcaggggtggcagcagcactacaaaaccttagttttgtttcctttgggactaagagaaatctgcagaaattgaagagacaaataagagccaaacaataaaatattcacaccctaataatgcagcagcctactgaactctagaaaatggactaaaggacagcatggtatctaatagcagctctgacaattactagttgtttgaactggggctagttactttaatgctctggcttgtttgcctatctataacaaagggttaacaatatccaccctttcccaaatttgtgaggattgaatgaaataagaacgaattttgcaggtaaaggataagagaggggcactccagggagttggggcaggacaagtaaagaaatctaagaggcaggtaagtgtagggtgtgtgtgggtgaatcgtgagaagttctgagcggcttatgtaatacacgcatacactttagcaggtgtggggatggaatgtgggaagagggaaggggcccagcctttggagattgtgacttggggtgatattggaggctttgcaggcagaaggaggccagcaaaagtctttcagatgaggatgaggtggccaaagcagttcttgagaaagatgaattgagtggtggtgtggagacgggttgaaggggtagtagaggtgggtggtgaagacagcaatgagcatgtgctgtgtccaggcagaaggggtgcgggcttgagcccaggcagtgagaatgggaagggagggacgccaggagcaggtggtatttctgaagtaggttctggagattgattgaatgtgggaaatacaggagcaagaagcaaggacaacactcaggtttttattagggaatctggcagatgatagcattattaaagatacaatgagaatacagcaagacctcatctctacttttttttttaattagctgggtgtggttgcatgtgcctgtagtcccagctactcaagagactgaggtgggaggattgcttgagcccttgaattcaagacagtcctagaaacatagtgagaccctgtctgaaaataaacaaacaaacaaacaaaaagatacaatgggagaaggaaaaaaaatgaagaggaagttaataagtgaggcttgtgcctgtaataaagaggaagatacctgtaggttacagaagctgacatgacaattacggcagattgaataatggcccccaacatgtccacatcctaatcagcctgtgaatacgggacctttcatgacaaagggactttgcagatgtgattcagttaaggatctgtggatgggaagcttatctggacacagccagtgtaatcataagagtccttataataaaggggcaggagagtttacagcagagagaaggcgaggtggcagtagcagcaggggtcggagtaatgccattgctgaagagggctgtgagccaagtactgtgggcaacctctggaaactggaaaagggaaggacatagatgactcctagagccctgcaaaggaacgcagccttgctgataccctgattttagtctggtgaggcccatctgaactctgacctttagaattgtaagatgcatacatttgtgttgttttaagccacaaagtttttggtgatttgttacagcagcaaaaggaaatgaattcaaacaagttcttatgctttttctcagctgttcctcaaggtacggggaggaaagcacactgctgctgagtaactgctgtgccctgggcctaggcgacatacctcacagacattatgtcctgaaaagtagagattattcctcctatgtttttaaagattatgtgaccagggctcaaatacatgcagaaacttgtccaaattttcatggtctatgggtgaaaggacagccagcattctaaggaacaacatagctactcttaagacatagaaaagcaaactttcattatataaaaaagacatatgaacatgcaggtttttagcagcacaattcgcagttgcaaaaatgtagaaccaacctaaatgcccatcaaccagtaagtggataaagaaaatgtggtatatatacaccgtggaatactactcagccataaaatggaatgaaacaatggcatttgcaacaacttggatggagctagaggccgttatcctaagtgaagtaagttaggaacagaaaaccaaatatcacatgttctcatttataagtgggagctaagctatgaggatgcaaaggtgtagaaatgatgtaatggacttgagggactcagagggaagggttgagggagggtgagggagaaaagacaacatatggggtaccgtgcacactgcttaggcgatgagtgcaccaaaatctcagaatcaccactgaagaacttatccatgtaatcaagaaccacctgttctgcaaaaattattgaaacaaaatttttttaaagctaactttcaggataaaactagtcttttttgtctcatatttgggtcttatccctccagcttttggttagaggattaaagagggaaaaaataaaaaaattgacaaagttgtctgaccggcagattaagtggagagtcatcccagatttcttaaattttaatctcattatgtcttcacaaaacaaagcagaataaactgcagaggcaggttgcgcacactgttggctcatcttatgatgaaggtggtgttgagacacttctgtgcattcatgagcttcaggaataaaatttgtagaaacagccccaacccactatcatcaacatgggtggggaaggacctatttctctaagatttataattccaggacaactgcctcaaattctccaaactttgcagtgagactcactaattcttctcattgtaagttgcttgattaatcaccccgaactgattaaaattctagggaaagttattttgctgcctaaacagtttaaagcagtggttctaaacctctttcaggtaacaggcccctttgagaatctaagagcagttatgattctgcatttcagaaaaatgccaacacacaggaaaaaagggaaaatggcaggaggctaatagaccttcttcagccatgcatagatctggaagaatctatctgttgctcaaagtctttttgttttttttggtcaaagggatttggaaaatacttcttttctaggtatctcagtaggaactttactctctcaaaccataaatttgtagtgccttacataaaaagttacaattaaatcaacataaatcttttgttttaataaataaagcacattcatggcttagattttagatcacatttatagatgaggaaaatttctaggcccaaacagtaacagtgaagctactactgctggaaggaataatgtgccacctgtgtcttaaatctcaagagcagagacttcagggcagagaacaccatacacatcacctctagactaggttgctgggagccagaggaagatcttggtgaagtgcatgcagccaccatctgctcccatcacctaatgctgcagaaccaactggagctgtgctactttgagataaactagaggtgggttcctgatcatattacatgacactctctcccattgttagcaattaggcaarsacattagtgacagaggggcatccactgaaaaagacagagcaatactcgaacagcaaagaggaagccacttagacattcttgtttcttcaaatatcagaagcttccacatcatagcaggagggctagggatggacttcacctcccaaaagctgttggcatttggaccaaacaaggctccccggacttctggcatcatctgctggcctgagatccagtcggcttttcagggtgttggaaacctttatttyacaatccccaktgtggatctcaactccaccaamtatgtcctcaggcaggtaggactcctgggcaattgggacatyaacaattgtctgtggtggggattttgtacatagagactgcctttgcaccatagtttttaccggagggaaatcttatttcctgcaatgaacagtcatttggggctctgacaattggtataaaccctggaggaccagtccatccagcagcacttggtacctgggtgtatcttttaccaccttgtgaaagtttattttgaaccataggctctaacgtgtgaaataatttcttggatgtaggcttctctgggtaagttactagtccctcagaactacagactcattagctgtgtagtcattttctctaacttaagaactaaaaatgtaagtttaatatcttacagtatagtatattcattccaaaaaatataataccttcactgtgtcagatacctcctaagtgctgggcatgcaaagatgatacagcagggtgcttgccctcaaggaggtcagggtcaggtggcagagagaaataagtgaagataaactgcagtgcctcctgagaagtgttttcatagagttatggttagcaagctgtgggcacacagatggggaaaaccaatatgattggtcttgggaaacaagtaggtttcccagaggtatgctgtcattaatcactgctatactcccttttaactcatgcaggaatatgtcttgaacaaccagggaccatgattttaattgatttattattagcctttcacttcttggagttcaagaatatctcttgaatatggatatctaagtatctgtattgtactatctattggatatctcttttgcatgtctgagcaaattctagagatatggtgagtttaagaacttaaaaataagttcagagataggacctgtctttgtaacaggaatcagaataattagaaggtggaatttgaattaggtcttcaaaaatggatggaagttggggagaataatggtgatgactaccctaactaggggagagggtttagagagaaacagcattgcccaggcaggtctgggtcaattgctttatgtttaaagcgatagacaatttggggggcaattatggttttttcagcagaggtgggttataaaggaacattaaactggtaaataaattgctcagagtagggggagaaattggagaatatctaggaggcattggtgggttgcacaaagtaagtgatgggttggggcctagactagggaggtagaaatgagaaggaaaatgaagaaaatcaaagacagcctgttgaagaaatgtttgaaagaaattggtaacaaatgaatacagggaataaagattagaaggagttgtacctgactttattcattcatttattccaacaaatactgtttgatcagctgtcaggtgtcatgtatggatgggtacaaagttctggagacccaactgtgaacaagaccattgctcccaattagcctgctcctttctcccaaagaactggttggctctgttctccccttttccatgacattgtctctttctgtactatcacctacatttagcatgaccacttctgtaggggtgcttgaactgttttgaaggtgccacatgtgaagtcttgaaatggggcaaggaaaagaagatgagattatgaatctattcctctttcctggggtgcaaatacgcccattatagatctgcacatgtagagtaatttcatattccagaactgtggagttctggagtatcacatccccctcttttcaccatcaaattgtattttaataaggaatctgagaatctgggaaagagggccaatatggtgatctgaaacagggcagatttggtcattcagcagactggggccctgtccttacctctcaaagaagcatagagaggaagctattgcttatgaaaaggcacaggacgaggaaatagctcaaggggccaatgacagggtggggaacagggactcaaagaagtccatgggtagcaggacagtgtgtcagtgtcttcagaatatatctacaatgcatgctgtctaaccacagtccccaatttgttgagcccatcaacatgtctcccctggactatgctgttagccttctggggtctcccagttgccactctggctctctccaagttcctttcttcatcttgtaggccttgcaccatctgcttctttcctaccacctctacaaccttgccttgctgtctgtttcccttcctttctaccctccatctactctggtcttatgttcatttctggtcctttttggcctcttgtcttttgcacatgctgttatcttctctctccaattttgcaggtctggttctttcatatttttcaagtctcactttaatattaagatgtcaggagttcttccctggtcaccccatctcttcttgtgattcttgatctcagcctattgtttctttcatagcacttaccacaaacttgcaattattttatttgcaggtctggttacttttttgcttgtttcctattctataatgtaagctccttgaggccagggactacattcattttgtttattgtatcctaaggacccagctcagtgatactgagaccactatcaattattccataaatatatgtattgaacacctagagtgttcaatatatatattgatctcagtgggtgaagccttgcactagcctccaacatattgagggcagctgctcctggccctggtttgctcatgaaagaaaaggtacatgggttaaaaatctttagatggatgatattagggcctgagtttgactgctgatgaattctgggccatatcaaatgctttgtttgtgatagcagcccttttcatattcgttcccaactgattttccaaaatgtttaagcacctcaataacaggaattacaccagaattctgttttttttttttttgtattttacacatctataccatcatagttctgtattaggaatacagtgtgctccaaattatgggaattgaggggaaggactgagagttaattctagataacttacaagatcatgatttgcaattttcctgatgattaaccacattatacttgtccttttagtttgaatttacccaaatttctaccatttttccactaaactatttactcaaatagtttttttggggcacagctgtggtaaatatatgcactttcttttaattactttgtgcagtgtgtgtagcaaggaagccttgggtaggctggacagcacaagtgcaggctgaaattgagagcccaggcactggagaagaacccaagacacaagcttggggtgtgtctggggatgacaagagaggctggatacaagtttccttggcaaaaggtcagagggagtccagcattcatgacatctgtccaaataaggaagaggcaggtgattactggtggtaaggaacatatccatgctttggagggacttgggtaccaggtcatgtacaactcaggaaagaaggcaggagctcagctgctgggggcctgaagggtaaagcaagggctgattcagaaggtaacagggcaatcttccagtgactgaggtcacgcagtcagttgaggatcagggggactcaggagccacatagttcatttctgtgagttatagccatttaaatatgagaaaaaattacctcttcccttgagctagtaaaattccaataaattaaaatatataattatagcgccaggtgcagtgattcacgcctatactcccagcactttgggaggctgaggcaggtggatcacaaggccaggagtttaagaccagcctggccaacatggtaaaaccctgtctctactgaaaatactaaaccctgtctctactaaaaattagctgggtgtggtggcgcacacctgtagtcccagctactcaggaggctgaggaaggagaattgcttgaatccaagaggcagaggttacagtgagctgagattgcgccactgaactccagcctgggcgacagagtgagactctgtctcaaaaaaaaaaaaaatatatatatatatatatatacacacacaattatatcatatatacaaatatacatatatcatatataattatatctatatatatatacacaattatataatcactaggaccacaaaaataatataattgtgtacatatatacaattatatatataatatacaattttttatatatatacacacacacaattatattatttttgtggtcctagtggttatgattctgctaatgataatgtttgtctcttgcttatggatagccttagcctggtggagatgacaatattctctggcctatgcaagaaaagaggagggaatcccacttaacgaaaacttaagtcattctcaaatttattcaaatcatacttgaaaaggcggaatgaaatttagggggatatgttttaactatataagcctttgctaataaaagattaagaagtatgtggcttagcatcttttaattatttttttctagcaacttgaatatacaatgtttgaaatctctggttggatcaacattattttgctcagaggtttgtggactttgcatactgattctttcctgtttccaagtacatttgcttttaggctatttttattcactttaaaggaattttaataactttctgttgacagcatggacagctggtcttgagaattaaagaaaattcacttgctgactgaggaaggaagtgacatcaatgagcttctaaagtcagcccagcgggggaaattggctggtgagagagtagcctttcattgcactgtatttatcgagcgatgccttgagatgcaaattgctgtatcaatcaaacctgtggtgcctacctccaaccaacccagtgcaaactgaaggaacaatgccctgaaacactgagaataaaaaggatgaggggtgcaggagcccagaggctaagtgaattacggagctcagaatgctctctcaccaagcctatacttcattctctgtcaaacctcagtttctttgtctagaaaatgagttttatggaaactgttggttgaagtcagtctgtttctttgacagatggctaagaggaccaggtactaatatagatagtgtagacatgctatctcagtacgtttgtcccaaagagagctatcaattgctttttatcccctactgagagctatttagaaataggaatttttagctgtcatacttagctactaccttgatcctttgttttaaaaccctgtattcattgtttataactacactgcaaaaaaaaaaaaaaatagccaagcatcagatctggactttaataacgacaatagcaatcacaatcatcatcgtcataataaatgacaattttcaccactatcagagaatcttcttctggagttgtagttacctattttgcaaagatagctgtggtgtgagtagattgtgtgtgtatgtgtgggttatgttgggtgaacaggcaggtatgtatgcatatactcacacctgtgcaaaagaaaggtagaaaagtgcctaggtacattttatgtttatgacatgaaaaattacattctacttatttctttctttcttttttgttgtttttgttttctttttttagatggggtcactctttgtcatccaggctgtagtgcagtggcacgatctccactcactacaacctccgcctcctgggttcaagcaattctcctgcctcagcctcctgagtagctgggattacaggcatgcaccaccacacctggctaattttgtattttttttttttttattttttttttttgagacggagtctcgctctgtcgcccaggctggagtgcagtggcgggatctcggctcactgcaagctccgcctcccgggttcacgccattctcctgcctcagcctcccgagtagctgggactacaggcgcccgccactacgcccggctaattttttgtatttttagtagagacggggtttcaccgtttttagccgggatggtctcgatctcctgacctcgtgatccgcccgcctcggcctcccaaagtgctgggattacaggcgtgagccaccgcgcccggcctaattttgtatttttagtagagatggggtttctccatgtcagtcaggctggtcttg

SEQ ID NO: 96639 - DNA, 12392 bp, Homo sapiens
gaggcctccccagccatgcttcctggtaccggcctgcagaattatgagccaattaaacttcttttctctataaattacctatttcaagtatctctttatagcagtgcaagaatggactaatacaatgttgtgccatgaattacatgctggggaaatagtagggaatgagacatcaaggctgttacaatgtaggagagaagattgacagtaaacactgtaattagaaaacagtttagaaagtgttaagtagtagttgctattctccctcttttacagatgtggtaaactgaggcttagagtaggtaaataactcccccaaagtcacagagccaatgagtggcacagtccagatccaattcagacccacttggcacaaagtccatgatttttcactctgcgctgggagatagatgttaaacggtgtgctttttttttttaagtttaaaaaagtttgggaaaactgagaatgaattcctaccttaagaaagccacaccatgcattcgtgtattcaaggctttgggccgctttgtgggaataaatattatttagattgtgcatttcctaaacattcaatggtttcagcctaagtccattcagctatattgactacagtggtaaacatacgaagaccgtagcgaacagaggatcctcagggacacaacagaatgtcctgagacatttttaaggtatggtgaattgcacaggacacattcagtaactgggctttctaaggttctgtgatgttaaagaattgaattctggtacacttagaaaggaaagaaaaatagtgcttttaggcatgagtttctacagtgaacaattttgagtgatcaagttctctgttatcaattatagcatcagtagatttgaaaagtacaaaatgtgcctttgttcacttcacacatttgacagcagtgacagattctcacaaaggagaaagcccctgggaagtaaaatgatgattccaaacgggcgttttttattgtcaaagagcatgcatgaatgaggggggaggtgggggtgggggagactgctcatctaccccagatcttttctaaaagtttattaggacaggttgttcctcacacccaaattcactggtataaactgatttttaaaatggagcaagatttgaaagatgagatcctccagggattttattgcccactggaggagggaagtgcataaataactacagcatgaggcagtgtctgtgccccccaccccaaccaaattcttggattgaaacctgaatctccctatgatggttttcagaggtggggcctttgggtagtgattaggtcatgaggctggagccctcacaatgggaggagtgcccttatgagaagaggctagagagagccagctctcttttctccacatgagaacaaagcggtctgcagccaagaagaggtccctcgccagaacctgaccctgttggcaccgtgatattggacttccaacctccagaactgtgaaaatacatttctgtggtttgtaaggcacacagtctagggtactttgttagagcagccctaactaagacaggcagatcagaaagagccaacagagaggtacagaaaagggcttcaaggcaatttctattcagtaggaagacaaaggcaagaagttttactgcttacgggtttttatcaaatagtggcatgtctagcctttgagtgaaatttgcaggtctgttattaaatctgcattctgctgtatcctacagtggcaattttccaatactcaagatgtagctctatcaaagcctaatttggtttttaggttctgacactttccagctccaatgggcatttatgactttaaattatatgcaaaaaatgaagtctgttcacttcattttcttcttccagggatgaaaaaaaaaagggtaaaagtaaaagaaaaaagccattacttttaaatgcatccccttttatcactgaatgcctcttcttcatacatattttacccttagctaaattttcttctttcctgcttctaggctaattttgcattgtatagctattagtatcatcagagtatttaatcacactcttgctatcgcttcctattctccaggcaatacctttcttaaaaaaagcgttattttaaacagcattattcccaccaactccttttcctgacattattattcattgattttaccaccaccatcacataccactctgctatagagttcttaaagttcacaccatagaggttcttctatgcttcaagttctataccaaacatcgtatagagtttatctctaaattttgtactaactttgcaaaataggaaataacagttcttaactctactttgtaaatgagaaatccaagacccggtgctgagtgaatttttctaggcttcacaactaataccattgttccattttgactgtttcttccctagtatctgggctcataaacaagctctccagtactaggctctgtggtctattcttatttatagtatgttgtcttattctttacacaaataatttctggcaaattttgggttaatcagatggtgggtatggttcagtcataagggtcttttgttacatagtcttttactttttttctatttgctttcaggttgtgtgatcagtcttactctatgttacacaacaaatcaattatttgtattagtttcctattgctgctgtaactaatgaccgtaaacgtagtggctgaaaacaacacgaatattctttcacagttctggaagtcagaaattcagggctaaaatcaaggtgtctgcagggttggttccttttgtaggttcccagggagaacccattccttgcctcttctagtttttagtggtgatggcctcatggctctgaacactgcctctgttgtcacattttttttctctcgctctgatcctaatgcttgcctcttgtaaggattcttgtgatcacatcaggcttacccagataatccaggacaatctccccatctaaaatccttaactacattacaccctcaaaattccttttgctgtccaaggtaacagacacagttacgagggacttggatatgaacttggagggtggagggagattattctgtctatcatatttctcattcaacaaatagttgttgagtaattaatgcatgtagtgaactatgttcagctctgaggaaatttcagggactagcactatgtttgaggaataaaacagccagactgtctctgctttcatggaggttacaccctaacagaagatgcagacattaaatattaattttacaattatcgaattacaattgtaataagtgctggaaaaatggagtgtgaagaacggagatgaatcatggaagaactggcttaacttggggcatcagggaaaacttcttagagggaatgactttgagctgagctctaatgggggtgattaattaagtgaagatgagggccaagagtggatgctgggagagcagtgattaaagccttaaaactcaaaggatcttttagaaccattcccagtcattagcgtcattagcgattcttgagctgagggaattaataagcatgttctcaagagagatagttgttgttttctgaatttctcaaaagcagacaagaaaaatgttcatatctcaaatatcatagaaataccttccttggaataatttgatttcttccacttatcggaagtcaatagtaacttaacatttgcattatttttgctgttctttgaagagttttaacacctctatgagtttaatagcccccaaatcagtcttaatacaagtttaagtagacaaattatacaagattccaaatatgggtgttaacaaaaatacagctttgaatctctggcaagatcatgtgaaatgcttggagaaaagatggaacaatagagcataaatccagacatagcattccaatgccatcttcagttcccttagagttctttttttttttttggtggagtatcgctctgtcacccaggctggagtgcagtggcgttatcttggctcacagcaacctccgcctcctgggttcaaactattctcctgtctcagcctcccgagcagctgggactacaggttcacgccatcatgccgggctaatttttgtacttttagtagagatgggggtttcaccatgttggccaggctggtctcgaactcctgacctcaggtgatcctcccgcctcgacctcccaaagtgctgggattacaggtgatcctcctgcctcaacctcccaagtgctgggattacgcccggccctcttagagttttaagccttcaaatatgcagagagcaacttaattttgtagtctctgatactgaaagccttttctgtttctgtgataatttcttgcctaatcaccatcagaactttgtgaagtccaaatacataggaggtggataaaatctcattttaatttttcactttttaaattataagaaaggatgagcattttctcctaaattttcagtcctttgatatttttccctaaaccatttgtttgtggcctttgctgactttttttttctttttgatttttttaggagctctttgattcaaacagaaaataattcattgtgtggcatattacaaaacatttacccagtatgccatttgtcttttgactttgtgaagggggcaagtttttactagtcagatgtattagtatttccctttgtgacttttcaatcacaaattacaaatacaattgctcaggttttttatggttccttttttttttttttaagtgattcagtctttaatcatttgggatttattttgctataaggtatagataaacatctagcttaaatttttttcaaatgtctagtctttagtccactgtatttattgagtaatccagtgttttaccactgatttgaaatgctattttaatcaaaaacaagaatctcaaatgcattgggatatattttgctccattttaagctgactttctgtgtctagaaggccttgtcatttatctcattgttcataatttcctcagatgtttaaaggggaacttttaaaaacattgtcaattatacaacgttacaaccaacaatttgaattttgattttttctctgtaaagttaagataatggaataactttataattgtgtgggaggattttagatgctgtgtatatgctaagcacttagtccaatttcaaatcagttgtcgttgccttttattctatagcccctaatgtgtacgtatacaatagaagcttagtaaagctttgagcttcaagttcaggtgggctggcaccaggatctgtgctcttcgacatcgtgttgaattgcctctcacaggtaggacagaaatttgattgctctggaaagctggaggggaatgagtgttctgtgaggtttgtttctatatttattttattagaatgggagagacttgagcgggttactaggccttctcattttcttctttgggtgtagataacttcattgcacctttgtaattagtcagcatgagagacaggactagctggatttcctaggccaactaagaatccctaagcctagctgggaaggtgactgcatccgcttttaaacatggcgcttgcaacttagctcacacccgaccaatcaggtaggaaagagagcttactaaaatgctaactaggcaaaaacaggaggtaaagaaatagccaatcatctatcgcctgagagcacagcgggagggataatgatcgggatgtaaacccaggcattctagccggcaatggataccctctttgggtcccctcccattgtttgggagctctgttttcactctattaaatcttgcaattgcactctcttctggtctgtgtttgttacgacttgagctgagctttcacttgctgtccaccactgctgtttgccgccgtggcagacctaccgctaacttccatctcttcagatctggcagggtgtccgctgtgctcctgatccagtgaggcgcccattgccgctctccattgggctaaagactcaccattgttcctgcatggctaaatgcctggattcatcctaatygagctgaacactagtcactgggttccamggttctcttctgtgacccatggtttctaatagagctataacactcactgcatggcccaagattccattccttggaatcygtgaggccaagaaccccaggtcagagaacatgaggcttgccaccatcttggaagtggcttctgccatcttggaagcggcccaccaccgtcttggaagtggcccaccaccgtcttgggagctctgggagcaaggaccccttggtaacaagaacactgttttgagaaaatccrtagaaaaagaatgaattccaaatagtttgggtctaaaacttctagttctctctgtctttctaagaggccttattcctagggggctggggactggaaacccaatagctgaggttaagttgataaatcaatcagaaaaggggtagaaatcaaggaatggttggggaaaaggatgcagttagagggcaagtggggatgcatggttttggatgtgtgggaggtgagaagcaagagaagggacagtgctttcagacttgtcaatgacagctttcaggcttaggccagcctccagcacaacagttctcacccttcagtgctcgtcaaaagcgttatgcaaatgcagatgctcaaaccctacccaggaataccagagcaggcgccctgggatgaaccctatgtttatttctgaaaactgcttcacattctcaaagaagccgaatgctttgaactctcatatagtccactgagaccagatacatcctcacaagggagaaggtaaggtatgttcaggactgccgttctcatcctattttttactaaacaaatcttacagagcacctactatgtgccaggtactatgccagtccaggaataagatggtgagcaagaaagacatggtccttgtgttcagacggtatcaaagaaataaagtggtgtgagagagcaggaaaggggaccttcttcagagaggttggtcagggagggtcttcctggagagggggtacttaaaccagcagggggacaaggcgctggccatgcagggaactgggagttctagggaaagggcccagcacaaggggctgacgcaggcgaggtggagtgtgctgggtgaactctactctaccctgaaggagtcacctccactcctgttccctccaggaccagctcagccctcgtctgctggggtttctgttcctccttgcaccctgtgtgacagcacttctctcttcctcactgtttgtctatagcctcctgctagaatatccatttacattgctatcgcatgccatatgtgctggaatactgttctacttaatttattctacataaatatttgttggctgataaaaagaaaaacaattattctgtagaaagtatgggacttcaggaaagtctctcagttctctaggtatcagtagacttatttataaaatgacagaatcatatttgtcctacagacttgggatagttaaaaaaagataacttattagggtacccggctgtggggatggtacattgtaagtgttcaagaaatgtttgttgaggtatgactaagtaagcgaacatctcagtggtttcattgttactgagaaagttgggatattgtgcaagattcttgaaaattaagctgtttatgatattttatgaaaactaaaactaaagctgcctttaattccctctggctctgagaagtgactattctgaatgtgctccagaatctatgctaaacacaggcagtgctgatgtgaagagctggaggtctaaagtccagggccctgggttgagttcagattccactcactacttatgagctttgagtaaaggctttaagcctcaactgcaaaatatgtttgataattttacctataaaatagagtttgacctgtgatactgggttaaaattagagatatcagtatgagctcacatccacatacacacacacagagacacacatacagacacagtaacaattgtaggtatttgtgtatacatgggttgtatacacatatactttacttagcactccacaaagaagaccaggacctaagaaggccaataagcaatgacatcccagtagcaatgggcatacctagcacccagatcttggtttccaaataccattttccagtaaaaggaaccaggtctccttcgggacatgctgattcaaggacaggggcagaagaatataagataacaagatgagcctggatcatctggtagtaccagaacataaagtagtatggaacaaaaaaaaaataggacagaggcatgtcaaaaggacacaggagccaccctaagcttccaatggtagcaaaactggaaaactggaaaaatttgtgcaataaaatagtgtatatttgaattataactcaaagtataaaatacgtatacatgaatctgtgctaatataaataaatgattggctaattcaataaattagggaggagagagatgttttttacatagaagaatttcaaaagatatgtgtagatattccatgttctgggagcaggggcttggtcctccctggcctcactgagtgcaggctggacttaaagactcacttctaaagaacagagtaaaggaaaagggggaaaatagtgactttgcagttgggaaacctggcaaacgaccctttcaccgagtgatgaagggtgatctcaccagcaatgccatgtggcatcatttaaccctgataggatgtgatgaaaagggtgcttcacctctgtggtgttctttccaaaaacccctaacactgtcgaaccaagatgaagacatcaaacaaatcccaattcgaggaacattttaccgacgtacttaacctgtatccttgaaaactgccaaggtcatgaaaaacaaggaaagatgaagactctgtcacagaccagaggacactaaagagacatgaaaaagaaatgcaatgcgtgtcctcgactagatcctggaacagaagaggacattagaggagaagcatgtgtaatccaaataaagtctggacttgatttgctactaaggtatatacagtagtaatactgacttctttagttttgactaagtaatagtaatgtgttcacattgtggggaattaaacttgggtgaacagtatactctcttgcagtatcctcacaactttttataaatctgaaattattaccaaaaaacgtttatttgaaataacagagtttgggggagactagacaataacacatgtgacagtgtgctgtgagctcatagggctaaaaacagcattatgagcatcaggttctttggattgtgcagaatgaaatttagtgattacagaatctcaggaagtgtccaatttcctgtctatctgtgattctttttctaaacactaccacctgagacagtctactaaaagagatgccaggtattttatttgacacctagtgtttaaaaaataaaagtgaattcctgaggtcagcttgtttattgcttaggcgaaacataatttgtcatgcgtcactttctcatataaagagtgaaaatttacttcttgccaaacccatttatgtcactttcctggtagtttggattccagggaaatatgattccctgtgcatacacaccctcccccacactcagcatcagagagcttttggttcttgtagaaatgcaactcactgtgggaaaagctgtttcaaagtctgggttgctttcctaaggcagcaggtctccctgccacccagcagttcaggaggccccagggaaataaggagaacctctctccacacagggcttacattctgaatatgattctcttttaatgtagatcaaagtggctgaagtaagtcttgagtgtgccttggagatgttggtaaatgcagcatgttcctccagcactgctgtggttaggaaaggagtcagttcaaagctacgaggtctgcctggagatctcaagttcggggacccaaacgggagtggcttaaagctaaggaggctccaggatgcttctggctcaagcaggggctcatgcaatgtaacattctgatccaaaaaacagagctttaaagaaccactggatacacacgaataagttgcattcggttttcaatttgtgagctgtggtgttagaatcatggttttggacatggtgggagggttggggagggctcaagggagagccagtcacgtgcatgcatccctgtgcgtgtgtgcgtacacacacacacacacaccagcagcaatcaatgcgctgtttcatgtgcaaatgagaggagcggtaaaaataaactcccaagatacgtaacacaaaaccacctgggtggtctttgcagtgaggcctgcagctatttttccttccctttcctccctgtccctcttctcttcctccttttctcctctctcctttttcttcttcttcttgtaccagtgggacatcgtagatttttcttgctttaattagttatggatgaagtttgtcctttttgagcacacagtagatagtggtagggagacacgtccacaggaccggcaagaagtgggcctggaatttcaggtgggctgtagatgatgaataggggttcactgtgagccccaaatgcagttccacctttaacttttggcctcactgaagccagatctctgttgctctgctctgcttgcttctgcgctatgagctccctgctacagaggggcccatccatcctctccatccctgcagcatgtatatcacaggggagactgcttgcgtcacattatttatattgtactagagtctgaaatgtgtgaaaagccagacatagagcgtgcagagtcctgcttatgaggaattagctggcccaggagcagtggttccattcaatgtgacaacacctacggagtctcagtgaggcagagagcacggtgaatgagaatttggacttttaagaaaaacagaccctagataaatcctcttgtattcctcactagctgtatagcctgggaaaatcccttaacttctccaagtctcaaaattcctcaactgtaaaataaatatggacctaacagcacagttaaatgagatcacgcacgttaagtgcagcggctggcaggccatcaataaataccaacttctgctattttcatttttatccatataccaagtaagtatgtgcctggcatggtggagagaacaaagacagacaggcaaggtacaggcctgcccacccccatgtgcttgcatcttagtgaggaaatctacgaaactagaaactagtatcttgatgtctctctgccacaccttcgtcatctataaagggtggacaacaatacctattccataagattaaatgcatgaatacacataaagcatttagaacaatgttagcacattataagtgctcaaacagttattttacaatgattattcaaaggagagttaacattttgttgggatagttaggaattactttacagagaaggtgaccattgacatgagcttgagggatggcatggagttgataaaggtgatctgggtagagggaatgatgaagatccaaggtgtagggtgggagggttggggatggctcaaggcagagccagtcacttgctgctctctgcagcacaggattcacaaacctaagagggaaaggcaagtctggaaaggcttttggaaggtcctgaaaagctaagtgaaaatttgtacttagttgtgtaggcaacgtggagatcccaaactatgttcaggatcataagtatgccctgggaaaatcagtgaggccttcacatgaggaaagtcagaatttccatcagggatgcaaatgagaagctagtggcactttacccgttcattgcgtcaatacacatttccttggtatgtgtgaggcaccgtcctagacactgggtatagagtggtgaacaagacagaatttgccttcctggagttcagaggatagtggtagagacaggcaggcagtcacacaggaatatatcttgtaaagtggcaagttcaagaaaggaatatacaggagctatgataagagggctatctaatagggcccgcctccctgaagaagtgacatgtaagctgagccatgaacgatggggaggaataatccaccaagtggaaggacagagtgagaaattgctttccaggcaaagggttgggctggggtggaaggtcatatttttcctacagcaaggcatctgtggcatcaatgtggaaaaaaatgtattagaaagaaggaaagagcagatttggttggactcactgggacagtagtgcaggagctacatcaaaagatgattgggggaattctacatgaaatgatgctgttcacccaacacgggatgaaactcacaggtggaagaagccagacacaaaggagcatataccgcgcgaggcctttgatacgacattcaaggatagag

SEQ ID NO: 96640 - DNA, 12351 bp, Homo sapiens
cgcctcctgtgagactacaggtgtacgccaccacacctgggtaattttcaaaatctttttgtagagacagggtctcattacattgccctggctggtctggaattcctgggcttcagcagtcctcccgcctcggcctcccaaagtagaaatatcagtattgttgtggttagccaccatttattgagcacctactgttgctcagccctgtgctagggatttcacatatgttattacggccttttatgaggtgggcaatattacccctatttcacaaatgaggaaagaggtttaaagggctcaagtgactggtacagaaaccaagtctgtttggctccaaagtccaggccctacccccctgccatgacccagaagcttgcagggcactgagcttgcagggcattgagaaagaggaagtgaattgctagctaatgaaggccaaaagggcctggaacccagacctcctgcttcccggagttcccttcatcaagcatcaggcgaacagcccctctcacctgaagggtccaaagcaatggcctcataatctagtgccttacagagtgaggccgacagctattattacccccattgccagataaatcaactatggcccaaggaaggaaaacctctgcctgggaatccagcatctcagtggtcaggaggagaggccaggagccactgaccctaagaggcagggtccagtgagacaggaagggaccaggcaccagggttgctggagccacgaggcgacgtcccctttttcctggctctttccacatgccacagtcaaggacaagaacacttaggggctgagctttattctataaacagggacaattgctctagcaggagaagggatgtggtgtggggtgggacctgacaggaggacacgtggtaagaaggaaggaagagttggaaggctgaaggcttgggagccacttttcctggccaggcaggcatcactgtgaggtgagggcagagccactctacccctagtagtgtgggttgctgggtttgccacaagggctgcctgcggatactggtgagtcctggtaaaggtgactgctgggctccagatgatgcgcccgggagggctgggggtgcaggcttcctaggtaattttcaaaattacttcctggagggcgattcccagcagggtggcccgaggcaggtctggcgcccccactctctcctttggaggctaggaggaccggagtccccgaggtcccactcacctccgaggccatgttgggcggttcctcgtcgtccggaagcttcggtcctccgggtctggaagacaagaccggactgacgacctccttggccagcagggtcccccgggccgggctggctccgagttctgggcactgcgcttgagggagcgcagcccttggggacgcggacgtgagcgcgcgccacggtgctcggcgtcctccacgcccgtcccgcccatccggccgccgcgcactcacctccgcctggccgcacggatagtgtcgcgcccgccactggccagggcttttctggccgggatggcgtcagcagccgccggtcctgtccccacccctggcgacggccgcgccaataggaggccgcccggcggggtgggcgttgcctccatcctccaatcctggccgtgggcggggatacctcccgctgagctggaggctaagcggccccggggcggggaagcgggcggggaaagggttggggggaccccgacggggaaggggcctgggctggggttgaggagggtagtgcgctggcgttcgtgctgtggtcagcagacacgcaggggactggagactcgggccaggggtagaggctatgacatcaggcccgggcctggcaggttcacaagatatataaggtgaaatggcatgttcgctcattcactcattcattcattcattcaacaaacacgtaccaggcacctctatgtgccaggtacagagaaaggcatcaaggaaaaaggaaggaccatcagaaatgaagcctgtgccaggcgcggtggctcacagctgtaatcccagcactttgggaggccgaggtgggaggatcgcttgaggctacgagttggagaccagcctgggcaatacaacaagatcccgtctctacaaaaaaattaataataataaaaaaaaagccgggcgtggtggtgcacgcctgcagtcctagctactcaggaggctgaggcgggaggagcacttgagcccaggagttcgaagctgcagtgagctattgtgccacggcactccagcctgactcctctaaaaaagaaaagaaacgcggccggaggccgggcgcggtggctcacgcctgtaatcccagcactttggaaggccgaggcgggtggatcacgaggtcaggagtttgagaccagcctggccaaggtggtgaaaccccgtctctactaagaatacaaaaattagccgggcacggtggcgggtgcctgcaatcccagcgactccggaggctgaggcaggagaatctcttgaacccgggaggcggagattgcagtgagctgagatggtgccattgcactccagcctgggtgacagagcaagattctgtctcaaaaaaaaaaaaaaaaaaaaaagaaagaaagaaagaaaagaaaagaaaaaagaaacgcagccgggcacagtggcttacgcctttaatcccagcactttgagaggctgaggcgggcggatcacctgaggtcaggaattcgagatgagcctggctgacatggtgaaaccttgtctctattagccgggtgtggtggtgggtgcctgtagtcccagctactccgacagctgaggcaggagaatcacttgaaccagggaggtggaggctgcagtgagctgagacggcaccactgcactgcagcctgggcgacagtgagactcttgtctcgaaaaaaaaaaaaaaaaaaagaaagaaagaaagaaaaagaaaaagagaagagaaaacaaagaaagaaacgaaacaaaagaaatgaagcctgacttcaagaagttccaacatagcatggaggaggtgtgcagggagcacaggcgttggggaggggggctatgttgggtactcagggaagaggtccttgatctgattaattaattattcaaccaaaatgtcaggctggattctaggcactggaagtaccctgaaggggcttctaatgaacctgtcttctgcattgggtcttggaagatggggggaatttgcccagggaagaaggggagaacattccaggcagagggagaagtctggacaaaaaatgtgactggcctgctttaagaacaggaaatcatccaagtggctgtaactataacaaaaggtagggaggagaggtggaaggagtttgggagaaggctgtgaagagtcttcaatgtcaagagagggagtttgttcttggtcctataggtcataggaaaccccgatcgattttaaaatcagaggagccaaatttattttattttattttttttttatttatttttttgagatggagtttcgctcttattgcccaggctagagtgcaatggcatggtcccagctcactgcaacctctgcctcccaggttcaagcgattctcctgcctcagccttccaagtagctggggttacaggcatgcaccaccacgcctggctaattttatatttttagtagagatggggtctctccatgttggccaggctgttcttgaactcctgacctcaggtgatctgcccgcctcagcctcccaaagtgctgggatacaggggtgagccactgcgcccggctgaaaccccatgttaaaaaagaaagaaaggaaggaaggaagataaatctagctatagtattgaggatggaatggagggagaagaagagaccagtggctggaatgttttgtgatttgaaggtgtttagccctcactcaactcaagagtggaattacttggagttcccagaatgcacctgactgtttcaagccttcctaaatgctcttccctgtgcctgggatgcccttccctcagtgtcggtcttgccacctcccattcgtccatcagtattttttttttttttgagacggagtctcgctctgtcccccaggctggagtgcagtggcacaatctcggctcaatgcaagctccacctcctgggttcacgccattctcctgcctcagcctcctgagtagctgggactacaggcgcccaccaccacgcccagctaattttttgtattttcagtagagatggggtttcatcgtgttagccaggatggtctcaatctcctgacctcgtgatccacccgccttggcctctgaaagtgctgggattacaggcgtgagccaccgcgcctggccttgtccatcagtattctagccaaacatcatcaatgtcaggtagactcccagctgatccaggcatccaactctgggctcccatgtgatcctgagtatacgggcatttagcaatcttttcctgatttgggagcactgtagtagtgccttctgggccttctccaccacccaagtggtgagctccttgcaagcaaagcctcatctgacacatctgtgtgccctgactcccagccctctcctgtcttctcccacagaagccctagaactgggctgcagctgaccactgggaggacaggaaagactgttagatcaactgtatgccgtgtggtcctgaaaaatgccaaagtggagtggcaagtcccgagatccaacagctagtgtctgaggcctggcatcccttcctgggaggcctcgtgtgaaagtcagtggcattctgcagacgtgaggtcgtacttctgaatatccagcaaaatactggggccaaaccctttgacaaatgaactgaggctagaaagagagttggagaagtggtttgacagcagagctgtaaccacaatacctaacatgggtaagtcaccaggtggcaggctctgagctaaaattcatctcattgcatcttcacgacagttctatttatagataaagaaagagaagctggctgggatccgtggctcacacctgtaatctcaacactttgggaggccgaggcaggcagatcacctgaggtcgggagtttgagaccagcctgaccaacatagagaaagcccatctctactaaaagtacaaaattagctgggcatagtggtgcatgcctgtaatcctagctactcgggaggctgaggcaggagatcgcttgaatcgggaggcggaggttgcggtgagccgaaatcgtgccattgcactctagcctgggcagcaagagtgaaactccatctcaaaaaaaaaaaaaaagaaaaagaaaagaaaagaaacagaagctgcaaagggttagggttaggggttagaggacatgtacacaggcacccaggtagaagaggacagtcagtctggctgtccacaagacagaagagagattgtcagtccaggtttgtttgcaacaaacagcaagcttgcaagcttggcatacgtgaaggccatgctgtagggatggggaagagactcaggaagaggagaaagacaggaaggcaagctgggcacggtggctcatgcctgtagccccagctacttgggaggctgaggcaagagaatcgcttgaacccaggaggtggaggttgcagtgagccgagatcgtgccactgcactccagcctggggacagagcgagacttggtctcaaaaaaaaaaaaagacaggaaggcagcataaaggcttgcaaaaaacaaaaaatcaaaaacaaataaacagaaagcagatgagtcaaaagtgtctgcagctgagtccctgacagttgacactgaaatggacgtgagcctttatcttgacaaagcatccttggcattaaagactcataggagggcagggcgaagtggctcacgcctgtaatcccagcactttgggaggctgaggtgaacggatcacctgaggtcaggagattgagaccagcctggccaacatggtgaaactaagtctctactaaaaacacaaaaattagagtgcggcctgtcctgtccttgccatgaggctgcggcaggcaccagagtccagaaaggtgttcattcagcgagactacagcagtggcacaggctgccagttccagaccatgttctccatggagctggagaaccagattgataggcagcagtttgaagaaatagttcaaactctaaataacctttatgcagaagcagagaagcttggtggccaatcatatctcraaggttgtttggcttgtttaacagcatataccatcttcctatgcttggaaactcattaccagaagcttctgaagaaagtctccaaatgcattcaagagcagaatgagaagatctatgttccacaaggccttctcctgacagactccattgagtaaggactgcgagttattgaaattaccatttatgaaggcagaggcatgagccatggaagataaaccatagaattaaagatcctacttctagctgggcccctcatgtatccattggccgactgcagagtgtctctacctcctctccagagtatcattcctatctgctgccagagccacactgccatttactccaaggactttgtaaaattccacacctggaaagacctttagttgctcagtatccactttgtgtctccaaattgtgtaggactctgtaatcttttgactagtttctgagaaaacacaatgaagcatttcactttttttattgaaggccatttaataaaacacagctggtcagcccagtgcaaaccttattatctgccaccagtacgtaccattggttctcctcattccttgggccagcttctcaggtagctttagacctcaacaagttgtatctttgccagtgttccatcttgttcccctaaattaataaaatgcttttctccaggattttggcaaaggttggtgtggctgtggttttgctaatgcacctcctagatttcaaagatttaccagttttaccatgactcatatattaagatctgtttctactattcagttcctcaaactgaagctcattgaaaaaataatgtataatgttatttgttttattatagcaattattcctcattaaagcagtatttaatgcaatttccagttatttctttggagaatgttatgtccttgttgcattaccttaaaggttgtgaagatgtgatgtgtgttgcttgttcatcacaaaaatcagtaagcacaataaagtggatgccaaaccatcaaacacatagatgttcctgctgggtccctggatatgtaataagcaggtataaaaatattttaattatagttttcttacaaatataacttacgagaaaaaaatttgattggaataatactgtatattactaatttttaactatccctacccaaaccttatgactcacagaattttctcatatacagtattcagtgcacagaaaacttatgactggctcaagtacagtaagttacttctaagtaaaactctcaagtctgagtccatatttgtagctctgcttttggttgtacgtttctaggatcagggccgcttatgccttttcgttcatccttggggtttgagagcactgtatgagggagagagtttaaaaatacattaggagacagaaaccattaaaagtttaactgtcagagatattgtaggtgctaatactggatttcgtctttcagatttaatttcttttatgggtctgttaatcattcaataaatcccataagtatgtgtaatatttcaattgtgtaaaactcgtttgtcactttaaagcctgtaacagtgtgtttgtgttttcaacccattgcaataactttgctgaaatattaacacattaataaaacttttcttaaaaaaaaaataaaataaaaatacaaaaattagccgggcgttgtggtgcatgcctgtaatcccagctactcgagaggctaaggcaggataatcacttgaacccgggaggcagaggttgcagtgagccaagatcacaccactgcattccagcccgggtgattaaaaaaaaaaaaggccgggcacggtggctcctgcctgtaatcccagcactttgggaggctgaggtaggcagatcactaggtcaggagatcaaggccaccctggctaacatggtgaaacccagtctctactaaaaatacaaaaaattagctgggcgccgtggcgggcgcctgtagttccagctactcgggaggctgaggcaggagaatggcatgaacccagaaggcagaagttgcagtgagccgagatcgtgccactgcactccagcctgggcgacagagcgagactctgtctcaaaaaaaaaaaaaaaaaaaaaaggaagacatggaaaaagccaataaaacaacatatgaacaaaatggaaatatcagtaaagagatagaaaacctgcaaaagaaactaagaacaaattttgcagctaaaaagtataataactaaaatgacaaattggcagaataaatgatatagtttggatgtctgtccccccaaacctcatatttaaatgtaatcccgatgttggaggtgggccctggtgggaggtgttttggtcatggggccagatcccttacgaatggcttggtgctctccttgcaatagtgagtgagttctcgtgggatctggttgttgaaaagtgtgtgacacctccctcctctctctcttgctcctgctcttgctgtgtgatgggctggctctccattaccttccaccatgatgtaagtaagcttcctgaggcctcaccagaagcagatgccagcaccatgcttcccacaaagcctgcagaaccatgagcctatgaaacctcttttcttgctgaattacgcagtcttggtagtcctttatagcaacacaaagaatggcctaaaacaaaaaagaatgagcaaatttgaagaaaggacaatggaaattattgagtctgaggaatagaaagaaaaaagattgaggaaaagtgaacagagcctaagagacctgcgggaaaccatcatgtgcaccaacctatgtattgtgaaagttccaaaggagaaggggggtgggtgctgagagaatatttaaagaaataatagctgaaaacttcccaaatttgacaaaagacatgaatataaaaaatccaagaagttcaatgaactccaagtaagatgaaatcagagacccatagtgagacacattataatgaaagttttgaaagccaagaagagaaccttgaaaagagcatgagagaagcaactcgacatgcaaggaatcctcaataagatgaaaatcagcagatttctcatcagaaactatagagatcaaaaaactaatatagtgaagtggggagctgtcaactaagtatctcatatccagcaaaactatccctcaaaaatgagagagtggccaggtgtggtggttcatgcctgtaatcccagcactttgggaggctgaggcgggcaaatcacgaggtcaggagtttgagaccagcctgaccaacatggtgaaatcctgtgtctattaaaaatacaaaaattagccgggcgtggtggcaaagagaattgcttgaacctgggaggtggaggttgcagtgagccgagattgtgccactgcactccagcctgcgtgacagagtgagagtccgtctcaaaaaaaaaaaaatgtgagggagatagtaagacattcaagataaacaaaagctgagggagtttgggctgggcatggtggctcacgcctgtaatcctagcactttggtaggctgaggcgggcatatcacctgaggtcaggagttcgagaccagcctgatcaacatggagaaaccccgtctctactaaaaatacaaaattagccgagcgtggtggcgcatgcttgtaatcccagccactcgggaggctgaggcaggagaattgcttgaacccaggaggcggaggttgtggtgagccaagatcgcgccattgtactccagcctgggcaactgagcgaaaatctgtctctaaaaaaaaaaaaaaaaaaaaagctggccaggcgcaatggctcatgcctgtaatcccagcactttgggaggccaaggcaggcggatcatgaggtcaggagtttgagaccagcctgaccaacatggtgaaatcccgtctctactaaaaacacaaaaattagattggtgtggtggcgggcgcctgtaatcccagctactcaggaggctgaggcaggagaatcgcttgaacccgagagacggaggttgcagtgagcccagatcacgccactgcactccagcctgggcgacagagcaagactgtgtctcaaaaaaaaaaaaaaaaagctgagggagtttgttgtcactagacctgccctggaagaaatgctcaaaggaatcctgcagggtgaaatgaaaacacactagtcagtaactccaagccatttgaggaattagagatctcaataaagataaatacatgggtaattataaaatctagtattattgtaacaacagtctgtatctccactttttgttttttgtttgtttgtttgtttgtttttgagacagattttccctctgtcacccaggctggagtgcaatggtgcaatcttggctcactgcaacatccacctccctggttcaagcaattatcctgcctcagcctcccgagtagctgggattacaggtgctggtgaccatgcccggctaatttttgtatttttagtagagatggggtttcaccatgttgtccaggctggtcttgaactcctaacgtcaggtgatctgcctgcctcggcctcccaaagtgctgggattactggcgtgaaccactgcacctggcgtccacgttttgttttctaaacgatttaaagaaagaatatattttcaaaaatagtagtctaaaagctagtgttattgtaactttagtttgtaactctacatcttgttttccacataatttaagggacaaatgtatttaaaagaattattaggccaggtgtggtggctcatgcctataatctcagcactttgggaggctgaggcgggtggatcatgaggtcaagagtttgagatcagcctgaccaacatggtgaaaccctgtctctactaaaaacacaaaaattagctgggcgtggtggcatgtgcctgtaatcccagctactcaggaggctgaggcaggtgaatcgcttgaaccagggaggcggaggttgcagtgagccgagatcgcatcactgcactccagcctgggtgacagagcaagactttgtctcaaaaaaaaaaaaaaaaaaaaaagaattattagttttgtttggggacatgcaatgtataaagatataattttgtacatcagcggaccgggcgcggtggctcacgcctgtaatcccagcactttgggaggccgaggcagcggatcacgaggtcaggagataaagaccatcctggctaacatggtgaaaccccgtctctactaaaaatacaaaaaattagccggacatggttacaggcgcctgtagtcccagctattcgggaggctgaggcaggagaatggcctgaacctgggaggcggagcttgcagtgagcagagatcacaccactgcactccagcctgggtgacagagcgagactccatctcaaaaaaaaaaaaaaaaaaaaaaatttgtacatcagcaactgaaagcgttgaagacaaagctggaaataaagagtttctatatgttcttgaaattttgcatgttattaaagtatatatctcttttacttaggtcttctttaacttctctgagcaacattttatagtttaaagcgtacacacgttcacatttgtcttagcttcctagggctgctataacaaattactatgaacaaaaatttctgttgatctggcttaaaacaacaaatttattttctcttagttctagagactagaaatctgaaataaaggtgtcagcagagccatcctctttcaaaggctgtagaggggaacgtgttccagaatctgtttctttctcttcgcttctggtgtcaccgttaatgtttggcattacttgatttgcagctgcataacttcaatttctacctccatcatcacatggcattttccccctgtgtcttcacattgttttcttataaggacaccagtcatattgtattgagagcccacctactccagtataacctccttttaactaattccatctgaaatgaccctgtctccaaataaggttataacctgaggtagcagaggttaagacttcaacctatatatctggagaacacaattcaactcataacaacatctgttatcagatttagccataagtatttcacatttttgatgccattataaattgtattattaacttacttttaatttctgattcgttgttgctagcatatggaaatacacttaatttttgtgttgatcttatatcctactt

SEQ ID NO: 96641 - DNA, 13695 bp, Homo sapiens
accacgtctggctaattttgtatttttagtagagacaagatttctctatgttggtcaggctggtctcgaactcctgacctcaggtgatccgcctgcgtcagcctccaaaagtgctgagattacaggtgtaagctaccatgcccggcctgattttgtttttaatgatgacaaccactctgtatggcagagtgagacatctgatagacttctgttacaattttcgaagaaagtaagtggaaactaataatgcagatatttttcatttgatccctgagtggagttcctagaatgctgcatcctttagtagccacatacccagtccttcttaccctccctgtctatcaaaataacactcctagtcattgctgccttttgaggtgttgtggaggctctcgtaacctgaaaggttgttcttttcatctcacgcccttatttatattcttgaggcttggcaagtcagccagcactgggtttttaaagtgtcattaagtatatgatttgaccacagagcaagggtggagattttatctactccaaagtatttcaaatgagtgagtccagattatttagtgagactcttttacttctccaataataatgccatcttatttgaataaagcagttattcaaagcctcttttagatactagacttaagaatctgctgaaatctaaggagctattcctgagaaaaatgcacataaataattttgcatataaactcagactatttgtggatctgcttcagaatatctggtacagagaattacccttcaaagtgttactgtacacactttgaatagttgaagccttcgtaggtttttaaaattttgttatatggcaaatttcttttcactggtatttgttatagtggaatatattcctgtgttcctccttactgatttaacctttaaaaatatttttctggggccgggcgcagtggctcacacctgtaatcccagcactttgggaggctgaggcaggtggatcacgagatgaggagtttgagactagcctggccaacatggagaaaccccatctctactaaaaatacaaaacttagctgggcgcggtggcacacacgtgtaatcccagctactcgggaggctgagtcaggagaatcacttgaacccgggaggcggaggttgtagtgagctgagatcacaccattgcactctagcttgggcaaccaagcgagactctatctaaaataaaaataaaaaataaaaaaaattaaatttttttctgttcctaaagcaacattcagaagtgaaactactggtttgtatacagtttttttttttacatttgctatctttgggattgtttgatttattaagtacctactcagtagttgaaaacactgtcagatatattacataattttcattcactgtagtaattatatggtataaatacagttgtccctcggtatcttcaggggattggttccaggacccttgtgtatacccaaattcatacatactcaagtcccaaagtccaccctgtggaaccagcatatatggaaagtcagctctctgtattcaccggatgtgaaacatcacatctcacaaatacagtatttatttctttatttctcacaagctttttcctctttaaggagcaggcagacctgtattttttattgcttttggtataagtggatctgtgcaattcaaagctgtttccttcaagggtcaactgcagtagtattcccgtcttataaataaagacactggaggctgagaggttaagcaagctggctaagataatactaataggtaataggtcaagattggaacccagatcgtcccctcccacagtctgtggtcttttcagaaactaattttcattaaaaaaaaaaatacagatatctgtcttatcatagcaaagttcacctttaataataacaaaacacaaaatatatacacacaaacataactttaaagaaaattacgatgaaagagaaactgccaggcacagtggctcacgcatgtaatcccagcattttgggaggctgaggcgggcggatcacgaggtcaggagttcgagaccagcctggtcaacatgctgaaaccctgtctctactaagaatacaaaaattagccaggcgtggtgactcgtgcctgtaatcccagctactcgggaggctgaggcaggagaatcacttgagtccggggggtgtaggttgcagtgagccgagatcgtgccattgcactccagcctgggtgacaagaacaagactccgtctcaaaaaaaaaaaaaaaaaaagttaagatgaaagagaaactatacctaatgtcctgctaattctggcaaatcaaactaggaattttaccacatttcttcacaactcaatattaaacagaagccatggtggtatgaagggagaaaagctgctatgaaagaaggaacagaaaagtttagggaggtagctattaggataagtgtatatgttagagtgtgggactcaaacctgactgattcctggctttggctccaaaaagtctcttaaaaatccatttgttataggtaagtgttaacagcaaaacctcactggagaaaaatagtggactcgtgacttcttcctttatttggttacagggagacatgtgacctttgtcatccaccctatcacgtttgtgttgagcagtatgggttgtgggaaagagctcaagaatgcttggaattaacctaaactcctagaaaaggaactgaaaatataggagaaaagggtgaagaaaagaggaaaggaaatggaggtctgtattgaaccctgggtagcaactcttgagcgaagaaagaggaaaaaggggaaagaggggagctaaattatctctgaggcaactcagtctcatggttgcctgaactagtctatactgcgggaataaggtagacgccactggtttctttgaagtaccagtgcgcttcttgctttctattcctggtcacagacaaatttatcagtagtgcagtttcttctttttaagcttcatttaaataattattagtagcacttggaccttaggttaggaaatcactgtttaatgacttaaagattaaccggcatggaaatcccattctttatatgattggggagagttattgaacttgagattgttttactttgtagcaatgtctaaaggcagatttgttttgttttgttttgtttttgaggcggggtttcgctcttgttgcccaggctggagtgcaatggtgcaatcttgtctcacccgcaacctctgcctcccaggttgaagtagcagggattacaggcatgtgccaccacgcccagctaattttctatttttagtagagacgtggtttctccatattgatcaggctggtctcaaactcctgacctcaggtgagccacccacctcggcctcccaaagtgctgggattacaggtgtcagccaccgcacctggcctaaaggcagatttttaaaggtggaacataatgcaagtctgcctttcttaggatgatctaagttacatgttaataaagttcttggagatctagcatagaatgcattcagcactgtaaatcacaacttaatgtttgccttgatatgctctgttgctctgagcaagttgtgtgggctgttatctcctgagaaatccctgtaaatggtattagtaatactttataagcaggttgggagaatatagttttctaaggcattttgaaattcttagatgaaagggtctttatgtagcaaattggtgtcagcctattttccttcctctgagccagaagaaaataggcaccatagggtgggaagggttggcttatctgttagagttcttttgtaagtagcttttgttgaattttttttttgagatggagtctcgctctgtcgcccaggctggagtgcagtggcgcgatcttggctcactgcaagctccgtctcctgggttcaggctagtctcctgcctcagcctccagagtagctgggactacaggcgcctgcaaccacgcccggctaattttttgtatttttagtagagacggggtttcaccgtgttagccaggacggtcttgatctcctgacctcgtgatccgcccgcctcagcctcccaaagtgctgggattacaggcgtgagccaccgtgcccggctgcttttgttgaatttaaagtggatgtgagaagctcctaagaatatcgttcactgtaaaagcagacttttttggatttgggtcttggaattcttaactgtattttcacctaagatttaaaacaagttcaaatactagtttgtaattggccagacttgggacagatacgatccttgaatgatcctgggtctcaacttacctttctttcatttttcctttattttagaagagggataagaactttttctgaagagcagtcaacttttcctttcagtgtgtaggattaattccacgaatctgtgaacttaaatctttgctgccaaataacttgcagtagatgctgggatagttttaaatctattttaagttatacattcagtacataagtgcatctccgtgtaaaaacagctatgtttggaagatctaaaacgcagcttttgtttttgagaagccaacaatctaatagggtaggatcatatatatgtacaactaaccgtaatgcatggtgttttgaaaaatgcacgtatctccctgaattacccctagttaataaaataattgggagcaaatggtaatataaggattttggagtaacttaatactactagattttgctgtttatacatttacaaaaaactttctgctaatgctaaagaaatagaacaagtctatatgcataaaggaaggtagggctaatttacttcctggtgctatgaaactggcaattggacaggtgcaattgtgggtgtctttttttttttaaggtgtacctgttgcaggtttgaaaagctgttgatgctcatgggttgtttgtgtgcatgttctctttaaaaaccagatgtattcattccctttttttttttttttttttttgagacggagtctcgctctatagcccaggctggagtgcagtggcccgatctcggctcactgcaaactccgcctcctgggttcacgccattcttctgcctcagcctaccgagtagctgggactataggcgcctgccaccgcgcccggctaattttttgtagttttagtagagacggggtttcaccgggttagccaagatggtctcgatctcctgacctcgtgatccgcccgcctcggcctcccaaagtgctgggattgcaggcgtgagccaccgcgcccggccattcccattgttatgtatactttgctatttgctgctggtgagacagataaggagtcacgtctttaactgcacttgagtttccagtgaccccattaaatccaatgggtaaattttcccacgcagattactcacccagtttacagattaagctttcatatccttagactgtatctgaaattttcatagctttgcccaccttttagggttcagagttactacccattcagtgtcggtggcctttagctgttggcaagcttccaagtaaatagctcttttgcagagatctctacccattctattcttccactcctgggtagtggagaaccaaagttcacctgagtaatgcccgtgcccagcacccagtttcctgcaggggttagcacggatattggaggctcccccgatcccacagatactcaggatgggtattggagggggcttggtttttaagaggacatgtgaaagtaattaacccgatttacatttgtataatgagtccaaacaccaccttgcaaaagaactgagagtttagcctgcttaatggagtttctgcttttcacggtccttggccttaccgacggtttacagtccagccagatttagttcacaaaaaaccaaaaccaggtcgacctcactgcagtatatgatggcagcgagcgttttaaagcgcaggacctttagtctcctcaatagttttgtgtaaagttgtccaaaagtgtttttttttaaagtgaggtgatccagtcggtaaacgctttgaaaaagaatagctgtcccctgagcgggcattagtcgcgtgtgaggtcagggcccatcattgcgcgtgttgggagcgccgcgctggtctatgagcgagcgcctcggcttgtggctgggccgggccggggcggggctgtcttcccgcggagcgtgctgggggcgggtcgcgccgggccgggccgctagtgcgcatgggcgggcgtcctcggctctaactgccgccactttccacacgctgggagggccgttacctcagagatacccgtggccggcatgttggttgaaaaagcttcccggaagggagacgaagagaaaggagaggagcagctcgtgatcatccccggtagcgagtacgcggcgaagtaggcggcggcggagggagcgctgatgaagatggatgtgtcagtgagggccgcgggctgctccgacgacctcagctctggggaggccgacgtagacccaaagctcctggagctcaccgctgacgaggagaagtgccgcagcatccgcaggcagtaccggcagctcatgtactgcgtgcggcagaaccgggaggacatcgtgagctcggcgaacaactccttaaccgaggctctggaggaagccaacgtcctctttgatggcgtgagccgaaccagagaagcagccctcgacgcccggtttcttgttatggcttctgatttgggtaaagaaaaggcaaagcagttaaactcagatatgaacttctttaatcagttagcattttgtgactttctgtttctgttcgtgggtctgaattggatggaaggcgatcctgacaagttgagtgattgtgatgatagcatagctctttccttctggaaggcaatagaaaaggaagcaacatcctggatggtaaaagctgagacattccattttgtttttggttcattcaagctagaacgttctgcaccaaagccccgacttgaacaccagaaaaaagttcgcaagatggaagaaaatggcaacatgcctacaaagttgcagaagttggacctgagtagttatccagaagcgacagaaaaaaacgtagaaaggattttgggattgttgcaaacctactttcgaaagtatcctgatactcctgtgtcctatwttgagtttgtgattgatccaaactctttttctcgtactgtggagaatatattttatgtttcttttattgtaagagatggttttgcaagaataaggcttgatgaagacaggctgccaatattagagccgatgaatgttaaccaratgggtgagggaaatgattccagttgccatggcaggaaacagggagttatatctttgactttacaggagtggaaaaacattgtggcagcttttgaaatttctgaggctatgattacatactcctcatactaaagatttcttagtatagcatcctttttgtgttttttttctgaagttagatggagagtaaaatgtaaactgaagcacatattgtatctcttgtaaagtgaaaaagtattttcaagaacatcagacattgttttactgtgcagcatatttttcttagtaatttataaggtcatgatcttctgttattaaaacaaattcactggcatatttatgggaacgttttattgaatgccctttaagactattaataaaaacaagttttggataccaaattaagggatatttgataatttgcaaaacataataatttacgaaaatcagtgatgatgctctgtgatgcgttgctttctctgtcatagggaaccaagagaatcccagaaagggttcctaaccaggttgggcaaagagtgggtaaaaaacaaaagttaaaaaaaaaacctgtctgtaaggcagtgaatatgcaacattaagactaaaaaagtcattgcaaggaagacttaggatttatgagtgagtatccatattctaaacaatttctgttattgtactcagcaaaagtagtgtctctgctgtagtagttgaggtatcagctaagggtgaaaggtgagtagaaacacgaagaaggaaaaggcattctaggcaagagaatagcaaggtcaaatgcatggaattgttagaagttaggcacgagaggaccattagatttatggaaaaactattatatttgataagctgggcaacaattgaataacttcatctattaatatcctgagaagatgtttttgtcaaactattatacattgaacacaagatcttgctatccagttgtagtttttatctactgaatttcttctctggcccctagtgtccctttgtggtctttgctagtacatagaatgtccttcacaatctacgctttttcatcatgtaacaactttgaatatttgtcccactttaattttgcatttctatctttttttttccccctcgagacagagtatcactcttgcccaggctggggtgcagtggtgcaatctcggcccactgcaacctctgcctgcggggttcaggcgattcttgtgcctcagcctcccaagtagccgggattacaggtgtgtgccatcacacccagcaaatacttgtatttttagtaggaacagagtttcgccatggtagccaggctggtctcgaacacctggccccaagtgatccacccgcctcggcctccggaaatgctgggattacaagtgtgagccaaattttgcatttcttaatagggctttaaatgccaggaaactgaccttgctgaaactaaaacatgttagtttatctggatgttcttcacttagtgtaaagccataaaggcttttttctttccgttgcataaattacaaccttatttggagattattgccaaaagtttgggtcattaagaaagtaacttgagaaggtgcagtaagcatacccataagctttcttccccttgatccctataggagcttaatttttggtagtcgtggaattttgccattaaacaatactttggcaaatgtttaggtatctgttatgcatagcagtggcaaactttcctagtaagtctagtggtacaggaaagggaaatccaaagactcaacaaatgacaccaagactgagaggaaggatttttcatgtatggagatgaggttcttcaccaataatagagtagaggttttagcaaaaatagaactttctcatgaaacttggcaaattattttctaaattagttactcctttcacatatgaaagagcgctgacccttgctagtgtctagtatcctttgatttatagtagcagtcatggaagcaccatttgatctcactcatcctcatttccagcatgtctctaccaaccaagttccttgggttttgcagagatctgctgttggaagaaaaagtactcttaatgacagcaaaaagatcccgccccagtactttactgacattcagttgctctgttgaatgtctcatgtctttactaggagtatttgacagtgatgatttaaaagcattaatagagaatctggaggcttaggagaggtaatttttttggtcttctctaaagttaatagctgttaaaatataaagttgaccacttctgtttctatttttactggttggcatgacaccaaccagtaaaatgatgaggatgatggattgcctcatcatttttgaaattttgaaattaaactgactgcttaccttgaagaaaaaaggagattaaaaatttatagaggttaagaatcaaactgcaaatctgcttgtttcttgctaatacgtttgtatactgaatagaaataacattatgctagtctgtctatatactggatcaagatttgttaggaagagggcatttcaaaatagtggagattgacgcagggaagctcagcggaggacaccagtgtaaatacattccagcacttcttgacttagttccaggcaatttcccttcttcaggagatggagaattagtaacttaaagggattaattcctaccagccactatgctaacatgcattatctttcttaaactcagccatttgatgaggtcaggaacctgttagcttcgttaaggattaggtgattggtcgaagtcacctggccttgtgagtggtagagcaagtattttaacgcaggttatttctgcatcagagccatctataatggtaggggaaataaaagtacaaatctggcaaaggatagaaactatgtttaggggaaaagtcaggattgcttattccaattttaaaagactgccacagttgaattgctttctgttttgtgccctttttgggggagcctggagcagtgttttactaggagtgggtctggggaaagggattactatgacaggcaggtggatgaaaaggaaggctatctaatgtgtaagccttgccaacaagtgacagttgcctgcaggtcatctcatattctatagcattggttctcaaagtgtatgaggcccttttggcatactttaaggtcagaattattttcataatagtaagatgctgtttgcccttttctttcttttttttttttttgagatggagtctcactctgtagcccaggctggagtgcagtggcatgatcttggctcactgtgagctccgcctcccgggttcacgccattctcctgcctcagcctctcgagtagctgggactacaggcgcctgccaccacgcccagctaattttttatatttgtagtagagacggggtttcaccgtgttagccaggatggtctcgatctccagacctcatgatccacccgccttggcctctcaaagtgctgggattacaggcgtgagccaccacgcctcgctgcccttttcactcttaattctcttgcatgtaaactgtgaagttttccagaggttatatgacaggtgatgtggcaacagattgaatggagaaacagatatgagctgtcttttgttgtcagacattaaagagaatcgcaaagatacaaaacagtgccattcttctaattaaaaaattttttaaaataaaaatacgttaacatttaataaatatattatttttaatttgttaatgaatattttaagtttcttcttagttttaatttctaacatagtaaatagataaaacccacattaacaagctctttggagtctcaattttaaagctctgtttaagattgtaaaggagtcctgagatgaaagagtttgagaacctctgtagcagccaccacagtcagcggacataatttcaagcagttgtagttggaggaggatgggggaatttttctcctttccttatcccatctctgtgctaccttctactgtttggggcagctgttttctactgtctgtcttatttatatttcaggtgaagtaccacttaaatggaactgaatgatagcactttcaattttaagtttggttaaaattttaaaaacaatgtttctttttttttttttttttgagacggagtcttgctctgtcacccaggctggagtgcagtgccatgatcttggctcactgcaatctctgcctcctgggttcaagcagttctcctgcctcagcctcccgaatagctgggactacaggtgcacgcctccacgcccggctaattttttttgtattttggtagagacggggtttcaccgtgttgcccaggctgattgtgaactcctgagctcaggcagccctcccgcttcggcctcccaaagtgctgggattacaggcatgagccacctcactcagtctcataatgtttcattctaaggtcaactgaatgcttcaattgcctgtgtcttgccaattggtaaattttacctacagtgcttaaaaatggtgaggttcattcagagcttttttggtaaaatctgtgcactggttgatacaatttgacttgaagcttgaaccaggagaagccaggttacatacagaatttcagtaaggaacggattgtaaacattggtgaagggaatatgtgacttttcagcatgaggatacattttctggtatttgttctagtaggtatgttggaggagggggattcctagaaccatggttttcatttagacagccagttattgtgttctgtcaccatctttgctaatttcatgcagataaaatgaggttgagataaaaaatgattgtatgttatttttccagcagaacatctaactggatttattagttaactcttaaaccaggaagtcatgctctttgagacccagtagggagtcacactagttacttgaagcataattgatcctttgatcgaatggctattattaccaaattgtttttcccccacagtgctttgtattgaaggaggaaccttggccataatgccagttgatgactactggctgtgtttaccagcctcttgtgctagaccttttgtgcagactgtcagagtggtgcagtcttgcccccactgttgctggtttccaggtgttctcccttcagtccctgagccactacgtatgcccgccatgctgccaacaggtagccacagtgctgtgcttcctccttcacattgctccaccgcacccccttccacatcccaagaaccttcttcttccgctgaccccaagctctgcctttcaccccctacatctgatagtaggcaagagagaaatgtgcagtttgggctggtaagtttgggggcttttttttgttattaaagttaaggctttttgtttgtttgttttttaaaatgagatggagtctcacagagtgagactggagtgcagtggcgcaatcttggctcactgcaacgtctgcctcccgggttcaagcgcttctcctgcctcagcctccggagtagctgagattacaggcacccgccactacacctggctaatttttgtatttttagtagagacagggttcaccccgttggccaggctgatctcaaactcctgacttcaagtgatcctcccgccttggcctcccgaagtgctgggattacaggcgtgagccactgtgcctggcctacttgattttttgaaaacattttattgtgcttgttaacaactttctcagtcattatctcttgttaacatagatttttattttagtaagcgataatattaaatatatcaccaaaatattgtatgaaacgaatatgaaatataattaatgtgtatcagaattatattagtggaatgaaatgattttttaaaaattaagtctaacacctaaattataaaagtctgttacttgctaagtatatggaaagtaaatattaaatatgggagacttcatgcatatgcaaattaaaggaatgagctttgcagagttgtgcctatttaaaatatcctacaaaagcagcaactttcacgtttaacttttcatgcaggtcagtatcaattgacagttttgttctgaatttttagatgttatgccccagccaaacagtatagaaatgtcttaaataaatatttggctggtcttttaaaattgttatattgagattaagctatgcccatatttaccaagcccctatctttaaaacctagtttaaaaattctaggaaaaaaaggctaatgattaaacctgatttagacctaagttggtttacttatgtagaggtactatacgaacacttcaaagtagttagcagtgaccgtctttggggttaataaactaagataaagcaagcagttcacaactttaaggaaggttgaatatttccatctgtatgctgtaattaaacagcatcttccctttgaaaattccttttgtttttctttaagaaaagattt

SEQ ID NO: 96642 - DNA, 13066 bp, Homo sapiens
actccactctccatggcaccaatttaatatattagtccattctcacactgctataaagacatacccaagactcggtaattcataaaggaaagagctttaattgactcacagttccaggtggctggaggggggagcctcaggaaacttataatcctggcagaaagtgagagagaggcaaagacacgtcttacatgaaagagagaaagaggaagagcttgcaagtgaagggacaatggccccttataaaaccatcagatctcataagaactcactcactatgatgagaccagcaggtgcgaaactgcccccatgatccaatcacctcccaccagatcctgtccttgacacgtggggattatggggattacaattcaagatgagatttggtgggggatacagagccaaatcatgataaatctagtgtgacttcatgttgagacagagtcagtggcctcactattgaatacattagcctgttctttaccacactcgaaaattagccttgctagtgttctctaattctctaaggggcatagcaagagtgatctgtgccacagttcccaattcgttctgctccactgagatgacagtgaagttttgagcaatgtagttaacactagagaatatgttcacattgaaaaactggaagaaaagggcaagagtcactatttaaattccatcccacttttcaacattgttacaaatctaataaacacatattttataattgaataactacactgcataagggagaaaatcaccaataaaaaaatcatgtggtttgattttaaaaaatgaagcttagagtgtttggcaataatacctatgttaataaaaagaagtacagaaataaaaatacaaaaggatcaagtcatggaagttcatatgcattcagtgaatatgacataaaaaggctgaattctctcatgaaatacatggcacaccaaggaataagaaacaatattcaggtcccagagtaccacatcaatgaaccccaaatattctggattaaagaaagctgcctttgaaattgttggtaaagaagtagatcccactatagaaacttggagtgggatagggtgggtttggtgatatgttcagcttcacctgagaaacacttcccttcttggacacatgtccattcatcaccgtccccagcttaactgggcttatacgctcacagttttatctcctccctagacccttccacaatttcttgataatttcagcattccaagtagaagacccaattgacctgcaaccaaaactatgccttccgaactctgagatgtccccacatcatgcaccagaccccaaatcctgaccagaaaaatcttttgtcagcacagatccctctctggaaactgaactcagtgtgtaattctataatcacagacatatatcccacgttcgttgctctacttccactgaactgagtcaacctctttaacacttctacttcctgcgagtgcttaggtctcctgtggtcacctctctatcattcgcaagacaggaccactaaaaattatcacattaacaattgtaatttgctgttgcatcatctttcccctgaaaattgtgcaaacaaaaaatccagatgggtcaagtctcaatgtagtgtccctgctccttcccaatgaaggacatgcacaaccatgaagatggtgcctttacaaacgaacagtctccatgagtcacatcagtcctagtccatcctttgataaacattcatgtctgcctcttcttcctctcattgaccatttaaaacctgaaatacgctactagagaccccttaacagtttatctcactgaaggctattacgacaagcagaaataaaagcaccagaaagataagtagatatggaagcaattgtaagtaaatacaatttttaaaaactgttttgcctggaacattgattggatgaaggcacgaacaccgacctgagatagtggcttcctgttggcacagttgatgcccccaatgaagaccatgttgggcatgatcggcctggggtaatccatcacaaagtcccctcggaacagccacacagatgcatggctgagaagatccaccactgacacctccctctgaaaaagctcagaggcaaggcttgcataaggagcagaaagagcatggcaaaggtaggacagggccagagggtagagcatgttcttgaccctttgcaggaatgtcatgtggtctgaattggtcgttagtaacttaggaatataggaggaaggatttggacactgtgtgcccttaaagtctaaatcacatggaatgttcctcaaaaaaaacacagcaggaattgataggtacttagccagcactgccccacagaggtaaattgggtctattaaaaccacatcgaaggaagtagcattcaggtgcctgatcagggcctcattatgcagtagctccacacaagacctatgaaagaccaaagatgaatttttcaaaattgccatacttttagaaaatgtcttcagaaaatgttctgtttcaaagtacagttgagtgtggcccagcacaaggcgatcaaattcatcctgggtccatgaaatggcataggttgtcagggtgaaaaatttctcttgtttgatgtgcatattcacctctggggtgaggaccaccgcctggtggcctctggcatggagctcccgcacggcctcccgcatgcgagccagtggctgccatcaatgggtaccaccagcaccttcccactctcagcccagggctgggcactgagaaggagtagcactcctgtggccagccacagcaggggaacctggggtcctgtggccatctcagcagaagacacggacagctgactgtccaccccacgctgtgcctcctacatttgttttcttcatcttaattaccttgtcactgagccacttagcaaatcatcatgtaattggaagatagagtgctctcctcctagttaattattaccgattaaccaatcattgtctttcattatgggtcccacttcgggaaagaccgatcactcctacttgaaaaactcatctgaccctgcgctcgctctggggaacatccaagttcaagctcttgtttctcatccaattcccaacaaaggcctgtggaaacccatttcatgtcacagcctcctacttctctgttaaccacgtttatcaggctgcagctgaggtctgagaggtccccaacagtggtaggcaatagtaggcaatccacattcacgctcatgaattacaacagaaaaccactactaagcaatccaattaatctctgctttggaaccaaagcagaatccattgctaattcccttatccaccaaatatttatggaatgtgtgagccctacctactatgctaggaactcgggacagaaagccaagttagaaatggtccttgcctgaaaggaggggtcaggtgaacagagacaaactcacaactaggcaattacagggtgtggtgctctaggggctaagaagtcacacagcagggcagcaatatgatggtcttgctttgggggctactaaagagtgacatgtccatggaaagtgtttctggaacccttttgaaggtactttctttttaagctgaagacataagttaataggtcaccattggacacactcccagctcctttcatcaaatcagaatgaagggacttgttactaaaggagcaacataaacatgtccattgccctgtagatcatctacagggccctccaagggaaacaaagccaccttccttgaatccccacagcgttttgttctgttctgccttgtatcttttagcagtttgcatatctgtccttgctattagagtatagctatatcctatacatatattccttacaggcaagattttggctttggaatcatgctatcactcaggtgccagtccacagttttgcagacagtaagcactctggacatgtttctgtatagaagtgactcctcttctcttttcgttctagaccctgcatccaagccagcaagtaagtgctgaatctggatgtttctaccactgtctctcagacccagctgtcatggtcccatttcagggcccctgtcccccagttgcccaacccccagctgtcccttctgaatcactgcctcagctgctccctgaaaaacgccaccccaccaacacttctggaaccttggtcagcagcttcctgggcacagaagaaaattcagagtcctctgccttgctctcaaaactctgggatagaccccagcccccctgtctaagctcattcctcctctccaccccttctgcttgccccctccctctgcctcttaccctccagccattctggatcacttgttgttctccaaacttgctttgatgttcccaaattgctttgttcacactgaactctaccctcggccagctttctatgactgttcattgtgtgcttaccaagtgccaagtccgggtctcaggttatgtcactagaggctatataaacttagaagtttgttctggtgacataacacatccccattagacctaataccctataggaaatcttagaatgttctttggttaatcattttccccttagaactgagtgacctttactagtgtattgcctcacaatttatcaaagaaaagaatccagtgtcaaaaagagaataaggaggtgaagagaactcagatctcaaaaaaattcccccaaaattcatggtcatgatatagcagttctagtggaaataatcactgcatcccacgtttatccccagtgctatacacacggcctgcaagtcttaatggtttcgatacagtaaatagtgctgtatttccttttgtctgagaggatctccctggttgttttagcagtcaagaaaagtgaataacatgcacatttgaccctccatatacttgggcttcacatctgcagattcagccaacagcagattaaaaatatttggggggaagagcaatgaaaaaacaatacaaataatacaaataaaaaaccaatactgtaaaacaactatttacatagcatttacatttattaggtaaaagtaatcaagagatgactagaggcttaaagaaggatattggtaggttatatacaaatactgtgtcattttataaaaggagcttgagcatctagattttggtatggagaggagggttgtcctaaactaatcccttcagaataccaaggactactctgctagactagcgattctcaaagtatgagccaggaaatcctagggatccccaagaatttttcaggagaattttgcaaagttaaaactatttccataataatgctacttgattttttcaccgtcattctctcacaagtgtacagtggagttttccagaagctacatgggtgatgtgtaatatcacagtagattgaatacagaagctgacatgagaatccacctctctatagagccaagtactaaagagagatgcaaaaactgtaaaacgatgccactcttctcactacattttgtcttaataaaatttacataaaaataagatttgctattgtgtcatgggtttattcttactaaattgcccaattaatatgtctttttaattctgttttaatctctaatgcagtacgtatgatagatataatccacatgaacaaaagcaaatgggcaccggggctggaacgttggagaactgcagtcctaaacaacaggatgtcttcagccccagtcagactaaactcactcccaccaccctcttccctcctgtggccgaggaaaaagactgatataaagcctactttaagaaaaacagttcttcaggcagccaaagtcaaggccctctcttttccccaacctctttttcccatcctttttggagaccatggctggttggaggccggagtgggcggggcctggtcttggagcatcacagggcctcacagagcctcacagagagcagggccagtcccagaagcactgcatcttgggatgcgaggcgctcataggcctcgaccaatgagatgtggctgcgtcataaggggcgtctctccaggcggcccaggtctccgagcactcgggcctgcgcctgggtgctggcagccttgccgctcgctgtgccagtgcctggtgggccgttctggccatccagcatggtggactactacgaggtgctggacgtgccccggcaggcctcatccgaggccatcaagaaggcgtaccgcaagctggcgctcaagtggcaccccgacaaaaaccctgagaacaaggaggaagcggagaggagattcaagcaggtggccgaggcctacgaggtgttgtcggacgccaagaaacgcgatatctatgaccgctatggcgaggcgggsgcggagggcggctgcacaggcggcaggcccttcgaggamcccttcgagtacgtcttcagcttccgcgacccagccgasgtcttcagggarttcttcggcggccrggacccattctcctttgacctcttgggaaacccgctggagaatattttkggggggtcrgaggaactgctggggaagcagaagcagagcgtctgcaccccttttctctgccttcagtgaatttccagcttttgggggtgktttttcttcttttgatacaggatttcgttcctttggctccctgggaagtgggggcctttcttccttctgcatgtcctacggtagtgatgggacaggcagcttcaagtccatgtcgacttccactgaaatagttgatggtaaaaaaatcaccaccaagagaatcattgagaatggccaagaaagggtggaagtggaggaagatggagagttgagttaaagtccttcataataaayrgcawagagcagttrctccscattgacaccaagtaattccagtccacatttgactttaagcacatctggaggaatagcggactttttttaggattgaaagtgaactttactttcagaacagctgtacccaagaatttataaacacttyatgccaayrcctgttcttatygttgggactrcacggataggacctctgtttgtctttcratcrttgtaaaatatctgtatgcaatttgctatttattaaacttaagcctgaggcagacaatgattatttgctagtggtaggacagaatgttcagttcagcactttgagcattacctttttccgttgggaaagtgtgagccaggtggtttgctctaaatcatttgactttattgtttagtgtgtagtggtgaaatctacaaataatatcaatacttctggcttaatttaatgatggttcaaaacaacatgcatttattatcttaatattttggaggtcagacatttgaatcccatatcactgagctgaaatcggtggaagcatgttccctctgaaggctgaggacaaaccttggggttacatggttggtcggtggtatactaggactgtcttcagcctgaacgtggttctccaactatggtaggttgctggggataagcccccaattccggccagaagctggcccctaaactggccataaacaaaatctctgcagcactgtgacgtgttcatgatagccatgatgcctatgctgaaggttgtgagtttactggaataagggcaaggaacacctggcccacccagggaggaaaaccgcttaaggtgttcctaaactacaaataataacatgagccatctgtgccttaaggacatgtttctgctgcagataattagccagagcccatccctttgtttcccgtaaggaatacttttagttaatctataatctatagaaatgatgcttatcacaggcttgctgtcaataaatatgtgggtaaatctctgtttggggctctcagccctgaaggctgtgagtcccctgatttcccactccacactctatatttctgtgtgtgtgtctttaattcgtctagcgctgctgggttagggtctccacgaccaagctggtcttggcagtgggtcctggaaatgtaaaaaaaggatctccataaggccacacagaactatcctattgctatgcttgggacatatcaaattaggttgatgaaagccaagtgtatctgtaatattttttgggtgaggcaccataaacacaacaagaaagtacctttctgttggcacaggttatgccccaaatgaagaccttttccatcacaaagggtcccttcttctagggtcacctctgaggaaaggtttgcataaggcatgagagcaaaaggcaactgaactggataggctgaaaaaaattaagagcagcatgctggtaattttttacagaaaaatcatggcctgaacacatcattaaccaacaaagagtgtgatatgggtttggatatgctctagaaccctcagagtccactctgcatgtaatggcacccaagcaataaacagcaggaacatggcagtcagctggcaccatcccacaggggctcatggggtctgacactgaactctgaaatcaacatgctccgaggtgcctgggtagttgattctcatacaataaccataaaagaagtatcagaataagacagactgttaaggcttttgaaaaatgagttcagttttttgtacatcagacgagggaacttacatgtgtgaagatactcactgagtagtttgctgagtaggtttgcttttggagcagttcagggatgaaaggagtttcaaagtggtagaaaggcatgggcagtttcattgtggttttgtgtgttggaaatcactactctgggtagagtagaatgagttggtgtgtatctacacaattgggtacataaatcccattgttcagtggtcagcaaagagtggcataccagtgtcactcagaggtagtgggtctgtaacaactctggctagttttaacagttgaaagcaaacacaagttcagttttgatatatcctggattagtgctgtcataaatggaaagtgttgcttttatagaagtgtaaagcttgattgtctgtttgcttgtttgttttaaagacagggtctcgctctgtagctgttacctaggcaagatcatagcttactgtaaccacgaattcctgggctcaagtgatccttcctcctcagcattcccagtagctaggactacagaaatgctaccacacctagctaattaaaaaaaaaactttttgtggagatgggaacaatgttgacctactatgttgtccctgcaagagcattttatttaaagaatttttagaattgaaaaatctccttttaaaatgtctcagctcaaaaacagaacagtgctagagcctgttatgtgggtattcatcttttatacaacggtttgataaggttttcagagtgtaaaagggggcatttcctgtggtgcaaagatgaccctcttgaaatccctaaaatgaacaccctccatggaaacacctgtaccttctcaccaagtacactgggcaaggaaaggcatgaccctgtgagccccaagagacctggagacctgtaaccatttcattagggtcccaaaaaacaaaatgccggacattttttctggctggagttcaacacagctgattttagttcagcttacatcacacactggaaagcatctggaagagggaatgatcctttctgtccatcatcttcttctcctctgattccactttctgtctccaaacaggtagagagacttccccattttgggaaataattcacacaacaacttacctttctaggaatttctaattccactttctcatcaactttctcaataaatgcagattcatttccttttctcagactctcctttaaaccctttcagtataacttcaatcaccaccaatcttgtattagtctattctcagcctgctataaagacgcagctgagactgggtaatttataaaagaaagaggtttaattgactcacagttccacatgactggggaggcctcaggaaacttacaatcatgacagaaggtgagagataagcaaaggcatgtctcacatggcagcaggcgagagacagagaggaaaagcttgtgagtaaaggagaaagagtcccttataaaaccatcagctctcatgagaactcacttagtatgacaagaacagcatggggaaaactgccgatatgattcaatcagctcccaccaggtaccaaccttaacacatggggattatggaaattacaatatgagatgagatttgggtggaaacacacagtcaaatcatatcattctgccctctggcccatcccaaatctcatgtcttttcacatttaaaaaccaatcatgccttcccaactgtcctccaaagtcttaactcatttcagcactagctcaaaagtccatagtccaaggtctcatctgagacaagtcaagtcccttcccccatgagcctgtaaaatcaaaaacaagttagtaacttccaagacacaatgggggtacagaaattgggtaaatgttcccatttcaaatgggagaaactggccaaaacaaaggggctataggccccatgcaagtccaaaaccaggcagggcagtcattaaatcttaaagctccaaaataatctcccttgacttcatgtctcacatctagatcaaggtgatgccagaaatgggctcccacggtctcaggcagctccaaccctgtggctttgcagggtaaagccctcgtcctggctgctttcagagggtggcattgatgtctgtggctcttccaggcacacagtgcaagctattggatctgcccttctgggttctgaaggactgtggccttcttctcacaactccactaggcagtgccccagtggagactctgtgtgggggctccaacctcacatttctttaccacccttctctagcagaggttctctataaggactctatccatgcagcaaacgtctgcctggacatccaagcatttccttacatcctctaaaatttatgtggaggttcccaaacctaaattcttatcttctgtgtacccgcaggcccaacaccacatcgatgctgccaaggcttgaggtttgcaccctctgaagcaatggcctgagctctaccttggccccttttagccatggctggagccactgggacacagggcaccaagtcctgaggctgcacacagcagtgggggcctggacccagcctaaaacaccatttttccttcctaggcctccaggcctgtgatgggagggtctgctgcaaaggtctctgacatgccctggagccattttccccattgtcttggtgattaacatttggttcctccttatttattcaaatttctttagctagtatttctgcatctggcttgaatttctccccataaaatgggtttttcttttctaccacatggtcaggctgcaaattttccaaacttttatgctctgcttcccttttaaacataagttccaatttcagatcatctctctcaagttcgtagttccaaagagctctagggcaggggcaaaaatgccacgagtttctttgctaaagcttagcaagagtgacctttgctccagttctcaacagattcctcatctctatctgagactcagcctggacttcattgtccacaacattatcagcattttggtcaaaaccgttcaacaagtctccaggaagttccaaactttcccacatcttcctgtcttctgagctctccaaactgttccagcctctgcctgttacccagttccaagtcacttccacattttcaagtagttttatagcagtaccccactctccatgacaccaatttactgtattagtccattcacacactgctataaagacatacccaagactgggtaatttataaaggaaagagctttaattgactccagttccatgtggctggaggggcctcaggaaacttataatcctggcagaaagtgagagagaggcaaagacacgtcttacatgaaagagagaaagaggaatagcttgcaagtgaagggataagggccccttataaaaccatcagatctcataagaactcactcactatgatgagattaggaggtggggacctcccaccatgtcctgtcctcaacacgtggggattatggggattacaattcaagatgagatttggtgggggacacagagccaaaccatattaaatctagtgtgacctcatgttgggaaacagtcaatggactcactactaaatacactagcctgttctttaccacactcgaaaattagctttgttaatgtggaattcttaaggggcatagcaagagtgacctgtgccacagttcccaatttgttctgctccactgagatgatagtgaagatttgagccaatgtagttaactctagagaatatgttcacattgaaaaactggaagagaaaaggaaaaaaaaaggaggtgttggagaggagaacggaagcttcagcaccaatggccaaataggaacagctccgatctgcagctcccagcatgatcgacgcagaagatggatgatttctgcatttccaactgaggtacctggttcatctcattgggactggttggatagtgggtgcatcccactgagggcaagccgaagcagggcagggcgtcgcctcacctaggaagtgcaagagggtgagggatttccctttcctagacaaggggagccatgacagactgtacctggaaaaacgggacactcccacccaaatactgtgcttttcccaaggtcttataaactggcagacaaggagattctctcccctgcctggcttagcagctcccatgcccacggagccttgctcactgctagtgcagcagtctgagattgaactgtgaggcggcagcctggctgggtgaggggtgtccgccattgctgaggcttgagtaggtaaacaaagcatccaggaagctggaactgaacagagtccaccgcagctcagcaagggctactgccgctatagactccacctctgtgggcagggcatatctgaacaaaaggcagcagacaacttctgaacatgtggggaacagcagacttaaacatccctgtctgacagctctgaagagagcactcgttctcctagtatggcatttgagctctgagaatggacagactgcctcctcaagcgggtccctgacctctgtgtatcttgactgggaaacacctcccagtagg
